United States Patent Application Publication US 2014/0057251 A1 - sequence listing, part 132

SEQ ID NO: 242811 - DNA, 1050 bp, Cannabis indica
tatttcacatgcatataaaataaaaaaagtcaatgcgtacaacaaaactctttgagccctatttttgacttgttaatttttctaaatttctcaaaatatattagatgtcttaaataactataacgtatacgatcgtacaaaaatttgaactaaatatttttagatacagaattagatagaggtgcatgagattggatacaccaaaccaagtgcacactgtaaacatctttaactaagatcaaactgtctttttttgttttttttaattttcaaattcattttttaatggtcaaatttgaaacccagtataccatatatgtataattttagaataaaaaataatcatataaatattattaaaaagagtatcatgtctatacttctaaagataaagtactttttaaataaactttgggtggttgcaccacctaaaaatagatgtactgatgtaccttctacctattttattattcaaaatttttttagtttaatttttttatattcatgtacaccacttatctctttattttatctaaactgatatttattttcatatccctcatcgatagaaaagaaaccttaaacatatttataaaactatttgtattttaaaaaaaaataacaataataaaaaaaactacaaaattaaataaattgaaaaaaaatggatcttgcattttataagggaccttttttgtattaagaatagtacttaaaagattcactctattttagctacattttaatttctctgttttaagaaatgataagaaaaactatttgtttataaaaattgtaaaaaatggtctcttggatacaatttttgtcaaactttgttcaaataatttctttttttaattgagcttagattagattttagttgattcgaaaaattaattgttaaaaattaacaacattagtagtctttctcaaaagaaaaaaatcaccaaaaatatgttatggggactattttttaccattgtaattatgagaggattttttttttatcatttttaaaacagatggtcaaaatagaatttaacaataaca

SEQ ID NO: 242812 - DNA, 647 bp, Cannabis indica
ttttataaaaacacggtatttttgaaaagatttccgtatgacagtatttttgtaaaagttaatccaaattacagtatttttcgtaaatttcccatttagtatgtgctttaatatctctctccatatatatatgctacttgttaatcgtatatgtgatcacatattgtattcttactataaattcgtacattattactactgattatgagtattataagttataaatatatttatgataatctatatttatctttatcacatattacttaactactaacatatagacacatatatctagagccggtcttgagctaagacaaaggaggcggccgtcttaggtctcccaccgctcaggccccatttaaaaaaaaaaaaataaaatataattagtaataaaataaataataatacttctaatgttaaatatgtgttgtaccctaatggtaatttggttagtttaacaattaagaggttaagagttcaaatcctaatagcctcatttttttttatgggataagttgaggaatacttattttttgtatccattaatcaaaaataccctcatattatacttcattaaaatgtacctacttttgtaagtgtgttacctaatatatcatcacccttcacttaagtctagcacctaa

SEQ ID NO: 242813 - DNA, 884 bp, Cannabis indica
ttaaaaattaaaaaatttaaaactattattaattatttatattgaattaattttgttaatgtcaaaatcttgacaactactagacaatttattcacaaagagaatagatgtgaagactaaagagaaaattgattgacttcacaatcacatgtaaaattttcccataaaaatagaaaaatgttagggctaaaataaaatattatttagagaataataagaaaaattctttattttaagattatctttattaaaattagctgttacataataatcatagccaccaaataaggttcacatgtgaacaaaaatataaataattttttgtatgtgtatgtcattttcgatacataggatcaaatccgtactattattctcaatagtgttttgaacctaaaataattatagtaatagtaaataaaaaaaaatgagatgtactaaattatatcgtctaaaatttttaaggttattaaaatttttgctcaaactattataattgttagaatttcaaaaaaaaaattatccaatttcgttttattttgctaacggatatctaacacgagtattgtctatgtactaaaattgtgtctctttaactttaatcaatttcatgcgctagttagtaaattgagcgaaaattcttaagtctaacaatctcaataactcggtaaaaattttaacaaacctaaaaaattcgagaagtacaatttattacatttttttttttttgataaagtatttattacatgttaagattcagaaaaatcctcaatggcaaaagaaagagagcatgtggggtcatttgtcctttttgttcatataaattttgtgtataaatttttgaatattttacattttgatctcataaaaattattttttttattta

SEQ ID NO: 242814 - DNA, 952 bp, Cannabis indica
ctaccgacgctattccaagagacgctgtaggggtaaaaataaccgacgccatagggtcttcctatggttttttttttcagctttacaattttgtattttagcataatttatatatatattattttattattaatataattaaattaagtataaattatatataataaccataaataaaaattaaattgaaaagttgaataaatacacatctacattactctaagtgtttgtatattagctatctttttattaatattttatattttatattatgtgtttgtatttttgtagtatattagtatcatttttataattttttttagtatactagtatcatttttgtagtatattatatttttgtaaggaaagggctaaactttgcatgaaattttttgaaaactttgaacattaataatttttgatccggttgtccgtttgaggcgattttttttttttaacttgggtatttttttgcgttctacgcaacccaaagtgccgatttggccaaccaatttttcaaaaaattgttgttttgtatactaaattcatgttatgcacccccacctaattttttttgttttattttgctattttacttgaaataaactagaattcttattttaagtattagaatcaatgtttataatgtatttgttaattctaccacaatgaaaaattgcactactaatttccttttatatctcttctaatatttaaataaaatttatagtagcaaatttatacaaatattgtgttttggtatattgctaaagacttatcaatttatccttttggtcacaagatcaactcttaatagcactcaactatatctatcattagcactcaacaatatctatcatatgtattacatcaatattattctaaaattattctaagtatttaaggattatctaaatatataaaaaaaaaattcttataaaagtaagttaaa

SEQ ID NO: 242815 - DNA, 590 bp, Cannabis indica
attaaaaagaagttagatgctgctaaaggaagatgggttgacgagcttccataagtgctttgggcccatagaactatagtgaaaacaatgatgggacacactctgttctcattagcgttcggctcggagcaatgttacccgtacatgttaacattgcaacccttaggcgtaaattctattatcaagaggaaaaccaataacgtttgaatatgtcattggatctacttgaagaaaaatgcaatgagtcgaaaataaccaatacagctgaccaacactgaataacgagatactttaacaaaagagtctggaaaagactgtttaaagtaggagatttggtgttgagacgtgtatttacaaatacgcgagacccagcagcaggagtgttcaacccaaattgagaaggtccatatgttattgaagctgtcgtaggaactagtttaaaattagcttggcttaatgcctctctaataaagaatcactagaacagtgaacatttacgaccttattaccagtaattttaacgtgtaaatactatatttatctttttaatgattaatcattgttatgaataaaattaaatttgttcaagt

SEQ ID NO: 242816 - DNA, 1603 bp, Cannabis indica
cctatattcctagatcatatcccaaagagacttgagtctggtgtaacattgttcgatccttactgaaggacgttccatagcacatttagcttcaaaaattcatggagcatttttttgactaaacctctcctacaactctgcccagatcgatgaagcattttttgagatacattatactatctccgatcttagccgagacaacacgcagaatcaaagaaatgatcagactattgcatttgcaccaagaatcacagtcttcatcatcttcttcaggttgtggcaatcttccatccaaaaacttgattttgtttctcgcaactaaagcaacaagcatcgatatcttccacgacctgtaattttcagatctagtgagaattttagctacaagcattacacttggatgatctccatgagagagatcatcaaatcttggatttggataagtagcaaatgaacgattttcttttttagaattgtcatctaaattcgaattgcttcgagtctgagctactcttccttcgccatagcaagaagaacgagaagaatagagaaagaagacaaaaaataggaaaaaggaagacagagaactcaagatcttcttggctctgataccattttagtaaatagagagtaacatagtgaaagaggaaataaagagattgtatttttgattagagagtcatgcttttacaatgagtatatatatactcggttcaacaaattagttacaagaattagttgtaacaaataacaaactaactatacatctcactaactaataccaaacacacaccaacacacttcagcaacctattttgatatttcatgcaaacatctattttcacatgcatgaagctattaaatcaatatacttaaacagtcaaaaaatatttatacatcaacatttttatatagtaggtaactccagcattcttaagaccaaacgacatgacttgatagtaatacagaccaatgtctgttcggaagcttgtgtgttcttggttaggtggatgcattcttatctagttgtaccctgaataagtgtccataaagcttaaaatttcatgttcgattgttgcatccacgagttgatcgattcttgggagtagaaaacagtcctttggacacgctttattgaggtcggtgaagtcgatacatactcaccatttgttgtttggcatgggcactagtacgtggttagccacccaagccaggtagaaagcttcaatgataaatctatttgtgcaaagcctttctacctcttcttttggtgcatgtgcatgttctttgtccaacaatctccatttctgctggatggaacaaaagtctagattaatatttagggcatgagacatgacagtgggatcaatttttaccatgtcctcatgtgactaggaaaaaaatgtctaggtttgctcttagaaattttattaaggctaattttatttcaagcaacagacctttgccaatttttagttttcttgtcgggatggctagataatctccactttttctagctcttctactagcccaaaatttacatttatttccccaagtcggggatccatgtctttatccccgccttgggcaaattcccattggg

SEQ ID NO: 242817 - DNA, 608 bp, Cannabis indica
ttattcaagaagagaggcagcgtcgtcgtcttcttcctcattctgtttccccatctgattctaatcctaatcctggaaattttactggtgctacacaatatagtcgccctaaaattacttgccatcactgtggtgttgttggacacacaattaacaaatgttgtaaacttcatgggtatcccatttaaaattttttttcatagtaagtcattgtttcaatttgctcctcgagtatttgacagtatttgttttgttcgcgatgcccgtccatatgtcaccaaattagaccctaaggcattaaagtgtgtctttcttggttattctcgtcttcagaatgggtataggtgttattgtcctgatctcagcatcatcaactactcctacttgtcaaggggaggatgatgatttgttggtatattttgtcacatcctctgcgcctgatacatgttctgacaagtctcttgttccttcacctacctcggtcataactcccacaatgcctacacctccaccactccctcggcctcctatagtgtacaccaggcgtccccgtcctccacctgttgtttcatgtcttgcacctgcgggccagtttggcacaactgtac

SEQ ID NO: 242818 - DNA, 664 bp, Cannabis indica
ataatcaagatatatcaatactgataaggatagggagagaatggatatatgtaagaaagtggtaggatttagtaaaaggaaatccaatgatttacaagagagttaaatgtgaattgttaatttggccgcgcctactaacagtaattttaaatgatggacttatattcttagtataaataaaagaaaaagaatgggtcaggagaaggagagtgggcctatgaatgaggaagaggtggaagtggagtttagagtccatgataatttaatttataaatagtttaggatggtgggaaagatttgaggggccaattagatagtccaaaaaactcaagtgggacgggtcttggattctaagcccgtcaagaattatgaatattttaagtcggaattgtcgggggcttgggaatcaacgaaatgttcaattgcaacaataaattatttctcaaaagagacccaattttatatttttatgtgaaataaaatgtcaaaagtcaaaagttgatgggctggccagattatgggctttgatggagccttcactgttgatgcggttggtttggctggtgggctagctctcttatggaaaaacaagatgaaggtaaattgcttggattctctactcatcatattgatattgttatcaattcttctctgtttggaaatt

SEQ ID NO: 242819 - DNA, 660 bp, Cannabis indica
ttgaatgtcatcaatggtgagattcgaagtagagaaatttgatgaaacttgggactttgttctatggagagaaggtctgagagggatccttgtgcaccagaaagtttctaaggttcttagagatgaaaagttgtggtagaaagaaactagaggaaaaatagaaatggaggagatggcatactacacgatcatcatgtatctatcaaacagtgttcgaagaaaactaattgcagagaagatgctgaaaaatagaaatggaggagatgacatactacacgatcatcatgtatctatcaaacagtgttcgaagaaaactaattgcagagaagatgctgaaaggagtttgggataaattagaagaattgtacttaaagccatcaattgatagcaagattaatttgctagaaaggttatacgattttagaatgattccttccctttctttagatgaaagtattgattgatttaatgagattattgtaggtttggctaatataaatcacaaggttgatgcatgacaaaagttaggccatcattcttttgagatcacttccaatcacatatcaagaaatcaaggcagccatcaagtatggcaaagacgtaattacattagaagatgttcttgccgcacttaagtcgaaagatttcgaattacagttg

SEQ ID NO: 242820 - DNA, 3210 bp, Cannabis indica
atcctactaaatcctatatttgtctaagtctaatacctataatgcaagaaaattaatactaaaatctaagtgtatatgccttaattacatattacttagttatacatattacatatatgctgcattttcattcttaagccatacttatgcaaatttgaacttacttgtgcctgatgtgatggaagtttcctcatttacaccaatggaggtttggaaacaaaaggggcttttctcactcaaggctatgaatgccagaaaggaactcttatctaactaaaaggaggggatttgattacccgaagaataggtatgatgattgctgtcattatccttacaaacttctccttgatttgtagatcttgttacaaaagaagggatttaatacaaaggaggtaatacatttgaacaactcaaatgatcctgatgaaattaaaacttcattgaaaatcatgctacagatagcaaggatcataaactttgatgaggtaatctactacgttgatatttttatccttggattataacaagtcaacatgacttggtatataatgatgaaattatgagctaactgtggtacaggtagagctatatttttgggaagatgacacaagctcaacagttgacttgtacagtcctagaaatgagctagtggctttgaattcaatccttcggattgttgagaactcactcgatagttgtacacaaatgcaaaagaatatcttggaagagctacacattgcggttgttgatatgattagtaactgttcgaatgagaatagtatcaagtctgtcattgtagaagaccacagctgtgacaaagaaaactgtttggtgcaatggggtgaagacaatggcatgaagtcaaggttacagattgcctgtaaggtttttcttctctctcttacataaaggtctttgttaatcaagaataaagttttgccatattttgctaccttacataagttgccaagtttggaacgatatcatgtttttttatgcctcgttagatgtggaaggagcgggaagaggagccatagcaagagaagatcttaaggttggcgatactgctttggagatccctacctctttaatcatttccgaagatctaatgaaaaaatctgacatggtatggaacaaaatttatgtttatcaattttgttttgaacttatctagtgcatatggaacaaaattttgaacattactttaaggccttattcaagagtagtactcacaagaactattgttaaagctcatgtgcaaatgtttcgggatcggggattagacattgggggtttgtgaacaatcacttggatgggtgcagcaagatctaaacttcaatttcgggtagaaacaaacttgtgataaaaaccattctttgttttacaaaatagaagattgaagtatgtagagattgttaagcataaagaaaattcctaattacaagtaggagagaaaagcattcatctgttttattcctattccttcaatcaatatttattgctatgaaaaatatattgtagttaactaacttaccagttttttcggtctctttagattttcagtacaaaactaccaaattgtaattttcacatctctattcatatgctttatagttttgttgaaatacctttgttagtgattagcatacactttgcagtatcatatattagaaaagaggaatgaaatgtcctctgagacgatgctgttgctgtggagcatgaaagagaagtacaatactaattcagaatttaagaactactttgagacactgccagaagaattccgtacaggtgcatcaatttattattaggtgttaaacaataaattaatctaatccaatccaattcaacacaccataaagttagtatttttatcttaacatttcttttgaatactataggattgagttttggagttgaagctttcatggttttgggtgacactgtgctgatggaggagatcatacaagcgaaagaggtaactcggtttatctactttatgttacaatgtcggccatttggcattaaccatggaaccaaaaaatagatttttggcattggcttgccccgaccacaagttgtggcctcctttggatagctagattggacagatttgagtttaggcattgcattccaagacacttagataaaagtctaatagtaagcaaaaatttttggtagcaccactagatcttcaacaaggtggaaattctcgtatctacacgctatagtcaagcgacggtggcttcataccctgattgtgcggccaatagtatagttatgaagtcaatcgaaattgattagttaacttgtttcaaacttttgttgtcaaaataaaagaacaagccattcacttcaccataataaactaatccattccatataaatcttttatatgaaacagcacttgcaggagcagtataatcagctggttccacctctttgcaatgagcatccagatatatttccaccagagttatatacatgggagcggttcttatgggcttgtgaactctggtactcgaacagcatgaagataatgtttcctgatggagaactaaggacatgtttagttcctgtagctggctttttgaatcattcggtttgtgttttttcttctttcatgtctataattgttttcttaacatttttcctttcttattgctcggttaaacttagattctttccgatacaacagtagtctcacgccattttaaatctgatacaaccacttagatagaactcactcctaaaagctagcctaacaaaggagtgtccttagttatgtactattaaccaatccaatactttgtcaatgtgggatcctaacaatacacccccttttggagccgacatccacggcggcccactctacagtggcctactctaggcctaatccacaggttgcaccttctgcaagtcgccccttctgagacgttggtcccacttgagggtgtatggttctgataccacttgatacaatcacttgggtagaattcactctcaaaagctagcctaagatagtacgatgcccaaatcaatcttgtaattagtcaatgtgagatcctaacacatcttactatggctcaaatttggagacttttctctcttttaattgaattttgtttctcaatagcatcagcttaatattgtttagttatatatatctaagttttagtttctcatcgattcttgttgagaaatatagtt

SEQ ID NO: 242821 - DNA, 795 bp, Cannabis indica
tgtcaagacagggctctactcttcatctatgtcaagccaagtatgctcatgacattcttagaaaaacaaatatgcttgattccaagacttgcaccacccctatgagccccgattacaagttatctactataactagtgagccattttcagagccgactcattatagaagcattgtaagggctctttagtgtttgacacttactagaccttatctgtcctatactgtcaataaactcagttattacatgaaaactcccacaaaaagtcacttgtgtgcctgcaacctcatatacattcatggcacaatgtctaggggtctggtttttaaagcagctaaatggctctcccttgaagggttcttagatgcagattgggcttgtgacatagttgatagaagatctgtcactggcttttgtgttatgctaagagggaatgtaattacatgggcataaaggaagcaaaaagcagtgtccaaatcttgcattgaatcggaatacatagctttatccaccattgccacataattagtatggatcacctccctcttacatgaacttggaattagcttacctcaaaaacctaagctctggtgttataatcggggagctcaaatgttggccttcaacactttttttcactcaagaacaaagcacatagaggtggatgttcattatgtttgagatttggttatgtacaggcaaattgaagtatcttatattccctctgaagaacaacctgcagacatgttcaccaaggctctaaccttcctaagttcaattttttgtgtagtaagtt

SEQ ID NO: 242822 - DNA, 608 bp, Cannabis indica
ataaaagtgagcaatgagagcaaaaacataacattttttggttttaaaaatagatatatctatagctgtggacggacatgataattaagaaaattaagaaaaatatatttttaattagctataatatatatttgtaattaaaataataaatttgatataataattaaattatcttatatatattataaaagttaatgatttaaatcctaaaaaaatattttatttttaatattctcttctctaattttgtttttaatattaatatagtatatagcattgatatataatactgtttgtaatttggaaattaatcatttacaatatagcaagaagttactactttaattcctattttaaaaattgataattttgtatttaattgtataaaggcatgtgcagatctatgaataggagatgttgtgcgagtatctactggacctaaattatcactgggctctccaagtacgttgaaaattcgtcttagtatcgctctgccgactggaacacttaaagaagctcctgtgtcaatcacatctattgaacactttaaaaaatttttattaataatgatggtcggttacggttcttcagaaaaaaaaaaaaaaaaa

SEQ ID NO: 242823 - DNA, 871 bp, Cannabis indica
aattggaaaacagtacactaaaacttagagaatgacttgaacactttatcccaagtgagctttaaatacagagtcactttgcaaaaggcctaatgaacttgaaaccaaattttgagatattatgtgggttgtgacattcataggaatgtaatgtcaaagcaaaaagttgccaaagattgtgtccaaatagaaaataacagaataattagaagtatatattccaaacaatgaatcattctcttaatcagcccatcaatttggacaacaaattactccaaatccatatcagccaacaaagttagaaactttattttcatgaacaacaatggaaactcctaaaaagtgaaaactaacatctacaaagtaccatgttttaaaatgggaacacccaacaacttcagctattaaattaaaaacccattataaattcacaatcttaaagaacaaaagattattaatttcttggtgggtcagaaaaaataaatccaaattaaggaaaaaaatcatttaccttgagataataagctttcttgatttcagctggggaggcatcaacattgacacccaatatctcatagtaagcagtctcctttaccatactttcaaaaatcacaaactctgaaataaattatataaacataaactaatcagatcacattcacaaacccacttacataaaccaacaaataagccattgtgagggaagaaaaaaaaatacctcaagggaaggaaccaacaaaacaaaaaaacccaataaaaataaaacaatgaaattcaaattcaatgattaaaatccggatcttatgttaaataccaaccgctaattcatagtttaacaatagctagtaataaataattaaaaaagataagt

SEQ ID NO: 242824 - DNA, 1311 bp, Cannabis indica
ataattaaaagaaagcaaaaacagtaaaataaagtgaacactagattttaaaaaggttcagcctcgtaagtgtggtaatagcctattccccttgtattgtattgacttgaaagaagaaatggagtgttgttcatttatacctagttacttgagtagatgagtctttagacaaaacatatttaactacctcagagcctaagtaactaacttaccaaattcagttagtgaacttaagaaagagctggccaactaactagttttacaatcacatgtcatcagggacggacccataagtaacaatgtgggggttatagcccccactaacaaaaatattgccttttaaaaaattaaatgtaatgtttttaatttgataattatagaccaaaataatagaaaagctcccataaaattaaataaatctagtaagagtgattatagtatatgtataaatattttttaatgataaataagcccccacgaagtaaaaattctgggtccgtcactgcatgtcataatagcatctatggtggattgccatatatggtggttattatgttcatcctaaaagtggtgggagataactatgaattcttcaactcgagaaatatgatatcaaagataagttctttgttcattaaattataattttaaatgaaactcatatattaatttaaaattatcattaagtagtgtgtttattaaattttatatctttatcttataggcgtgctttcatttcactcacttggttatgcaaagatccaaagatttatatgagataagttctagttattctttcttttatagaaatattttattatgggtagtttttatttctatcttaaaagtgttttactaattcagttctatttatgtgatttgtaaatatttttttggttgaagaaagcaaaatgagtgcttttacaattacagactttaaaattttattgtttattttttctaaatcatctttgcatgcctttaggatatccatctctctttttgttttggtgtccttatcttccaatcaggtggaacctcaaaaaaaaaagaggtttttacaccacatattgaaatttctaacttttcttattttttttttctattgtggggcagattttttttttttaaaaaaaaaatactatgtaaattttatactgtgtactgtgttaagtttctacagttattccacggttttttttaagttgttccattgttgttttaattgttatgttttgttgttttgcgaatgttttataaaaaaacagtatttttgtaaaaaattccatgtaacagtaaaattgtaaactt

SEQ ID NO: 242825 - DNA, 690 bp, Cannabis indica
tttttttttaaaaaaattggactctatatattatattaataacaggtaataattattatatttcattgtttatatatatcgtttcataaacacgatcaaaaaagggcattatataaaaacacgtaatgaatggatattattattgcttggtgcaactagaaaaagaggcagaccactcaatttaatcatgtaaaaaacttgacgtcatgacatacaaaaatatcaaacgattgagtcgagtcgagtctattgaggaaattaatatattttttttacaaaaaaaaaaagttgatgaaatgaagataagctagggttgctggttgtagctataccctacacacacatatatataatggaaagcctttttatcataatgattagcataatattgatcaagtgtggggagtgtgggacatgacatgatatcttggtagagtggattaccacataagcatttccaataacattataaccaattacaatacactatgcctatttttatataccataaattattatgcctaattccattgcattattattatagaaatattggtgtgtaatcactacaagaaatgtgacttttgccagcacatgtttttgtgctggcaaaagtttcgtactgcgctggtaaaatagaatttaattctgatgtgttggcaaaaggagttgacaaatcaacgttggtat

SEQ ID NO: 242826 - DNA, 752 bp, Cannabis indica
gagcgattatctctgtgtttggggagatagagcgcagaagaatcttaactattcctaggctgccaacttcgagtggagacactttgatttggaagtctaaaaaaagtggagaattcttagtgaaaacggcgtatgtggaggaccaacaacacaggttcggagataaaattgacttatggaaatggatttggaactctaaaatacatccaagaattgctttgatgttatggagagtgcttaataatacccttccactcaaatccaatctccatttccttagtgataaagcttgccctttatgccatgattttgaggaaacaaacaaccacttattcaaggattgcacctttgcccgtgggatctggtttgcgggccctcagccttggatgattcactcaatcccaggagaaacatggcccagatattagaaaatctaatctcagcttcaaaaaaatcacgaagtcttatgctggtctatgctggctgtgttttttctcttatatggcagcagagaaacattgctagaattcaagggaaagctgaaaacataaatgttctggtgcataaattatcttcaacttttaatgaattctgggacgcagagactaagacagcccccacttacaccatgcagcgaggtattattaacccatgtcgctatgtgattatgacagatacatcctggtgtgggggagaggctggcctaggtgtggttcttattgacactgagtcttttttttttttttgaaaga

SEQ ID NO: 242827 - DNA, 1890 bp, Cannabis indica
gatgcaaccagagaccagtacgtacaaaactattaattgttataattaactttcatcacttaacttttatatatgatattagtcatccttgactattacattggtacgtacaatttcatggtgtttgcattatgtgcagaactatttattatggagaatataaatgctcaggagctggagctgatatgagcatgagggcctcttatgtacagagattaaacgacactgaagcctctaatttccttaatgtgtcttttataagtggaaatcaatggctgcaaccctttaataactgatttcactaatattcaattcattatatacttcttttaagggtagtttattatagttaatggtgaattgttattattcaataccaagagtaatagcaacatatattccataaaaaaaagggctgtaatagcaacatatatatatatttacttgtattatttcatttttatcaaaaaaaacgaatcatcaaataaattatttcatatataattaaaaaaaatatattgttttttaactaaaagtaaaggtgttcatccaattttttttttttttatttaagcgtttatatattacaacatgttttacctgggttcacctcccacactcacacacccacctatgccacttgagctagccccaggtgttcatccaattcaattcacactattttgctaataatgcatataatatgcactaagtgtgaattttatatgaaaaatttgagtttgtatatatgcatacattaggggaaaactcaatatttaggccaatattgagggctatccaccctcaatggttgcacaggtacattaaaataggtgaatgtaggacttttagatgaaaaagattgaatcttgactttgtttttcactttttagattatgagttttgaaaaatacgaaaaaaccagggtttaaggggtaagtcggtatacattatggtggactacccaaaatacccctacttacactccccaacagattctctccgtttctctcttcactctcatctaattttatctcattctccatatcaaattcacactgaaattttacattttgtatacattttgcctcttccaagctactacaagatattacaactaagtgaaattagagtgagactccattcttgaggcactgaataaagttgggaaacaatcaatgggtaagtaattttttttgttattgaatcttatatttattttagaatgttgttttgatgtttgatctgtggattgttgctattgttttgctcttttgtgtgttgaaatgattgttgtctgtgaatactacatttttttgtttatgcaattctttcgtctagtcctatggggcccaataggggtcgatgctagtccgatgttatacttggatctaaggacagggatgatggctcgatgggcctgatgctagtccgatggcatattggacctaaggacatggaagatgggtttgaaagtaggccccatatttgttttataggatgtaaagcatgtttgggtctaatacattgtccgatatagtctgactggtgtctgatggtgggtgagttttggtgctattgtggaggattctattaggtccaatgttggatgatggtgtttgtccgattggaattcaattttgaattctatctgtacgacgatatgggacgatacatgtctgatggtgtctgatattttacagatttatggttttttagagcgtttttatcacttttttgatagttttttgttctacattttttattgtattttttttgtctgtggatgacaagttcaactactttttgcgttcattatgtataatagtatttgaaaacttgaggatagaaattgggtttatcaccaagctaaaaatttaacattcgaga

SEQ ID NO: 242828 - DNA, 645 bp, Cannabis indica
atccatgttagaatttttttactaaaattaggcaaaattccttaaacttaacaatctcaatagttcggggggaatttttaacggtcaaaaaagttcagggggcacaatttagtacatgtcaaagttcagggggaaaaattactaattaccctatattttaatttcactaatttgctctttctagaagtactgtgagttcatataactaatgcaattagtggctcatccagaaacaaatacatgaatttgtgtgcgtattccttgtgattcttgcatttatacgaactaatttggtattaattaaaatgcaagagggtcttgacaaaagaggaatgattcttttctctactactgatatagttttacattttttttgtattacaccaaagagcatcttatcataaggtaatttgtgcattagtcaccgttattatgtcagtaaatgatactaaaactaattgcttgcaaagttggagcagattaatttgcacccacttaatattctgtatccatcctcatattgatatcatgttttttcttaattcatttttttttcaataaactagtgaatttgaagttgttaacattagtgaatccatctcagttttctgcttctttttatctactaactgttgggttttatgc

SEQ ID NO: 242829 - DNA, 1329 bp, Cannabis indica
agttgaaacacaaatatggatgtttttcatacttgaactaaattcaagatttcggttatgagatttttataatccataagaaaactctcattatttattagctaataaaaaaaaaatggatcgcccgtgtttctttttttttttccttaaaaggaaccactcaattttaggggataaaaatcagaaaatcatatcatacatgtatttaacttgattattaaacaattaaaatatattacataataccaatgacgtaaaccccaaaactattaaattattatacatgcgagtactttgatttccttctttaaattttaagacaaataaaaaccttatctatatgatttaagaatggctccacaaaaagtgcatatgatagctctccaagatttccaataaaagggaacataacagaaccttgtctcagtcctcatatcggcgacactggccccagcgccgcaccgggagcaagttccagcgactggcttgcttctctttatcttccttgtctgatccaccagaaaacaaaaacaaaccatattttgtaatgttataacactctaggcactccaggtcctctatcaaattcaatgaatactcttttcttgactttattaatccatttatttattgtgataaatgctttccttagtgtagaagtctgactcaaaattgggttcatgcataaccttttctctatatggcgtttatatgtatataacgagggcatttaaagatcaagtagttaacgggtagatgtggggttagattgttgacacgtgtttaggttttctagaagaagttgttgtcgtactagtgtaataaaagattataaataaatgtgttatttaataacatttttattttctaattttttatggaaaattaaaataaaattttatttttcaaaaataaaaatgtgttctgtaatcaattttattttttcaattttaaaaacagaaaataaacgtgtgttatgtaaagttcatttttatttttctttattttatttaagttaggtttagattcggggttggattcaggttcgggacagaagccgagtcagcgccagggctgcgggggtggggggggggggggggaatgggattgggtttggtcggagtctaaaatattgcttaagaaaaaaaaagtgtttaaaaaatattgaaagtgactttttttgtttttaaaatttgattctcaattaaaaaaattgaaaagtgaaaacagttttatagaacatgtttttgaaaaatatattttcacttttctaatttcaaaaataaaaaactgattaaaaaattttaccaaacgccaccataattaatt

SEQ ID NO: 242830 - DNA, 926 bp, Cannabis indica
tggtctgtagggtcagtcatcagtccatgaatcagccatagtgacatactcgtatataagagtacgttacagtctatgagcactattaaatgacaatttagacattatgttttaaacatgaaatataataatgtaatgagcgcaacattagtgaaaataattatagttacaatagattagaattcagatcagaattgttagtgagggttaggaagaaatttttttaaggttagagtaaaaatatttgattacaattgttgtcgagcaaatttcacaacaccaaaaatgaataataataataataacaaaataataataataagaacaatatgatgaacaagtgcgagtattcaacctagaacggcgagtactcgaactgggaacgtaaatgcttaatgaaaactggaaatatcaagaagacaagggaatatagtggttcagtcagatcacggtctgcttagtccactgttgcaaggatttcgtaggtgtccatttcatggtggatcactcctttatatacaaagcaagtgtccgattatttacaaggattgcattcattgccaatccgttcatacattgatttataataattaagctaaaacgtaaacattaataaatgaagaacagtttctattctctaaatacaacaacgtatgcgacttctaatgtgcgagttggctgttcatattctggtgtaagctcgcgggcttaggatacacctaaaatttagttaaatctaggatgtctgcgttcttgtatagtcgtacttacggacatcgtataacgagctgatagaacctagacatgcgagtctatattggcttatcgaggctatggagtcatcgagaccagctcgttttagagagaatcggtctctatgtttttgctaggaggatcgaagaagatactcgcatatatcgtggtat

SEQ ID NO: 242831 - DNA, 595 bp, Cannabis indica
aattttatttttatatatacaaatatattttacttatagcaatataaaatctaattacttattaaaactaaatgaaaatattaattatttcaattatatgttggatgtattggattttcggacacaatatctaacatctattcaatctagttagatatctaaaaataacattcaattcgatccgatcataattaaatatttaatatttggcagtcgattataattaaattgatcagttgtcattgaattgaatccatttataccaaacataattgagatatcaaaaattgagagatggtaataaaataaaatcaaagatggtagaaaaataagtaatatttagtagaaaaaaataagtgaaaattatgtaaaaatttcattttattatggttttgaggtagaatatgaaataaataaagttaaaattctggtccctcttcttgatgtactaaaatagaaattaagaacctaacggcacataaatcactagctgagctgagtatgataggacgaaagctatttaaaatattctataactttcttcaaaaaaaaaaattaataaataaaatctataacgtgacaaaaaaattaacac

SEQ ID NO: 242832 - DNA, 828 bp, Cannabis indica
tagtcgcctcgagtcataaaaaacataaaaaaaaaattgtaatcaaggtatgataaagcatgtgatgttagccctaaggaaaagaaaaaagaatggacttattatataaaagaacattgttataagatattagtagtgtttaagaagtgacattttacgattggttagcgataatttataaaattattactttatattttacggaacccgataattaattataataatagtcaggctcggccctgggcataggcgggctaggcctgtgcctagggcccacctagcccaggtgttcaaatttttttttctcttttaaaattatacattttttactgattttaaaataccatatttttctaacataaggttccaaaataaaattttctcctatgtctcactttgttttagggcaggcctgacaatagtgatatgatatgctaaataatggtgagatattttttagcatttctttatataaaattataaatcacttctagaagaccataggcaaaagtgagctatagactttagactacttattaagagtccataggcaccaacattaggaaggaaaaaaaagttcataggcatcaagacttttattttgcctactttttttaatggaacaaaataaaaaaaagttaagacatattgtgcaagggtagcagatattttattaattattattatttatttattattaataggagaaaagttaaaaaaaaaaataatttatttaatataaactaagttaattaggattttttttctccgaatttcgacatgtattaaattatatatttcgaatttttaagtcgttaaaaattt

SEQ ID NO: 242833 - DNA, 537 bp, Cannabis indica
taaaatttacacattatttttttaaaaaaattctactacagttaaaaaataaaaaagttaaaaattttagtgtaaataatttaatgaaaattaatgtgttgtttctttattttcagcggtacggacatatcaggctttttttaaaaaaaaaaaccattggagaataagaatatttagatcctttcaaaataaataaataaataagtaaataagaatatttagatcctttcaaaataaataaataaataagtaaatgagaatatttagattgtagcgttagattgttttcctcatacataggataggataggatatccccagtccacacgtttgtccagatagtgataaccatttcaacatattttacctaatactaaaccaaatcttcttatctcataataaatcataatatcaatgcagaaaaaaaaataatataataattaaatgtactctttaactaaaaaaagataaggtataatatatcactttgacatgtttacttaaaggtaatagaaattattatacataacacgaggt

SEQ ID NO: 242834 - DNA, 3629 bp, Cannabis indica
atatatatatacacacacattagagaatatctcaaaatgaaaccaatttagcaaatgtgtaaatagcaggtaatctgattgttaccttcagaccggagcgtaaacctcccaagttgttgaaagtctgagaacttttcaatgcatatcaagttgctcacctgttaagcaaaataaaagagcatgaagatctatgaatattaataattgaaccaatatcttgactaaaaacaggaacaacataaacctggactcggcagagaacaacagcaccgttcttcacaaaaagcactttcttcttcattggtttctttgtctttggatcaatttgctgtagcagctctacaatttcacactcttcaacaacagaatggatgtgaagaacggctttatatccagccgtgaagattgcctaaacaaccatattttgtcagttcacagaaagaaattctatgtcaaagatatacaaagagtagaagtttatttgcatacattgtccagcaactcaaggatttgcaaccgggcaataaactcggttgttgctgctactggttttgctgcacgaaagatcaaacaaaaagaaagacgagagaatatataaaacaaattagtgactgcaccttcattgtgcaacagaatagaacagtcagttacatctactagaaactgcaatattatatgcaaccccaacctcataaaatgataatgataaaaaattaagagagaaagtataatgtagtcaacacgaatcgtaaaaaagagaaaagcataccaacacttgataaaacaaatcccgacaatatgtcatcatcgtcgatccctgataacctgatcctaacattttcaccaggtcctgcacgcttagtcttatcttcatcacaatatataccgaggactttaacatgagcctgcaaattagcacataaaaccatcaatctccatagaaaacaagcagacgagataaaagggtgataacatgacgaaaagagatatcaccttatttggcatgaccaataaggaatcaccttcccgcacactgccagattctatttttcccattacaacagttcccatgtctttaaatttgtccataatcggcatcctacaagtaaaattcggaatattaacaaaatttctatgttaatatatacaactgatgagacaactacaagttatttttcaacttctaactagaattagagtaaatatggctctcatactagcaagtagcaacttaaatcaatttatcaatgctaaatacatacaacataaattatgagaacaaaagaaaaagacaatcaactgagctgactctccaacacaaaatatcaaatatatacaggtatacaatctgtttatgaaaaattggagatctttataacgaagatattttcctagtttctacaatatctgttgtatctttaatagtaggttggtaacacctacgactataatgaaaaccaagcatttcgtagtttcaaaacgcttctcctcacatacacacacacacacaaaacaactaaatttctatatcccaagtccatacaatattcatgaaataatcatagaaatctgagagaaaaaatataaaactatatgttcgtagcaacaactcattaatgataaaagaaaactcctttttttgtaaggactaatgataaaattcttaaacacaagattataatatattaaatacctgaaagggcctttaggatctcgtagaggaacttctatggcatccagggcttcaaagaggcaaggaccattccaccacggacatacactcttatccaatctagttttcatgttcgtgccaagcagaccagaaataggtagaaataggacatctgtcaattaaacaagtatcaatgcaagcagccctataaatctgtacacatctacataagatattggacgatataaatcacaacgaggccaagataggcactgtaccccttctagttacttactatcttatataatacttgatgtgctggtatcaacaatgaacctaagtaattgaattcaaaattgatagcagacacctaacttatgatctataatgaaacatacttttctataattttctaacacatgccactgcatgcttattaccaccatataaaatggcaaagatttcataaaaaatgagtcaagaagagtggcaatcttagtaaaagattgtgtttgttgaaaagttttggaactttctccattacctttcttcacattgtagccagacgattttagaaacggtgtcatctttgtctcgatttcatcgtacctggagtattatcaatgcacaaaaccagctttagtacttgataggtgccttcacacatgaatttgacaaagaggattgagtctgtgggtgggacagaatagtttaacacacctttcttttgcccagttcacagttggatcatccattttgttaacaacaacaagtagcttggatacacctaaggttttagcaagttggacatgctcacgagtctgtccacctctctcataacccgtctcgaattctcctttacgggcagaaataacctatttcagaaaattaaagaagaatataattccaagatgctgtacccaccaatatattcccttatgaaaaaccaataccaacaaaaaaaataacaaacaaacttacaagaactccaatatcagcttgagatgcaccactgatcatatttggcacatagctcttgtgaccctatccaaacataattgagaaaacaaaaaagagttcaaaaaagggtacaaaacacaaatgaaaaaagcatgaaccatcataataaaaaaaatagaaatccaagtgaaaattctttaatacagttttttaatagtccattaaatcattaaaacagatttatattttgaagattgaccaattatatacttaaataagcaactaatatgaagaagaaagctctatatcccaagccatataacaagtgaatcacttccaaatctcgaccaaagaacacccattcaaagtgcctgttttgcaggctgcttcttaaacaataaaagtcgttgtccttaatgtccacttattccatatttaagattgcaggctgatgatactattgaaaattcatatactttctctttatttgaaaatccttttagtagactaaaatggacctaaattaataaatatacataatgtactgccaaattaaaacagaattctgcaatgagctacaggtaccatgacaataatacattcaaatcataaagcaagcatctaattttattcacttacgggtgcatccaaaattgtaaatcttgttgtctctgtttcgaagtgcgcccttccaacttcaactgttttcccctaaagccaggatcatgtgtgcaataatttagatacttaatggccataaaaggcatttcaaaacatcatttaccgataacttaggagagagcaatagtaaaaaactatggttcttaaatcctaccttaaccctctcctcttcattggtgtccataatataagccatgtacctgtcacatgcataatcaatacattgctcatcaaaaaaaatagacatctacaatccaatccaggtgtgctaatttttttgggctagctaaatagtaaatggaagagcttttttttt

SEQ ID NO: 242835 - DNA, 999 bp, Cannabis indica
gttataggctagaaattatgatatatagaagagtcaagggactgttgaagctactattgcagaaacaattggtctcagattctcaagtgcttgtcaatgttatttacagtaaactcacaatgtcatctccttttgatttacttgttgttgttcattgtaagttacttcttaatgatttaaggcatgtttctcttcattttgttaaacaatctacgagcaagatcgtcaattttttggctaggcatgcttgttacgctcagattgtagatatatatagcaatcaacattagattattaggtacaaacactaccaaaaaaaaaagctacttttagtgacaacataaattttttatgactaaatatgacttttagttacaataaaaaattatttgtgactaaaatatattatttaaatacaaactatcactaatttagttttagtcacagtaagtattgtgactaaaaatacatttagtcacaacatattatatttttgtgactaatacctttagtcatggacaatatatgaatgataatctattattggtcataacttttttaattttaatcacatgttttattgtgaataaaagtaatatttttttgtaataaaaattaatctgaaagtgtatacatcattaactcaatgtgagtgttcatactaaaaagaaacaaaaatattgtaatggatgaaataatatcacccagactaaaaacaaattgactacaagagaaaaatagaatttactttattttttcaaagtaatacgtattaatataataaaggttaattgcggcaaaactttcaataattttactttacttgcacttaactctcaaaatttaaatttttgcagcaaaacccccaatactcgttttctgttagcaatttaatatttccgttcattttaagtgttaagtgtcatgttgaactgttcacgtgtacatctacgtggacatagtgtacacatggtaaaattttattggtacatgtaaaaa

SEQ ID NO: 242836 - DNA, 539 bp, Cannabis indica
tttcaatggaagaggagataaattaagattttgagaatagatatataagagattttgtgggaaagtcatgcatgattgagcatgatggtgtattttgtgttttactatttaaatcatagtaatatatgtattaatatattttcttttgttgagataaggaagttttatatgttaatatatagaaaattacatatgtatatgcggtatatatgtgattatttatatcatatattatatataatggtatatgtaagatttttttaccaatttaacctacacaaaatagaaacaaatcaagtttaccaaaggtcaaaaatgacctttcaccttgagtcaaaacacagttgactcctttgattaatgaatcaaacgacagacgacaaccagaacgccaagtcgttttgatccaaaccccaaataacccttatgaacactctagaaccaaacatacactctgaacactcaaccaaagctcgaaaccctagcagagcttcgagtttcttagaagaaactcgaagactactatcaacctagaaaaa

SEQ ID NO: 242837 - DNA, 2681 bp, Cannabis indica
ggagtgtaggcagagtaactacaggctttgacagcctgggcccctcatgttggcctccttagagtttttggccaagtatttgaagattcaaagttggaagtctcttagtcgaagggatagcttcgggaatatttgcagggatgacaactgagctctctcaatgttaatctgaggtgtttggagctcaacgcaatgcttataggggcatcgtccagcattggacatttagctagagacttttactcagagacgtcacctaacctcttccttaatgcacacatcattctttctgacattgttgcataaaagaaaaacacgtgttaaaaatataaataaacaagagcaaacaaaaacaagtggaaaagtatctaccctggacttcggcagtgcaccctcctgaacaagtaaagattatgcatcttcattagaaaaattcccatcttcttcctctacgaccacaaccttctctttccctaccacttggttgaaaggacggtaaactttctcaagaccatatctgattctaataggtcattcaagtggtccctaagcaatcgtggaagctttctttttcttcttcttcgaaaactcttgctcggcagtaacctctttggctacctggttggactcctaaacctcctcagacatataaagtccatactctaggacattagacgtggtagtcaagaaggagatgtacagagtcaactcaggcgattgaagaatcttttgggctcttgaccttaggcccaaggtgaagggaggacgacagtacaagggaatgtgctggaggttagatggtcggtacccatgtctttgacaaagtagtagtctttaacaaatccatcgatcttggacaccacattttctgtggtgtcgctcagccattggtactcgttttgggaaaaatagaaatactctaacctgttctgttttgggcttgatttcagattgaatagctagttggtatcgtgggtaaaaggttgaccacatcattgagaagcgtacaacacaaacaacacggccaagtatttgattcccttaggggtgaattgtgtcagacatagcttgtaatagtttgccatctccttttttttaagtaactgataaagaggaacaaaatagttacagagaaactggagaaactgtattctccaaatgataccatatcgagccgtaatgcagccctgacgttttggtgcgcatcttgattttttctacaaaagatgtggtgtaagggaccattagggaattgagataaggactcgcggatcaaatggacaaggttggatagtgctgaattttccttccaagagctttaaactttggagactagttgcaggcaattagattcagataaggatgcaaaggtaaaattgcaccatatttggcgtgaggccccgaccacgtgttgaattcacccctaaaatttgtagctaactactcgatgctaggcagaaatgtctccaccttcccaaggagagcttccttgaagagattagttaatatcttgaaagtaagtacagatagaggcgagacccataggggacctttcttcccttaggtcctcataggctgagcttccttgtactcctcatcaacatattcctggccctccaccaagacgtcgccctgcttaaagacgggctttccacctcgttatagccactaaaaaaagtgtttggttctattcctcttctttttctcctttgttagaagaatcatcggggtaggcctagccctgatctttaatttcttggacttcaatgtccctagttacagcttgaacctctttgctcaaaggcctagcctgttctactcccgccattgcgaacaaccagacaaagtgggggtctgattttgaagccttcctcatagtttatttagtctatgccatcattctatgtttagacgataagtttagttcaaatttatgcttcgcgacaggcaccgcaatgtcaactatggcagggtgcttggcatatggacttggtcgaccttctggtaatgtgtcaacaacaccaggttggaccctatacgtccatgttgtaggaagatagcgcctccaacctttcttcagtttccaaataaatcggtctacccttctcaacatatttgttggggtattaatggtgttatagttacaccacgggctctagggactctatatgatcaatactgacttcccaatcttcaaaataagaattcgaaaggctttcactagatgaagataaatttgcactgagccgaggatatttctcataaaggagttggaggagatcctggtcgatatgatgatcacctcccctaatactactagggttcatctacaaaaggagggagacaaaaggtgagagtcgggcaggaaataaggaaaaatatgtctgatatgggcgattcaaatgaaaaaagaaggaatttcatttggaatgaaattcccaaattcaaaagttcaaaactatgaagaatatcttgaaattctttgagaacccacgaatgggtgaatttagatgatgtcaagcatgaatggtaagaaattagaggcttaaaagacatatgcgtatgttagttagagttaaaagtcctaatatcatctactcttggatcaatcaagaacaattcaagaactgagagttttatagtaaaaaatttctaaagataatgcatgtgttcaatagaaa

SEQ ID NO: 242838 - DNA, 1560 bp, Cannabis indica
ctagtggtcgatatacatctcacgagatgttatattcaacgaatacagctttcccttctctacccattctaacagcaaacaatcaacaccctctatccctcatctcagctctcctaatatacctgtccctgtcatctcaactactcaacccactgccagccaaccacaaactacaaatgaccctccatctgtacctacacagtcacccataactcatcctagtcctgcatctccacatacaccaccagcaatctcccctgtgattccagcagcagcacctcagcctcctggcaacactcatcacatggtcacaagagcaaaagcaggggtctataaacccaaagtgtatatcagctctaacactccattgaccctacaagaagcaatgaaagatcctaagtggaatggagctatgaatgtggagattgtggcacttaaaaagaatggcacttacacaattgttcctctccctcctggaagaaaagcaatagggtgcaaatgggtatataagatcaaagaaaatgcagatgggagtgtatctaaacttaaagcaaggctggtagcaaaaggctttcatcaagaatatggttttgatttttcagaaaccttcagccccgtagtaaaacccactaccatacgtatcattatcaccattgctctctacaaccattgggacattaaacaacttgatgtgaataatgcctttttgaatggtgacttggtagaagaggtctacatgcaacaacccccgggattcgaagaacaaggtcccaatctagtatgcaaactccacaaagccatctatggcttaaagcaagcaccacgggcttggttcgataaactaagatctgccctcatgcttcacggcttccacagctcaaaagcagatgcatctctgtttattcgattcatgaacaaccataccacttatgtactcgtctatgtagacgacatattgatcacagggaatgatcctaatgaagtttctctgctcatcactcaacttaacaaccaattcgcactcaaggatttaggggacattaattacttcctgggaatacaagttacaccaactgagcacgggttgcatctctcacagacaaagtatatcactgacatcatttgcaaagcaaaactggaatgtgccaacagtctccctactcccatgacaggtggggaaaaactgtcctgtattggcagtgaccctatcaagaatcctcaacaatacagaagccttgtaggtgcattacaatatgcaacattgacaagaccagaaatcgcctatgctgtaaataaggtgtgtcaattcatgcatgccccactcgagtctcactggaagacagttaaacgaatcctacgatatctaaagggtactttagactatggccttgacatgtctcgatccacatcccttgacttagtcggcttcagtgatgcagattgggcatctgacattgatgacagacgctccacctctgggctctgtgtttatcttggctctaatctaatttgttggtcctcgaaaaaaacagcataccgtgtctcgctccagcactgaag

SEQ ID NO: 242839 - DNA, 879 bp, Cannabis indica
tgtagatatgaaaaccttatggacaaacaacttacatgatcagcatgtgctttatccttagataagacaatgctttaatttgtttattctttctatttgttgtctaattataccttagccaccttcaaaattagtagcaacaacgatgcgacatagagtacacatggatcaattcactatcttgaatacatcgtgtttacgagcattcacaaataacacgattagtacatcataatagacagttgtgattatacatctattgtaatattaatccaaaaatttgtccacttatgatctatgccttatcttgatcctcaagcataagaatgtagtaatagaagattcacaagtttcaccgaaactattcctaggcacaatgccaacgtgctagtctcctgaactcatcattgtgaaacaaacataggaatatcacttcacatgcccagaaaaaattcctcagcgattccaccctcatgaaaaaaattgtcaataagaatcgatcgacacatatatacctcactaaaatcaactgacatccctcgcaatactcccactgagcatgcagtaacttggcatctttaaattcaaatttgatttcaagatttatcagtttcgaggcttagtcaaattttccaatgagagatcgatgtgacaaaacatattacagtcccatccaacaactaagtagtagaggttttaggatttcttaaagctaaaagaaaatatcttagagcagtgccactatgtgaaaacaaggattatgaaatctgctcgttttcttagctttctcaatgatctatcaacagaaaagatcatgtcatgctagagtcgttcaaacaaaaaaaatatgagtcttatgcaagtaaggacacctatttc

SEQ ID NO: 242840 - DNA, 894 bp, Cannabis indica
atcattaaatttcatcccttaggaagttacgaaaaataagctctggttactcgaagcgggacccgctgggctcaaaaaatttgccatcaccacgagaagctaattttcaccattatatcatcgtcaactgtggaaaacaacttatttttattttttttcctttttttgttggtctccttcacctataaaaggagagttcccgtagctaatttttcgaaaactacctagaaggttagagcttctctctttagactttctctctctctagagtttggagattctaatacttagtctaatactgtaattaccatcttgtgagaaataaaaactcgaaatagacatagtcccattactatcaccatatagggagtgagctactataaattttatgtgtctctctaaattatttacttaaattattaatcatctcaccaatcaacgagctgatgttggtaactttttagcgtcaacagttatgatatctataaaatatctagattaattttaaattttattagtatttaattaacattttagataattatcataaaatattttactaaaaaaatatgttgttgaccttaaaaaatgatcaactgacagatgggtggtatagatctgatgcttgccacgtgctacacaaacagaatgaaaaaaaaataaacacaaagattgttatagagtttggctcccttgtaatagcgggtaatgaccctatccccttttggttgtatttatactgagggaaatactatccagattactataggtgggatctgctatagcgcccttaggaattaaaaagtgtgaatcagtaggtagatctcaagtattatataacgtaaggtactagacagcctaagggtaggacgtgtgagagagatgaagaggaga

SEQ ID NO: 242841 - DNA, 1113 bp, Cannabis indica
taaggagtattactagttaattacaagacacgtttaaaagtgctacacattactaatacctaatagtaatacagataaatataactaaaaacactgaaagtatatcatttacttataatacatttataaagactcaattttttttaggaaattaattacacattttctaatttttgtataatatgtataataatatcattatttattttttatttttaaaagaatatggaaatagttaagggtaatttgtcaacctaagtaactaattaacttatattgttttttctaatatattttcaatttattttaaaacaatttcccattatttcaatatttttttttgaaaaaaaaaccacacattattataaacttgtatcttgcaaaccataaaaatgtttcacgtcaaacaaaaaccataaaaatatttaaattaattattatattttatgtacaacaaatttataaaaatataaaaattttgtactggaattgataggaccaacacaacttaaagcactcaactttgtttgttaaataaatatatttaaatggtgaattaagatttttacttttcaattttgatataatatatcatgctctcaattttttcatctaactccattcaattctactaatggtgcctagcgtaaaaaaatttcatgtactaaattgtgttctccgaactttgacatgtatcaaatcgtacattgcaaatttccatccatgttagatactcgttagtaaaagttcaagatacatcatttaatacatatattaaaattccagtagacaaatatcctaattagcctaattaaaataataaccatccatatttcttttcattttactttttggcaaaacaatgaattatataaatacatatctatatacatacctgatgaccaaagcaaataccaagaactttcttggccatggagtccaaaatctgcaagagaaagcaaagcttaagaatccaaggctgattaccataagcatcatagggactaccactgaccacaaagccatcatatttaggcaaatcttccaactcaggaaattctccttcaacaaccctaaacaagtcccatctctctccttcttctccaaaagctt

SEQ ID NO: 242842 - DNA, 940 bp, Cannabis indica
attgaaaagtcaaatgatgaaaaagtttgtgctgggtcccacacctaaaaccttaatcatcttctagcaaaatcaaaggggtgaagttgaacagctcaacctttatggctccaactttcaaaggtttgttgaggaaccaaagccaagagaattcatggctccaactttcaacttttttgaaataaatacagacttctttgatcacacgtactcttactttgaaactcaattatcatatacacctctaaataaaattcaatgatactagaagaaaagcactatgcccaacacaattaaattattgtagttattttttatttccatatttctatatatttaaaaaataatgaaaatgagttttagatcctaaaagtgcacgatataaataatattaagcaagtactctagacataatgcatggaaaagtattaatgctagttcatcaataattgtcaaatacagaattccatgaaagtggtcaaccaaatacacaaagtgaattctgctgtgacacctaaatcattgggaaccaagcttgagaagtacactaccatgatctattaatctatgtttttataagagaatttgattcatccataaataaataaagtggaaatttcaatacctttcaattttctatggatcgatcattgaagaagttccaacaagcttggttcacccaacctgtacttcttaaaagtagcccaccctccatatttgtataggatggtcacagatgttacatgctcaattttccaataatgagaacctccattgggttgtaaggaagctacaaattctcttgtcatgtccctaattataagagaattttagatttggtaagtgttctatattagacggaatctcttctaataacaagcaatctccaatatcaagctgctcaagatgtggcagtgctcctctatccatttttcacaac

SEQ ID NO: 242843 - DNA, 793 bp, Cannabis indica
ggttaagttagttgcagtaggggaaatttaaaaagagagtgatatttggccaaaacagaacaattattaaccttggcgatatatcatgaactgaaactttataagttgtagctattttagacttaccattctcaccattctcagctagtgagaatgttgagtaagacaaattctaaacttaacttgagtgacatactttgtcaacatgtctgttagattttccttggtaccaatcttcttaaaatagatttcttttctaggtatgacctctctgatgaaatgtagcttgatgtttatgtgttttgaccttttatggtacatgggattcttcattaagtgaagagcacttcgattatcacagtgtattgtgatatcttttgatttgaaaccaagttcttctgagaaaccccttagccaaattgctttcgtaatggcttacgttgcagccatgtattctacttttgtggtggatagaaccaccacagtttgcaaatttgacttccagcttatgcatccaccaaatgttgtgaatataacctgttatagaccttcttgtgtctatactcccagcataatcatagtcgcatacccttctatcttattgtcaaaaactgcattgttcttatacattttctacccttattgtccttctaaggtatcttaatttcaattttatagaatcccaatatcatctccctggatcaaaaatgaatctacttaccatactcaatgcataggccaggtctagtcttgtgcatactatgcaatacattaaactccctacacatgaacc

SEQ ID NO: 242844 - DNA, 1261 bp, Cannabis indica
caggattgggatcatttgatctaagatcaactaagtgatatgaaattgaatagatattacagtaagtttattatatcttatccaagtccaatatcggttccttctcatgcatactttatacatccaacacaagcttaccttaaccattgccctagaaaggacttagcagttatctaaggggcaagtaaactacattatagattatcttatgagttaaaccctatgtactgataaatcataggaatacatttaatcacacaatcttgattactttctactgtgttgatataacaataaacaagaatatcaatgtgataaggaattggatgaatttataaatcaaacaagtgatcacatgaaccaaataacacattaaacaagtaatgaaataaatctatttgtttattaataaatgaatattcaaaattacattgaaatgaagttttatttaggacacaaaactcaacactaattcccaccttgatgtctgatggaataaattgtgttttgctgccatctgaacctcaaacttgcatgaaatattttggtattttcatcaccatttttgaaccaagaaagcttggttttttgactaagataatgaacatagttattgtgagaaacaatgtaatcttttcgagcagcatcttcctctaaaataaactcataattagtcgagtcttgttgaatcctctactgtacaattagaaaactattcagataagtttgatcctagatagcaacatcacccttaccctgcttactccactcgtttgggccagctttgaggggtttcaagtgggaaataagttgatacattggctgccccacaattttctccttccaaatagtctttacaacatcataaaccctgttgtgataaatccaacacgcaagtatacgtatcgttttaacaagtaatactcaggtaagtgagatcgttcccacgaggactgtagctaagtaccaatcaattgaattcttgtttctatttggcagaatcaataataaggttgaataattaaataactaaaaattaaaaagcaggataataataataaaaagtgtaattaattatggatgaatatttagggaaaagaatcctgttgatttaattacccaattgttaatgctaattactattctctttctcaatgtgaatgacagattataaaaattaacctaactcttttcagatcttttaggtcctaaatcacatgttatctaatcatctctgggatagattaacatataatcagca

SEQ ID NO: 242845 - DNA, 689 bp, Cannabis indica
ggctttccatatccaaagtcagcatcataaacaggaaacctacacaaactactgaacacaactgcacacctctctcctctcaccaatccctcattgcccatcctcagagattcaatgtattcatctgatttctcaaccccttgaagatcttccacaaactttttgtcaatctttcttatctcagctcctatcaccctcgccagctcgtgacaattctcattttcactactgatgatggacgaaggaaataatgtctccataccatgatagtagttgccgaaagagttttccggcaatggcttctcgaacctgggacgaatattcacagggtgataggtacaacataactttgattttacatctaaaccagtagccacagcataacggctaaataagaaagcagataaggcttccacacgagaaagccgcctctgccacaacttgggtattgcatggttttctcctctagaattttcctcatatttggctctgagagcctcaaccttacaagcttcgaacacaaacagttttgttacgtttgtgttcttctttgggatagaaaaagttgcaccataatctccaatattcttaggtgggaaaagcgatggagagatgaacgtgggtggtactaccttattctcttcaccaagagaaatggccatccagctttttgtaaactctaagcaaga

SEQ ID NO: 242846 - DNA, 828 bp, Cannabis indica
attgagattgttagatttaatcatgtctaattttagtaaaaaaaaggtctaacatgaatgaaagttacagaggcatgatttagtacatatcaaaatttgagggacataatttggtaaatatcaaagtttgaggaacatggtttagtacataaacaattactgaaacagtaaaattgaatgaaattagacaaaactccttaaatctaacaatctcaatagttcgagggagaaattttaatggccaaaaaaattcaaggacacaatttaatacatgtcaaaattcaagagaaaaaattactatttaacctaaattttatccatatatagtcatatacatatgttgttagttagcatatatacatcaatattcacgttctgatgattttaatattaaacttattagtgtgtttttttaattagtggttgatcaattcttagaccaactttataagaacttgttacatttggtccacataacattaatgaaatgaattaagtttgatgttcatggtattttggtggggtaggaaatctaccttcacaacaagcaaatagtcaaataaaaacactcaacaatcatagtattattaataacagactgttgattctagagccttcaggatgcatgctccttgttttccctcctgtacccaaactgggtttttggtccacccaaatcggtattgtggtggtatctggttcctcttttggggttttaatcctcatcatttcttttttcatctcattaattgcaacattaatggtactgacgattattatctccaatatctttcatcagaccaagtttttcttagcatttattatctt

SEQ ID NO: 242847 - DNA, 1414 bp, Cannabis indica
cctgagaaaatttcccaggaggtcacccatcttgaaattgttccaggtcaagcacacttaactgtgaaattctttcgagataagctaccgaaaaacaagatgcaccttgttgatatatgtattaccaatcaattaattcaagctctcttcaactgtgtagttccatacccacacagccttaaaatcattccaattgaccttcctcaggcggtgtaggattatacagcttacccggtatatctccttacatatcacgagactttggactgtcacaaatatactataggtcatgattttgttaaataaaaaaaaaaaaaaaaaactaacaatataggtgaaaaaaaaaaaatttattgaagtatatatggatataagatatgagtgtaattaataaatttggggtgttgggctaaaatattgtctgaattacataattacacgtagtgtatagtctgaatttctattgaatcaattctccattattacttattgtttgtttgttgggataataccattacattttctcattgtatatatctctgtcattactgtcaaatattacacttatttgttttatagtgataaataatccaaaaactgcacaatttcttaagaggtgaagttaataatatcatttctcactttttagtcaaactaactagtttaatatatatagtttgaaatgtctatattgaaaatgatcaaatgcattaatcatattaaatagtaaaatgttttttacgttcaattatataataacaaagcgagcaaatacaaataaaacaacaacgttacgtcgatcaattaaataattctctggctataattaattaaagagtttaatttattttctttttctttttttcagtacgtagtaatttataatagttttttacgtacatactttttatgaatttatatgatgaattagggcacaaaaagaattagtaattaaactacatcatgaaacgggcgggaaaaatctcatccaaaatcaacaatataacacttaaatatttatcgtccctaaaagttttatgggtaatatttatcgtccttaaagctgttcgaagtgaaaaagaagttattaattaaatttttaaaggagtgacacattgatcaaagtcgtttataatacttatattattagaggcaatatttgtcgctcttaaaataatcgtctctaatatttaaaattgttgtagtgaggtaccaaaccacactatctctcttggttgagaaaatatgtaaaattttcattgtggacaaattcacatctagtttggtaaaaaaaaagttgtatatttttatttcccataacagcatcatcacgtctttaataattagaatatagacaaaaatatgactaagcttatatagaacaaaaattgtttgtcttgtgtaaattaattcg

SEQ ID NO: 242848 - DNA, 1246 bp, Cannabis indica
aaaaattagaaattattattgaataaggtatttttagataaaagtagatattcttttgtattatgttttcgggtcatttaattaaggataattagtacttttttctcccgaactttgtcatgtactaaatcgtgccacctaaacttttttggccgttaaaaactcctcccaaactattgagattgttaaatttaaggacttttgcttaatttcattcaattttactgttttattgattgtttatatactaaaccatgctccctaaactttgatatctaccaaatcatgcccctcaaactttgatatgtactgaatcaatgccccttgaactttcatccatgttagaatttctttactaaaattagacaaaaaaactctcaatagtttggggggaatttttaaccccaaaaaaaattcagggggcacgatttaatacatgtcaaaattcctgcgggggaaggagaaattactaattagcctttaattaatataatttctcacaattaaatatctcaccttgattaatgtttaaggtagttcttgttgattcattaccaaccggccaatcttgctgtgatcaagatataaataaatgcataataaacaattacatcacattatatcaagtactatcatatatagttatcaaattatatgtgttacataaatataaatatatattgcaaaaatcatatgtatatataggtgagaaaaagacccttatgatgtttataattagatttagggctcacctagaagggcggtgtgctgtgttgtattataattgtgacatagagttttggcagattacctgaaattgcatactcatcaattccttctatttattagccgtttcaactactaattattatataactattatttatttagtactactgttttacttatattatatatacaatactcattatttattttagacacattatcactatactgttgtgtgctgcagggtgggcatccgatccaatccaatcttcttttcctcatttgatctaatccacttagtaatgagatttagaaaaatatcatccgatccaatccaattagacctcaaaatctaatccaattatcggttttttaattggatatccaaatacacacctaaatttcaatattagcttaaaaatataaagaaaaatacgttaaaaaaataagtatcactttttatttaagtttaatacttcataaatatacgatttttacaagtgtattgtagttaaaa

SEQ ID NO: 242849 - DNA, 1041 bp, Cannabis indica
tttgtgaattaaaaatagaaaacaaagtgttaccaacggtacctaaatttaccgatttaaaactttttctcacaaactcattacactttacatgaaaaatattcattgaaattgaatgagcaaataaaaaaactataaaagcatttgatttggaatgtttatataaatacatatgtcacatacatatggatatgagtgtttattggatcacatctaatggatttgaacccgaccgatccaatccaactatttattggatgttaaattttgtcatccgatccaatctaatcgaattaagtcatctgatccgatccaatagatgtattggattggatcggttccaaccattggatgcattgactggttttctattggattggattggatccatccaatctattttaattaccatttaagttgatttaattaaaaataaaaatatatatataaaaaggacataatttaagacctaataatctaacatacatagtaaacattagtttggtcaaacttaattctcaagatctcataataaaactgccaaaaattcatacttaattcaatacacattgatattttattagtgttaggaagatgagaattaatattttagatttatgatttttttatttaatctcatgtgttaaatgtatattaaatcaattaatatatattttaaaataaaatatataaaattgtaaatgtattttaaaaatttattaatataattggatgataattggatcggtttggttggtttggccaattggatcgaatgtcccatccaataaccgatctgatccgattggattttcgaaatttacatccgttctggtccacttatgattggatatccgatcctattggaaccggtggaaatgggatcggtcgattataattggattggatgactttctgcacacctctacatatggatagcgattggaagatcgcgagaaagatttagagaagagagagttttagagaagagagagattcagagaaaagataggtttggagagagagagagagagagagaga

SEQ ID NO: 242850 - DNA, 559 bp, Cannabis indica
ggcttgtgtttacaaaataattctctagtggtcccccaaatgacagaatggattgttcgctcctgtaggtgttaggtcgcaagaggtggtttggtgccaagtagtggttgtcgggtgttaggtggtcctaaggtgcagtagtagtggttgaagtgtaccccttatcggggtgtcggggtcaggcgtggctcctccactactcgtactcgggtcatgcaggcatcgtggttgtaccctgacatgtacctgcccgcgtacttgccttgtgttcttgattattgtggcctaacgactttatctttaacactaacgtgctaagcattgattcttgaatgagcatgcttgatgcatactaagtgaagaatcaaaaccgcttcctcattcacacataccctctttcttgctcactttcttcctgaccttctctttctaagtcgccaacctcttctcttggcctttccatcctgccaacatcacccactaggcttccccatctcgccaacatcaccctcatctccctatgtaaaaccctaactaacttaggcgtattacgtgattt

SEQ ID NO: 242851 - DNA, 833 bp, Cannabis indica
cttagtttgtctttctacccttctagagtagtgcatgaattttaggtggaaacctactagcaagcaagtgaaaaacgtgtatatgtgactcgcagttggcatgatagacaaacttattcctatgcctaagatatatatatctcttcaaaatgtatatttttttatcttgaatattattattttataattttatataagtgttgccacattatttatcataataattcatgctaatctatcaaaatatgtaataaatttggggtccaaatcattattactcgggaagttctttttattttattttattatacaaagcaatcaatattaagtaaaataaaaataatatatcatatacactagtctctataaatactaggacttatatttgaggcttatcaatatacacaagtctctaaacacatagtatatataagaagaacaatatacgatagctgatcatcgagatgcctgatcctccaccaccaggtcacccacatcatggtcatcatcacccgccgccacccgatccagcaccgccgccaccagttcaccatgcaccaccgccaggtcaccatgcaccgccagtcggccctcctgagccacacaagccgcatccccctcctaatccatcaccaccggccaccaccaccccataactagctcatcatcatgtctaatatttaatattacgtatatactatgcttaaataattatgaagccctcactactctctatcactatgtatttgtattaagatctagctatatatataaattcatcgtgtgtagaaataaaaatgttgtagctactcatataatcataatatatattc

SEQ ID NO: 242852 - DNA, 1709 bp, Cannabis indica
ctcccgaaaaaagtgaggattcaaatgaggtggactcaaatgaggtttgaagacgaccttgattatatcattcctccagagatggaggattatatggtctaggcaaaaaacttgtttggatattaagacaatgacatccatgaagcatctgatctcacaaagaaacaggtaaatattgttggattgtttagagttagaaattagtgtaattttatttttcagttttcaattagatttgcattgtgttaattatacttggactttgtcaaacattacataaaccacttggatgcaaagatcctgcaaaggaatctgattcttatgcagagccagatggacctaaatcccctaatgttgtggtcattggattcaaagaacctctagaagaaacttcaacggataagagattgagacttaggaggatgagaaaggcacaaccccaaacacaagcacctggtaccccttatggcagatgccattaatgactcatggcttgaaacacagccccaaacatagccccaaacacaagcaccaagtaccccctgtggcagatgccactaatgacacattgcctgaaacacagcctgattgggacactgattttgacatggatccaccttctcaaccccaaacagaaacacctgctgaaagacaaccccaaacacaaagcacaaccccaaacacatccccaaccccaaacagaaacacctattgaaagacaaccccaaacacaaacaactgatggtgactttgaatttatagaagaggagttcaatccagccatacaggggggagtggaaagggaacatgttggaccatcagatccaaacagatggtggaactaggcaactgagattcgtgttgccaatgatgatggcaatgatgggttagattcaagagatgaactacaccgtgttcacattgatgatgaagatggtgatcatacctcgaagttggagttcaatccccaaacaaagaatgatgatttcaagtttgagttgaacatagagtttggtagtatcaaaatattgagggctgcactaaaggagcatttcatacatatagacagggagtatattctaattcacaatgataaatgtaagttcagaggtaagtgcaatgcagagcggtgcccacggatgataaatgaacatgtgcaatcagatggaatgatattcaagatcactacaataagtgaaggagggcactagtgtggcattgtcttggataacaggtacttttgatcttttattgtaattgattgttcattaattttaactatttttattcatattgattgttcgttaatattattttcaggcttattaatgtgaattgggtgaccaaaaacttcctagatcagtttaggcaacaccctaatatggaattcaaagcttttgctgaaatgaccaaggacacaaagtattctaaggtaacttcatggcaattctacagagccagaaataatgcaaagacaatacttgaagggtctgtcgcagaacagtatgccatattgaatgattacttcaaacagattttgaagacaaaccctagaagtacaaccaagattcaaacatagttaagggatgggagaaggatctttcagagatgttacattttccttcaagcatgcaaagaagggttttacagaggttgcagccattaatagggctagatggttgctttctcaaaggttactgcaaaggtgt

SEQ ID NO: 242853 - DNA, 1007 bp, Cannabis indica
atatatttacggtttaaaaacttagtcgtcgccaatataatatcaagctagattaattaaaaagcttttaagccaatcgatcgatcacttcatgtaatggagctacggcttctttttctttcgtttttcaccaatatataagactgtgaatattaaagtaaaatttgactttttagttaaccctaagagacgtacgtacgtaatatcttatccagaatttcgatgatatctgatgcactttttaaatcaaccattgatacatatataaattattggtttgatgatagacatgcatataaattaatttaaaaaaggttcattgtttcatatattataatcaccttttttcgagtaaaaatacaaagaaatttctatcgcgatcgagaaaaagtggtctaaagctcgtgcttaccaagtgacgtgatgaggtggagttaatttccacgagatataaatgttcatatcaattttttttttttttttttgggagagaaatgttcatatcaatttatataaagaattaattggatccaaaagaaaaaatttagttttacaaacgtacacggaattcgcagtactataattaatccgacaaatttatagatatataatttatattatagaacatatatgaaatatgattggagaatgcaattaattaaaagtgtatacaaattaactctttaatctttcaagtcaaatcaagcttttgttttgatccctctctttttctttgatttggtcatgggttttcctttccgttggcaatataaaattgggtgagagagctttgtatcttgttcacatatttctttttgacctgtaataataaagttatgcaaaaccctttatataaacaaaaccagtgaaatggttgttgtgctaatagattatatatctttttacaaactagaaattaaaattatccactattaaagttacgcatgcacccgatccttttcattaatgcaatactattaaagtgttatatatgcatatatatatat

SEQ ID NO: 242854 - DNA, 793 bp, Cannabis indica
cgacttaaaataaaaaagaaaaaaaaaagacaaataaaagttgaggagttaggtttgtaaaaaattagttttttaataaaaaaaattattaagctaaaaataattttttaataattgttaaaattgtgttgtgccaccataaataattattataattgcaaaacaagcataaatttatactgtgtgatcatcatgatggttaattaagtgaaactatttagcaaattttagtatttagtatttcaaaatttagaaagcacaatttaatacatttttataaaaaaatttattagtaaaataactttataaaaacttttatttgcaaaataatcattaatggttgcaaaatcaaccgtgagttacattgtgcgaccataaacgactattatagttgcaaaatgactatgaatttacaaagtgcgactatcataatcccatagggcccgtttggtacgcaggattggactggattggactgaaaaggattggactggacaggacaagattggattatgctgaaagtaatcctgtgtttggtttaagaatggactggactattttatttatttccttttagaaaaaaaaacttaaatgaaataaaaatatataataataaattaaaattaaaatatataataataaataaatataaataaataattcgtagcaaaaaaataatatatcatatataattaagaatatatcataaatatataataaaatattttgtcatattttttatttgataaataattaaaataataaaataaaaatacttgaataatataaaatt

SEQ ID NO: 242855 - DNA, 1139 bp, Cannabis indica
tcgaagagaatagagaatcacaggaaaaaggaagtaaagaaaaactaaaagaagagaagacgagaaaaaaaatctaaattaggaaaattaggtttcgtgatttgtggggtttatttttttaaaaagaataattatcaggaaaattacaaagaaaaagaaaattaggtttcattgtaatttgccacatcatcagtcatctctacaacattatttgtataaattaataattaaaaaaatagagaagaaatataagaaaatagataaataaatatttatgaagctaataaaaaatttaaaaaataagagagttaaggagagaacaaataagactaattagagaaatattagagcgccacgtcacccacctcatacttctcctttatatatatagatttatatttattttattacatataataaaaaataaaaaaaaaaaaaaaaaccctaaatcagacccctctcctctctctatcgtactctctctcaacctcacccctctttgaagccggctgctgcccactgcccaaaattttattacatatataaaaagtattaaaaaaaatatatttatttattccattatttatgtcctttttagtaaatttcaaaatttttagcaaaattttaatacttgattgcatatcattctctactatcatgctttggcaatttcacatacgcatttgtgattcacaaacctcactatttccattattaattaagccttgcaaactgactacaaacttagagctagtgtaacttaaaatgggctccttgttgtggttgaagagtcataatagtataatgagcatgaggatatgagcagaatcatagccactgcaatttttgctgctaacatagcaaaatgttgtccattgtaggtctttggccccttccaaacggaaagaatgctacatggtggtctttacccgccttagaaattcctccagagaattttttaggattgaattcttctgcatcatcagtccagatcataatggaagagaaacgtatgtaggtttagatccaccctaccccgacaggaatggtgatgtcccctatttttgttttcttgtaagcatgtccatattgagcagcaatcactggtggtttttatcttaatacttcactcactgtca

SEQ ID NO: 242856 - DNA, 692 bp, Cannabis indica
agccagtttttgttcacgttagcaaagctagtgtcgcgagcactttagtggataaattgttattccaaagtggtttcgggtgagcatatgacacaatgtgtcgaattttttttggaagattaatggctctgtgatcagggccggtcaagtattttgggggcctcgtgtaaaattttaaaattgggttttttttttttaaaaaaaaaaaaaactgtgtatattaaaactacaattttattactagcttttttttttaagatttattcataaattttcaattataaaatttttatttacgtgtatataatagaaaaaaaaaaagtaattttcttaaaaaaaaaaaaagaaaagaaagaaaaatgggccttaaaaaaatgggggtcttgtgcaatggcccaagctgtccaatgcttgggccggccctgtctgtgacagtcaaggcggttggaaataatacattcttgtggctccgtgacggtcaaagcagttgaaaataatatgttcttattttattttttttgaccttaatgataatcgcaaggtttttggcactggatattggttgttggaacattaactcttggctctcgaagtccttacgagcaggggcgaacccacatagaggcgaggtggggtagtcgcccaccctgaaaaaaaaatcggtaaaaaaatatatatgcattttagttagt

SEQ ID NO: 242857 - DNA, 816 bp, Cannabis indica
aaaatagaaaaaaatatatatatgttacttgaagaatcactattgtaacgtaacaaataaaaaaaaagtatatgatatttgtaaaaatgaaaagtatcaaacaaaattaaaaatattttagttaaattaaaattataattaataataaattttgaatattattatattttttttaataaatagtatataaattaaatattttttttaataaataatgatattattgaataaaattaaaaaaaaataataattatacaactaaaaatatacataatcaaaataaaaaataagaatataacttaaaatatgcttgtaatattaacttagtaaccatatgtatgtaatctttggtaagaagaaataaagtatttttagatgttaaataattgattatacatagggaaggcactactctatgagtgagactctttaaaccattcttttatttttgttaggaacaatgatagtagtggacaaatttcttgtatttgagtattagacagtctagaccacgcataaagagagtgcagtagtacatgaaataaacttaaatagataattggacataataattagaatacaaaaaaaactgaacgagcccaagagattttgttgcaaaaaccaaaattgctactgtttattgagatttttagaaactaaatatttgagaactaaagaaataataaatgcaaaaattaaggagatggatatttttacgtgattcaagtgttagtcttagtccacgagtaagtctattagcctctaagggtgtatttgatgtgcttccaatattttgcaggaaaccctaactctgta

SEQ ID NO: 242858 - DNA, 655 bp, Cannabis indica
caaatagtgaaatttcccatttataattgtagagttttaacaaacttcaatggacttatttttgtcttaacaattatgcaaagagtaattattatataagtttagactatttaagttgtaagtgaaatttttcacgatatcaacatataaattacacatttaaataaaaataaaaaagaagtaaactattttaaaaaaaaaaaaataacgtgattttcttatcaaatatatatctctataaacaaaaatcacataattcaaaataataataaataataaacaatatttattttcctatcttgctttttttaaaatattattacttagcaacatatatgttaatatcttaccaataatcaacacatatatcatgaagatcaatcatagaaggttggtttatagagtgcccgtaagttattatatttagttatttattatcgtagagtttctatttctaaagtttttttattatatattgaaaattctagtttgattttataacttcgctctcattttaatttaatgggtaacatacactctaaaatcacacaaaataactttgtttactctctcttttattctcttatttttctttaaattttttattaaatttataaatattgatggattatataattcaaaaaataatatttat

SEQ ID NO: 242859 - DNA, 848 bp, Cannabis indica
tcatattaggttgttaatcaaacatacttgttagtaaatctagatcctggtaaaataatttaccaacaacacatataccataaataccaccatcctaacgtaataaaattaaaaaatcaagtccttaaataggaaaacgccactaatgttcagacataagttgtaaaggtttcaaactcaatttttaacgcaaaatcacctcaattttaacaagtaactatcaaaactagtcccatagctacccaagaataatattatgaggtcagaatctctataactattctaaatcacaaagtcactatataaaaccaatcaattttaatttaaaacgaaattaatccttacctcaagttttttctcttcaatgatttattgtcccgctactattagagcttgaattagtagattttagattgaaaatcaaagaaaatgaagggaaggagagtttcatcgcacggagaacagagaagagtttcattttcgttctttattcgtactgttataaacttaatatatattaacttatcaattttaaaaaaattaatattgataatattataataataataataataatattaacaataataataataaaaactttattattaatagttatcttatcatttcttaaccgcgaaatctctatttctaggacaccaggtcaaattccgcatactcttaattatcccaatacttacactatcaacttatcataatattctcctcaaatctataattaaacatgttatgacatttttagcccttgatcgagtctccaaggttgccaaacctgaaaatatttttattccacagataactcatattacattcacacatgctatata

SEQ ID NO: 242860 - DNA, 699 bp, Cannabis indica
tttttgaatttattaaaatttataaaatattttaaataattataatataacaaattcaactgatgcccattataggagtgtatttatattgtaaataatataaatggagtttaatttttggagagttaaaaaacaattaattgattattaacttgtatatgtatagcttttgagctccgatgacatgtggatgtacgctcccatagcttacaacggaatggatattattggcctcaacaacaagttttcttgaacggagggagagagttcacacattaattattttttttctatctatatatttttcttcttatgttgatgagataatcctaattaaactagaaattacttatgatgttatatatatatacatactagataaaagttacgtggcgagccacgtaaattttagttttatttaagttttagtggtttttgtttaagaattcgataagtaattgtaagttattttttttaaacgatttgttttataaaagtaaacttgttaagaatacaataattgtgtatataaacctataattgaaattggtctcgtgttctacgattttaggatgttacgattgagcatttgatattaatttgaaaattttgtgcaatagattcaaaattcgtagatattttattaaacagccagaaaaaaaaaaacactccgagttttgagaagcttaaattaagacc

SEQ ID NO: 242861 - DNA, 1248 bp, Cannabis indica
ttttttcaagaaaaaaaaaaggaaaaacatgtacaaaaatgataaaatgtaaatatatatatataaattcaatcttaagtgtattgtgtaaattttttcaaataaaaatagtgtttataatttttattttttatgtttttttaattttaagtgaaaataatgtgagaaaataaaagagaaagtgataagataaataaagtgaattttaataaaaaaaaaaaaagtaatacaatagactgtaattaaaaatttttgttttttttttttttgtaagaaagtaatcaaactttattaacttttaaattcagccaccaaacatggtagcaaattagttgggacatcccccatactgaaaatatgagtaagaaatagcagctctagcaatcttatgagctactaaatttgctgaccgtttcacaaaagaaatagatacaccccttaaatttacaagcaagttttgacactctctaattacatcaccaaataaagagatcatacgagttggattatgagttggattatgaattttcaaaattttaaaaccatgtattatcaattgaatcttcttaaatgtcaagattataatatcctcgactatataaaaataacctaaggtggcagctaatttttgttttgcacttatttgtactaaaattggctcaaatatattcagtaagagtttgaccaaattttggctcaaggtaatatcatattttatttaaaaaatagagggtgattattattgttgtctctatttttgtcaacaaagacaaatgatggtgcacccactagttgataaaacttccaataaagttgatgtgatatgttaggaagtctttctaataaaattgaaaagacaagacaaaacaagcccgtaccagcaattcctgttttatttatgtctatcaatgtatctccttctgtcaatgaaacatttagacaaataaaaaaataaactctatgactgcctataaatatgacaatgaggtcacatgtaaaatgattcttctctttctcttttattggtattaagccaaaatgctactaaatttaagagagagaactattcatcttctttatctttgacttgtgaactaagactcgataacgtccgaccacgaaaaatctatagtcttcatattctcttttcttttctagctagctcatattttcatttactcaagtagttattaaaaatctcagtcaacaattgtcatttaaattttaatattgacagtttttaaattt

SEQ ID NO: 242862 - DNA, 687 bp, Cannabis indica
tcgttcaaataattatactattttaattattaattaaaataaaaaattaaaatatcaaataaaactaacactacgtgacttgacacgtaacactacctagtatacatataaataatgaagattaatttctatttaaaacttgttatcgatgtaaaacttatttaattttactagacatttgagaagtaaatctcttatacatattaattcttttttaatatatataagaatatgtccgaattatttgatcaatataggcagaagaagcacatggggtatccagaggcataaattttgtcaaaagataaatgttaacaggcaaacttcatcacaagaggtgcaaagttattatttgtgtattttaatacagctttttatatattttaatttaataaataatacgaaaaatctttcttgattattaattgtgaggtgttacattaatatagttttaagcactttaaatttaaaatactaaatatcaatactcttgttaaaaatatcattgtctgaaatctgatccatctatgtttgtggtgggttgtaatgatttgtaattacactcatctttaatcgaaattagagtaaattataaccgtaactaatatatatgttagagtttataaaatactcaacaaatatataaatcacagatctaaacatattcctaaaagtgctttaatatag

SEQ ID NO: 242863 - DNA, 624 bp, Cannabis indica
atacaatacaatacaatacaacccgatccaacacaataaaatacaatacaatacggtgtaccaaacgagccctataaatgtatataagataattgttcatacgagaaattaccactctaattgtcgacgaataagacatatttaacacgaccaagggtcccaaattacatatgctgagcgggttagaaagcttatttatatatttaacccgaaatgaatagaaggtttagaaacaaagaggagaccttgagacccaacaaggaactcttccttactctgcatacactatgacctccagcgagagcggccgaccccagcgaggggctcctcacctcgctcgcacgacccctagcaaaggggccttctcctcacgacgcaaccccagcgagggggtaatcacttcactagcacagcccgcagtgagggacctctctacctcgctcacatgacccctagtgagggggcctcctcctttcctgctacgaccccagtgttgtgaaaaatccaatatacaagtatacgtatcgttcataagtaatagactcacaagagtgaggtcgatccgataagggctgtagtaaattaccaaacaattaaattcctaattctatttggtgacaataa

SEQ ID NO: 242864 - DNA, 793 bp, Cannabis indica
acgcactatataatttatttaaaaatttatatcatcataatgcataaattttgattttaaattataaattgtataatgtatgtttttaattttaaccttttttattattgctagaaaatatttttaacctagctagttttgaagacagtaatggcagactaatacaaggaaatatccaagtaataagtgcaatatctacagttgggtaggggttggaacttaaaagaacaagtataaaagtgtgcagaacttgattattagaagaagcaagaaaagcatgttgaggaaagaaatatacattttggtcttcaatgcctgagtgaagtccactttgaataacgaagaaaggtttttaggacaagtagatgcaaactgtgcattctttagtcaaatttgtaaaatatattgtcataagcagaggcgagagttcacagaaatgattgaatttagtttgataggttgttctaaagtggctaatggtggttgattggtttatgttgtaaggggtggatggataaaaagaacacttacaagttttttttttttacttaacaaaagggaattacgtggcgcaaattctttcctcattcctttgatagcttagacaattctgagaatcacgtgtcaatataatctctctcatgaagagttacggtgtatttaaaccattgacccaaacaaaaaaaaatatcaataaaagcatacatgatttataacaatataatcattttgtttataaaaaaaaaaataagttttatatttatacttatcaaaataggaagagttaaaaata

SEQ ID NO: 242865 - DNA, 1042 bp, Cannabis indica
cttaacaaatatagcaaaaccctttttcttattcatttttctttatatcttttttccattttcttacacagaacaacaaaacttatttaaaaaaaatcatggccaaaaactagatgatgtttgaaaatagctaaaaaaaactcacttgcaaagcttcaagaaattcttagtggtcaaggggcatctatctgagtacaaatcaacaacaatgtcccctaagctcgtcacaatcagcacagacattgcctctgccaaaaaaaaaacaaaaacccaatataaattttgatatgacaaatgtaaatgatgaaaaacccaagtcaaaaaagttgtggaaaaacaaaatgtagagaaaaatcaaaagaatcggttacccagtaccttaattgcagaagaaccctagaaaaaggtcttgggaaaacgttttggttggattatatatgagttttgctaatgggtcaggttttataattggtatttgagatctatggtagaggaagggaagaaatccccatgggaggagctcgattcttgagaagtagagacttctggtgtatcagtttagacaactttcgctcttgcatgtttgtaattgggtacccgacccactacccgcccgttcggtttattagaagtgcaatttgtggtataaaatataaataattaagtttaattttgatctctaaacaatttttattttgtaatttttcgtttatttctcgatattgtaatttcgctgctcataacgtagattattccaaccattaagagagccagtgcttgccaattttctttttattggtaagtttttccttttcatagattttgtttcgaaaggataatcaacattttattaaccatcaaacttaattactaaaagagtaacaagtcacttgggacattctccaagctgaaattacaatcaagatataatatagaagctctaacaaaagagtgaaccaccatattagttgatcgttttacaaaatgaatagacacatttctcaaaaaacttagcaaagccttacaatcgtttaccacttga

SEQ ID NO: 242866 - DNA, 1076 bp, Cannabis indica
tcaagttaatcatgtacttatatatctctacatgattatatatgatctcgcgcatcacacacaagcttagctctaggtataggcagactagatccgtactaagagctcacactctttaaaaggccattatttataaattttatacttaattaatctttattacccataaaatcaaagaaagaatttagcttaattagtagagcatgatattaatgttgtaatccttagttcaagtccattataaattaaacacattcaatcatttattattttatatatgtatataaatcattttttttatttaagtatatataaaaggcttcaaaattttatcctcctacaaattttcatcacaggttaggatgatcaaaaaaataccatttatgtgacattaatttaacattaaaattacttggaaatttgggaaatagtctcccattcatccatattgtttcttaggtcataaattagaatacatgtttcattataggaacaatgccagtctcatatattaagaggagtcaagatgtaaaaaaaatattaagaagcgctaatgaaaaaaaaggacaaattattttaaattataacactttatgttacattaaaaaaatattttaatatgattaaaaatatatatattagttattttctctctaacaatttatttctttttatttttctttctccacttctctctcttttttcctccacaaaaacatagtgtaagtgatcaagattaagtatgcgtatgtgtagaaaagtcgtggagccagccgcacttttcagtggggtaaaaaaaatttcttttgttaaaggagtataaatgaaaaatataagttgaataaacaaaaaaataaaaatatgtgaatatttaaatatatgaaaactgcaaacttcataggaataaaaataaatttatgtgagatgaaaattcaattatatgggataaaaaatataaatttgatgggaataaaagaaaaatatgtgaagagtataaatgaaaaatattaattataccgggcaaaaactaaatatttaaaaatatataaacataaaaattaatttataagaaattg

SEQ ID NO: 242867 - DNA, 702 bp, Cannabis indica
ctttcttcttctgagagtggggtgagaaaattgggagtggtggaggaggaggtcattgaagaataagtgagggatagggcaacagaggaagtgaggtgggaagaggatggcgaacgatcatggaaaaccgataataaataggcaaaaagaaggagagaataacgtagaaaatacctggagatggatgggcgcgtcaggtgatgaggggagttgcgaaacatcgcttcgattcctgaaatggcaatctgcagaggcagaggggaaatgatgacccaggagtaaatgttggagaagatagaaaagatggtttgggtagatttaagggaaataacagagagataaagaagagggagggtctgatcgaacattaatgcccaaaaaagggagccgccagaattaaatgcaactgggaaagagagattgcattaaataaatgctgagcacgtaagaacgggggttatttgtaatgattaaggttgacaggggaagatcagggagaaattaaagctaggagcgtcgaaggactgagagtaggagagggagggaacacagtaatacgaagctctcttactgaaccagagaccaggcctggaagaaacttcaagaagaagactaaagatttattactaggaaataccctttgattccaattacaatgacattaaataattaaaataaatttgggaaatttggggtaaattt

SEQ ID NO: 242868 - DNA, 1830 bp, Cannabis indica
gtctaatcatactcgtcccgatttcgtgccatgttaaaaaaactcgacatgtatttacatcactactttaaaccaatactattaatgagctcattcaatttacataatcaaacaaaaatttgtttcttaaaactataaaagaaaataataaacacacacacaattcatagagtttgaattgttttgtttttgtttctttttacatatatgtatacaatagacttgaaagtgaaatgtcaatattcaatatcaaaaccctttttctaaaaaaaaagattcaaaattgaaaaagatggtatggtgacaaaaagtatatgatatgtacaatatgttagtcaatgtgcctatataagtataaacatatacattagttttcgtaagagaatcaaaatggttgataggacaaatcctctaatccaaacaaatttttgtaatgtaatttttttttcccaaaagtccatgagaaagaaaggtatagagaatggtttcaacttcaatgtattactaaatatacattacaaaaaaaattatttatttttccttacctaattataaagattcttctaatatgaaagctatagctatagttgttagatcatcatcaaaatcccactacatggatatataagaagggagcccaagatgtaatccttccaactcattctaacaccaattatagcctttttttttttttaaatatacatattttctttctattccaaaaagaatagaaaaaaaaggtaataactacacaaccatacaatgctttagctttactcctactcaaaccattcatatataatatattcttcatactaaaaacctttcacaataataatccctcatgatcattctattctatcacacttaattaataagcttatacaattttctcttctcttcttcttcttcttcttcttaagagaataatgagttcaataccatctcaagtttcaaccaaaatgaaagcttattatagatcaaagcttcctttacctataatcaccaccataatatgtatcattgcttttgttcttcttctcttcactgaaagacttaattttcttacttcaaactcaattctaagtgccaagacatgttcaagaagagttggtttaaaaaaatcaagtaagccctcaaataattctatagagatttttagttatttcatacaatttttttatgagctaatgttttggttttttctttttttttattaggtgagaaaacagagagaaaaacagaggatttaatagatgataggtttgactttgaccctgaagaatgtaatgttgctaatggaaaatgggtgttcaatagttcaattgagcctttgtactcagatacaagctgtccatatcttgatagacaagtgtcatgtgtcaaaaatggccggccggattccgattaccgccactgggaatggcagccggaagattgcaccttgccaaggtttcttgcactatattacaattttcttatactatatggttatgttatgcatggagttgatataagttgggatttaatagatttgttgttttaaaaatataataaaatagagtttgatgtactaaacaggtttgatccagaagttgctcttaagaaacttagagggaaaagggttttgttgttggagattcattgcaaaggggtcaatggcaatcttttgtgtgtttggttgagtttataattcctaaagccaaaagtctatgaaacgaggtcgttctcattctgtcttcacagccaaggtattattattattattattattattattattattattattattattattaggggcattattttatattattatttttt

SEQ ID NO: 242869 - DNA, 1945 bp, Cannabis indica
attattattattattatttataattgtttttaagaaatttctataatgacagcagattataagaaatagtacacacctgatgtatatttttggtatatacaagaatatttttatactcttggtcttggtatgtcattagtgtataatttaactatctttataataatataagtattaatatttaaacgaaaaaatcacaacccaataactttggactacaatagatataacttgctgaacaagtaatacaggagttgcgtatggggtattgtacgaccacgttaatattattattagttttttatttatttaattttgcaagaaatgttaatattattatttacgtaacagaaaaacatatattaaggtaattgaagaaaagaaaaacaataaaataaaaaagctcacgaatcataacttaagtattgaattttttaaatcacaatccatgtataaaatataacttaagtattgtgtttgcagccatttgaaggagatccattcacttggatcaagggacgtcataatgttaatgctactaaggaaagacttgattggtgctttgtcaatgatcaatggaattgtaattttgaacctatcacaacgcatcaccttgactatttcaagtctgaccatagagctatttctgtcacggttgttcccttggctggccagcatcataccactacaagacactcaaggtttaggtttgaaaagctatggttatctgatcctgctgctgcagaaataatccaacatgaatggaaaaaaaatcaggctggttcttctatagacaatttctgcaaaaatattgaagcatgttcaagttcattacaacgttggcataaccgcaagtatgggaacatgaaaaaaaagattaaaaaggcacataaggaagtggaggatcttaacaatcaacctgtacgcacctcagactccatgactctgctgaaaaaaatggaagatacattggacgagttattaacacaggaggaagtatattggcaacaaagatcgagggtcaattggcttcaaagtggtgatgagaataccaagtttttccatgcttatgcttcatccaggaagtcgaataacacaatcaaagcactgcaaaatcctgcaggtgtaacagtcagctcgaagattgaaatgacagaagttatttgctctttttttgaacaattgttcacggcatcgggtacagatgcttcagcattagatcaggttgtacaatcggttcccaccactgttacagatgacatgaatcagatcctactacaaccttttacagataaggaagttgtagatgccctccattctatgagccctgataaaagcccaggaagtgatggaatgtccgcaatgttttatcaaaattactgggaacatgttggttcagatgtgatcaaagtcgttttaggagttttaaacgaaggccatgacatgagcactttaaacaagtcaatcatcactctcatcccaaaagtgaaaaagccgaaagccatgggggactacagaccaatcagcctttgtaacgtcatttacaaactgatttctaaagtgttggttatgcgcttcaaggaggtactgccctcagtcatctcggaaacacaaagtgcttttcttcctaaccgccttattactgacaatattttggttgcttttgagcttgtacaccatctaaaacataagacacaaggaagtaagggctactcggcactaaaactagacatgagtaaagcattcgatagggtggaatgggattacctatatgctatcatggaaaaaaatggggtttgcacatcattggatctctctcattatgaggtgcctatcttccaatagtttctcctttcaactaaatggagagattgttgggaatgtgttgccgactagaggacttcgccagggagatcctttatctccttacctcttcttaatttgt

SEQ ID NO: 242870 - DNA, 895 bp, Cannabis indica
ggtattggcgtaaacttctcaatcttagggatatcttcatacgggacacaatcttgaatgttgggaagggggtagatttctgcacaagctttacttgacaattcctttcttgttccttatgctaaagttgataattataaaataatttggtgtagattattcataccaaaatatacatttatcttttggcaagcctctcataataactttataacaaaagatcacctaatgtccagaggtacatttttcccagtgtgtgatgttggtgatgggtgtcatactcatcttttctttaaggggttttttttcaagcaacttctgcatgtaattaagtcttggtttgataaggcaatttggtcagtgtcgtaacaaattggctgatgtggctgaatatcaaacgagatcgtaacctgtttcattagggcacctccaacgctagcaacgttagtaggacccatttttatttttataaatattaagcttttacactaatcaatcagaaaagaaattaaaaatcaaaaaaaatatgggcatcggtgcttgacaagagcaataatacttatattatccatttgaaaagtcaaaaattttggataaatggacccacattttttacagtcacaaatatagcaactccccttgcagttgcactaatgttattgttgcggctacctatgcgacaactatatatttctattggtggaatcgaaatacttgtatttttgaacaaaatatgtttatgattttctatgagaataatttgactagagtagcattgaaattatcacttattgttaggagggaaatctctaaaagagatcaacaaattttttattttatttataatatgtaagtgagtatatctattgttgtcttatttgtttatttatttttt

SEQ ID NO: 242871 - DNA, 1152 bp, Cannabis indica
tattcaagcttaaatcaagataaaatcaatctaaatatgaaaaagataggttagacaagaacttggagtttacaaatatgaacaatgttatccaatgcatgatttagaacgtgctactattctattttctctaaatatatggcgacattatcttgatggagaaatatatgagatctacatagaccacaagagcctcaagtattttttctatcagaaggatttgaatatgaggtagaggcagtggctggaattagtcaacgattatgattgtgagatttgtatcatcccgagaaagccaatatggtggcggacgctttgagcataaaaggttccaagcaggttttagcctcaaaaattgttaaggctgaaattgaatttgtggttcggaagttacataacctgacacttcagtcaaatttgttggataggatcaaaaagacacaattggaagatcctaagttagtcaaaatttgagatgaggtattagcgggtcaacctaaggatttctcccattgtattcacgggaaagatgagaaaaacgtaaggtatcctcatgtcgatccaactcgccaataaaaggatcaacagagtgttaatagacaaagggagctcggtaaatatcctttataaggagactttaaagaaaatggggatcgaaaaagccaaattaaggccttgtatggtaaacctttacggattcaccagagatagcatcgctaggcttggcataatcgagctcgcactaaccttaggtgaggcacctttatctactacggttatgcaagacttcttagttgcagacctgcccttggcttacaacatattattgggtcatccagcactgatcagattaggggtagtcagttcgatgaagcacctatccttgaaattccaaacaccagatagcgtgggagtggtgcgtggctaccagatgctggctcgcgattgctatcgcatagagctacatcatagaaaagtcagccctcaattgatggtgatcttggcagaacaaactgagcagaaagacgaagaacttgacccccaaattcaagatgagagaaacttgttgaaaccaatcgaggaatcggaagaggtcattcttgttggtattatatttatccaggaccttagatctatttgcaagtatgttga

SEQ ID NO: 242872 - DNA, 1035 bp, Cannabis indica
gaaatattcttccgaagtagtatatggtagaactaactcataaaacgaagaaatggggttaatcacaagaggagttctcacgagattggccgacaaattatgaggtgctccgccgatgaaaacattcccagttgattcagtattggaaggaatacaaaaggcgtacttcttaggaagattaaaagccgaagaaagctctgccacaagcgagaaagggttctttcctaaaccaagtgagcctttagtaccaagaggaagacgattcatgaaaccgtttgtgaaatcggaggtaagacaagcgaaaggaagacgacgaggagaattttgaaggagattggaggacgacgacgtcgttttgagcttgaagaaatcttcgcttaatccaccgataactccaaatgataaagcgcaagtttgattggagcaatgaggccatggtttaagaaaatcacactgaagacaaccgcctgatgattggttgggtcccaagaaacgtccacactttttggtgttgcaatttacgaagcggtaagtggaggaatcgtaacctgagtcgtcgcaagtgaagcttgtgagttgtactccgatttcgaggagtaagttgatggtggttgagggagtgcctacttggattttggtactgtagtagtgactggttgagttgattatgtttttggtaagtgggaaagcaatggctgcttctgaatattgtgatgatgagattatgaaaaggagagttgagagaatagtgatgaggaaatatgacgatgagtatgccataatgctcttattatatttttcttagtgcctactattggtattggtgttgtatttatagtttaaaaaagaatcaagatgttgggaaaggaatatagaaaaacacgtgctcattaagttttttaattaattaaatctcaccaaacaaaaaccactggctgaacatttctagcgggttcgacccgaaccccagcaacccgcccgaatccgaatcggtgaacctgtaaattttttttttgaaaaaatgttcgggcgggt

SEQ ID NO: 242873 - DNA, 870 bp, Cannabis indica
gaataattaatgcaggtggttttaacgtggttcgggtattaatgagtcatagtccacgagtctttgttattaatgagagttcttatatagagaatgttcttggagaaatctctctctcacttcattttctcttttcgatcgatccatcccctttttcgttttgttcgttttgttccaacgaaccttataataataactatcagggaaatccaatgcctaactactaccatccggggttaagaaaccatgagaatctttcttatggtaacactaaaaacctcttgcaaccacctcctggatttaatgctcaacaacaacctgaaaagaagtcattagaagatattttgggtacttttatgatggaatccagcaagaggtttaacaagaatgaagtgaggttggaaaacatagaaactcacatttctaacatggatgcttccatgaaaaatattgagattcaagtaggacaactagccaaggtagtgagtattaatcaaaaggggagagtaacaccgtggtaaacccaaaggaatgattacaggcaattgcattaagaagtgctaaggttgtagatggtggtcaagtaaaagatgaagatgagtttttgagaaagcaagatgagccaatggtaagagaggtagacaaggaagaacatgtcataaaacagaatgataatgacaagtctagaaaagaaaactaatctcccaatgtatcaacctcccataccgtatcctcaatgattccaagagaagaaaagatgagcagtttgtaaaagttattagaaactttcaagaagattcatataaacattccctttgcagatgcccttgagcaaatgccaaactatgtgaaatttagaaagaagttatg

SEQ ID NO: 242874 - DNA, 691 bp, Cannabis indica
ggtacactttcaattttttatttcctaaaagaaaaatagagacaaaggactaaaaaccataatccatccttatccaagtttctttctttcatacaatcttttcctagttggtaaaactaattatctcattctaattcattttcatgatttatgtgttaattagggacacagatagttttcaagaacagcttgcttttacatacgattagatcgtctcagaaaaacagctggctttttattagtaattgagtaactgatgataaatgagttcttatctttttcatgaatgatgaaatatatatatatacataaatatttttatatatagcttataatagcatgactaattattaattaacaattaaaaattttaagcggtctgtcagcacaaaatttgtaacaatggtacaatgctcctttattattattttttaaaaataataataatgcatcgcatcaaagaagaccgttacaaaattcctccaattaagcatgtacaactaatttataagaaacataattaaaagtattttgaaaaattaaacattgaaaatatctaaaaaaaaatccttaagcttaagaagaagaaaaattatccattatcatttattttttcatgagagtaaaatagaaggatatcaaatcatgtatgaaaacaagaataataagattcaactaaaaaaagaaatat

SEQ ID NO: 242875 - DNA, 708 bp, Cannabis indica
ggaggtgatgcttcggtttgggttcgatcctcattttgtcaagattattatgtgctgtgtttccaccgtgtcgtattccatccttctaaatggtcggcctctcaaaaaattctggcccgaaagaggtatccgccaaggagatcctctatctccctacctatttctcttatgtaatgagatcttttcaaggatgttatccttggaacaagacaagggtctccttcatggtattcgagttgctagaaacgtcccggagatttcccatttaatgtttgcggatgataccattgtttttactagagctaatcttaatgaagtggaggtgctaaacagttgtatcaagaagtttgaagactggtctggtcaaaaatgtagcaaacaaaatcgggaatcctttttctagtaattgcccccggtctttgagagaagccattgagaataatctgaatataggggtcattcgtgaagaagagaaacatcttggcaatccctttatgttcggttgaagtaaacgaaaagattttaactttctcaagaccaagctccacgatagaatggagggctggagacttaaaactctctccaagatggggagatcggtttatgtgaatgcggttgctcttgctttaccttcgtataccatgtccacctttcaactccctgcttcttcttgtagagagcttgattccattgtcagaagattttggt

SEQ ID NO: 242876 - DNA, 1241 bp, Cannabis indica
taaaataactttttgatacttatatcaatgattgttctttgattttactgggcatttgttttgtgttaagaatcataaaatcttaaaaccaattggtaaattggtaataagtagaataactcatatttttatatataactcaaaacttagatgaatgaattaatttcttgttgtgtatctttctatttggatttcttgttagctataatatatagtaccttaatttttacaatatggaaatagaaattatttgtacttttatttgatttagtttacttttatttaagagtaaagttttttaacataactaaaaaatgatcatgtggtgcatattcctttcgcactttttaataattccagcgactatatgtcaactatagggatcttatacattattctatcttaattgggttatcagtatgcacttcaagagtttccattctattaaggatggcactgccacagagctaacccctcaaagagccaagcataatccctcctaatgagaggttgtggtgaaattcgaactcttaactcgagcaatgaagataccaataaagacactttaccattataccacacaacagatggtgtggtgtagtaaacattactctttactagtgacaactgacaattatttagtcacagactcacaatacgcatttttttgttaactaaatattatttccattcctttaattctaagtgattggaaatacaaatctaatgtaaaataactttctgatacttatggcagtgattgtttttttaattttactgggtatttgttttgtgttgagaatcataggatttcatctttaaaactaatcagtaataagtggagtagatcatattcttatatttggcttgattttgatactatgttgagaatcataagattttattttaaaattaattagtaataagtaaagtagctcatatttttatatatgtcttaatactctaccatttattacatgtttattacatgtagaacaatgtctacaatattttgagttttggatgtgagtggaatgtgaactaagtttaacattcctttcatatgaaattcaagtgtagaaagggataagtagagattacccattaaaatgcatgcatgtagatcccatgaaataacaaagctttcctaccttaaaaattgtcaatcctattcccacatagtcaaaccattaaacagtgttgcaatcttaggtacattcttcccatttgttttatggaca

SEQ ID NO: 242877 - DNA, 861 bp, Cannabis indica
atgaacctttacttcacaatggatttaggactaccaacaaaactcccttgttcccaagaaaacctctcaaatataggcttcctaccaaggaatacttggagtcttcgccaatgaatttccttatgttcccctgtgcagtttgattacacaagtaatgtgtcacaaggactatggcagccatctactggaacgaagctctacaagctgaaatacgattacaatgtacaaattgtattgcatgacacaagtattgtcacagcagaagaccatcccatgcatcttcatggataccatttctacattattggatcaggtttcagccttatcaacccacaaagcgatcctgctaggtcaacctctttgacccaccacagaagaatatcattggaactcctttaggtggatgggtagccattggttttgtagttgataacccatgtaactttcttgcattatcatgtgagcagacatgcttttataccaagcaaccctgccaaatagaattctctctaattcaatacttctcactcattgtctatttgtaggagtttggctgatgctttgtcatctttttgctcacctttccctgggtttggcaatggctcttctagttgaaaataaatctggacgactatagtctgtgaaacctccctctccagatctttccatgttaaattatcaatagggacacccactagaaggatttgttgtttcttcttgtctgcttatatttaaagttgttggacatggatgttatagattgaaatatatgtatccatttggagtattaatctaaaattagactttgttgaactaaaatagatcaaccgtcgtcgtattcttaggcttatgtaatttatt

SEQ ID NO: 242878 - DNA, 565 bp, Cannabis indica
gttaaatttttatgaatttgtaagttaccgaatgtatacgattataaaaattaaatagactaacaaataacgcatttggaaaatcatcatataattgaatttttatttatttggaggtaattacgacaagtttgtgtgaccttgtaattacactgtataactagagctagagttaattgagcagttccaattacactctctaattctcatgacccatcataagaattgaatgtaattacactgtgtaattattaaaaaaattatattttaaatattaactattaaaaaataatattttctgtgtaattattaaatattttgtcaaataatacattaggatttcatatgtaattaccacctcatatttaaacatatcttttattttaaaatatagtgtaattggtagatattgtgtaactactatcctaataatacaataactaataaatatacacttatttctaaacacaccctaaaatctatgtacctatataaaggagatgtttaccgagtttttcggcaatcgaataattttagagcttaagaaattaatgaaggtataaat

SEQ ID NO: 242879 - DNA, 1103 bp, Cannabis indica
agcttccatatctttgtgatacgatcctaaattgatagggattaatcttgtacttcacgatgaaaattctaaaaatgctaagtgtggatgcgctgcttggattatctactgattggctttgaaggcactgtccgtgcaagtgtatgctgcgccctactcggagcatctctctcagacaaatatggggaatcaggtccacgtgtcaccagcatgtgttgccacgtcacagtgcaaaaaatgggataataataagtattattgtaagtcttttattcttagtaacgtccgcccgaatagtggctgctaagagtagtgcttacaaagtatgaaacaatggtagaagctcataagatagaatggccttgacttgcctaaatgggagaatgttggattctcatcttgatcgaataaaaggttgctagaatggtatctattttagacgagccgactgctctattcaatgaatgatatctttgactcttgcctaaacgggagaatgtatcagtttgttggaaaccttggaaattatttaggattgtttgtttttgtattttcacatgtcattcgtacttgctaaatgcttaataaattctaaatgtgtatgattattttgtattgaaccttatttgatttctatttattaatatttgtagttcccaatatgactatgaacaacccaattgtttcactattgactgacaacaagctctctgaagctaactttgtcaaatggaaagagaatattaatattgctctcataggtgaaaactctatgtttgtgttaaccaaagatgctcctaagcaaccaggtgagaatataaccaaggtagttaaggaaaagtttgagcgttgctagaatgctaacaataaagctcgatactttatgctgtctagcatggttgataccttgaaaataaggtttgccaacactctcaagcttgttttgaggcaaccaagaattttatcaacgcacatatgaagtctcatcaaaacgtgcgtgatcacctactccagattgctagttactttcaagaagttgagaatcatggtgtaacgccctaaataatcaggcacgctactcaaaatacttatgaaaccctaat

SEQ ID NO: 242880 - DNA, 1838 bp, Cannabis indica
tataaatagatagtgaaggcttcaggaaatttacacttaactttcacacttctcattcagaaaaacctagagccttctctctctaccttggccgcccactctctctctctcttcttccttcagatttcgaaatacttagtggtaaaataatttccaacattttagagcaatatttatcttcttttagccatgattaactcttggagttagagttaaactgttgggaatggtaaggtaatcttcttctagttctctttgtttttctcaatggaaagtttggtttaagttggagatttcatggttgggttgttgtatgttggataggaataagaatgttatcctaggtttttgttgaaggtggtttggttgccttttagtgagttttctagctagttggttagagaaccaagcttgagttctcagaactcaaagcttgggcattaatggtgaatttgtatttgtgattcgatgttgatttctgttaattggagaatgttattttgatgttaagtaactgttctgtgattgcatttgagattgattggaccaagttttgggacttagaataattgagttttttgaggccctactgttgtgaaccaaaattatggatgttacagggccacccaaaccgaatttttgtttggcagtagttgggaaacactgatttttgtattttggccataactttccactcaggtgtcttttttagatgttctatatactattttgaaacttgtgaagagctctaaagtatgatacataaattaaagccaaaatatgtattttattttaggttattttcaccacgaggtttggtagaaaaccttagatttttttatgcgggtattaggcagtgttttagaatagacacttatcgatttaccattgttgtgacatagggccaggattttcgggcatttctccacttgggttggccagcatgcatgaatttggattaaaggtaagaaaataatatttttactatataacatgtcatgttaagatacgattattatcatttgtgaatagattgttatcgagattaagatacaattattaccgttatgtgatgaaaaggttatcttattaggcaatgataaaaaggttgtcttattaggcaatgataaaaaggttttcttattaggcattggtgataaggttgtcttattaggaaatgatatttggatactgaaagattaggtatcaaaagtcatgactataaactgaaactattgttaggcttctcttatcagggatactagtggctacgtatccgggttgtctggtttgacaatgacagtaacattcggatatcagtgatatgtgtcaaggttctcttattagacaacaatgatgatagtgggataccagaaataggtatcagggttgtcttattagacaacgattgtgatgtttggatatcagtgatgagtatcaaagttgtcttattaagcaataatagagattttgggatgcccgtttaggcatcagagttgttttgttacacaacaatgaaaaaaggttacttggtatggattgtattatttaataagtaattgtatattattggatgtttttatattgatttttatttatgactgaacatctctattgatttggatttaattacgtgtgtaatgtgtgattatttgacccttcttattgagtttaataattgatacttgtgtaaggagttatgatgttgtattactagcctgttccaacttcccatgagatcaattttctatgtgatctaacaaaggagtgccactcataaagaaaaaggcttctatcatctccaccagtttagtgtatacatcgataacatcactaag

SEQ ID NO: 242881 - DNA, 1032 bp, Cannabis indica
attcaatattttattattattttgattgcacattattttgtattgactttaataataaatttttgattttattttcatatatttttttttgaataatgtatacatttttttttattctaataacattttatatatttttctttattatttttgtgttgatattgaaaatatattttatttttattttaaatatttattttgttggcatgtaagaaggaaggattttttttttttaaaaaataaaattagtataaatttaaagatatattaatataaaataataaaatgttgtgtgtttttagagcagtttctaaagagactgcatttaccatatatgcagtgcatgtgccgtccaacgaaattgtatttttttgcagcattttaagattttatttacagtgcacgatatatatgtcgagtcactacataattttttttatataatttaattaatatttatattattatatttgtaaaattaagaattattttttgagaaattttataatgcatattttaaaaattaatataataataaaaagtattttttagtataatttttaatgttacagttgatgtggaaatatttattgactccaaatttaatgataatgtattcttattgcagtgtaaatcaaatttgcccccgagacacaataaagacaacatgatatgttgtataaatcccatgaaacgacgtatctctttcagccgtcgatcttcaaatacattaacctaaaccaacgggcttgtgcgtgccatgtcatcaatccggacttttattcaagctccaatcaaaagcgttcatcaattagtatatattcaaaaccaacttcttataaatctcatcagtttcaaattttctctcatattccctcactttcctctctgaaaattttctttcattttccctgaaaattatctgatggcgccaagagcagagaagaagccggcggagaagaagccagccgccgagaagcccacggaggagaagaaaaccttggccgagaagacacctgccgagaagaaacc

SEQ ID NO: 242882 - DNA, 760 bp, Cannabis indica
ttaaaagaaataatacatggattcttgtaccttatcaagatggaatgcatgtacttgacaacaagtgggtctatcgaatcatattaagagccgatggcacagttgagaggttgaaagctcggttggtggccaaaggttttcaacaaactacaggggtcgattattttgacactttcagccctgttgtcaaggccaatactattcgtataatgttcaccttggctgtaacatatggctgggacatacagcaaattgacataaataatgctttcttgaatggggacttagatgaggttgtctacatgcatcaacctcaaggctttgaagatcccaatttccctactcatgtttgtcaacttaagaaggctttatatggtctcaagcaagcacctcgggcatggtatgacaagttaaaaacagctctattgtcatgggggttcaccaactctgtctctgacagcagtttatttttcagcaatacaaatggtcatcttctcctagttttggtctatgttgacgatattctaataccaggtgctaattctacatatgtccaataggttattatgaatctacaagcaaaattttctctcaaaacactaggaaccgtgagttattttctgggttttcaagctcacagaattggtcagcaactcctattgtcacagtcccaatatgctatgggtatcctgaaaagagctaatatggacacatccaaatcttgtaccacacctttcagcccagggtacaaactttacac

SEQ ID NO: 242883 - DNA, 576 bp, Cannabis indica
ttttcgctcctcaaacacaaattttgctctaggtattccttttatccaggtccaaaatggggtagacggcctcattcacattcttgaatgctatagaagtaacaaaatgagtccagggaagctcaccaaggaacacccaacgctgaggttgacgtatggcctagtgtgctaggttctgcttatccgattctagttccatctcgagcatctaaatatcttttcatagtaaatgagagctacgacttgtgacaagtcaaattcacaatttgatatttcatcctttcggcaaagtggaatatcgagaaactagtcgtaaatcgagatgtctcgagtctacttgatttcattgaaaagcgacatctctgagagctagtgaaccatttcacttaaactaagaaattgactaagtgatgtcaaaatattacttacgcatcaaaaaatacaagtcttgcacgttttcccactcatacaacgtccaagttgatgtcaaaatgtcaacctgggcagtggatgtcaacttgggtgccggttgctgaatgaccttcagtaaacaaccataaatcactcaatattgat

SEQ ID NO: 242884 - DNA, 527 bp, Cannabis indica
tcgggtcttggtatgattccaagatctagacaccgactacaggttggttccgagccccgggtcgttggtcaagattcagatcccaatcttgggtcccagtatcttttcgattcggatcttaggtcccagtctgtgtccgtgtctaggtcagggtttgggattgagaccggggttaggtcttgggtcccaatcgcagtcctgggtcctaattattgttctaattttgagttttggtccccaatctaggtcagggtcctgggtctaggtttgagtctccaatcccgctatgggtcaaggtccaagtctgtgtctccgttcgcgttcgtgtctcgagtcccgatccgagttttgatttaagtctgcgtcccaatccgagtttaggtctaggtcgtagttagatttcagttctcgaactcaaacccagactcggagtcgaactaaagattggggtatgggtctgggtccgagtctgggtttgggtttgagtctgcgtatgggtcctagatccaaacactgacgtacgggtc

SEQ ID NO: 242885 - DNA, 775 bp, Cannabis indica
tagtaacataacaatttacaacctctaaggcgagcctaaaaataattgatcatattatgaacttctgctaggtttcttaatacacactcctttcactttcaagccatctctttttaatgttacacaaacattgacacaagagataattaaacaaaacaaaagtcttagctaaacaaccaacctgctgatctcaagcttgttcttgtaacaccacaacacagaaggcctcgactttacagctgccttagtcagtatgtagtgaagattcttaacctgaacaaaaatcaacagttcagctaaacctcaaattcttgctttcaacctataagatagggttccaaaactttaaagtatagtgaacgagagagatagagagataaccgtgtcaaggtacttgtcgccgacgacgacgaacatgctgcggtgtctggtcttgacgccattctcgattagggttctgatgcggtcatctaccttgagcttcattctccaaaatattaacagaacagagcttcttcttcttcctattcttgctcgtgattttgaagcctattctgttctgcctctcgctttcaaagtgttccttagggtttatgagcaaggtttttggaatgaaataataatttatttatttatttatttatgtttggagaaaagcgtacttcattaatagaatacagtcattacataatatatttaacgggatggtagatatcggaatatcaccaaataatttgtgggtaaacgcccacttagctacattatgggcaacaaa

SEQ ID NO: 242886 - DNA, 1039 bp, Cannabis indica
gatgacatgaagctaacatgaatgtgtattattgtttcgtaaacatattaattcagatcattaaagggattgttggagaaagaatattttttcctattgacaaagtagtgagtatggacatccaaattatccagcattcaatactttctaaccaaattgtcttctgatgaaaaaaacagaactgtaatcaagaaaccaataatttcttctaaaggttaaaatcacttttccctaaacaaagtcagcataccgaatgcgatatgccaggattgagaaaatccatgatttctatatcttagatggattgtacatctaaatatagaggaagatttacataaatttcttggccctttttttagactttctactgttggtacttgcatcatacaagacacagtaccatctatattgccatcaacagtgattttaccaatccatcaatctcgtgggtcacgaattcaaggagtacttgctactcaactagttatttttgcaaattgacccaccttgaaatatttactcattgatgcaatttaccaatagcaagacaaaagatattgaattacaaacctatataaatgatcaagagacagaagcttgtggtgaagggtataatcgcttccaatgtatgtcacactaagctaccagcatcagggtgaggccagctccttgaagttggaaaccggagtataaatgtcccaggctcttgaaaacccttcggtccttgcagtgataattctgcttcttcctttgtaataaatccctctatccatctaggtgatgtagaactccacgctgtgtttatccaatctcttgataaagtataagccacagggtataaccagcaccacattcgttcaaagttctcttgggtcaaatattcttcgcatcctgcaattctcttcagaaggttgaagtcctgaagtgatgaaatgagattttagagaaacatatatgccataaggactgaaaaagtttacaatcaaataccaatatatatataaatctgataagatccgagaactccaactcaagaatt

SEQ ID NO: 242887 - DNA, 808 bp, Cannabis indica
tttaagtcgggtctaagtccggatctggagtcgggactatggtgggtcggggttagagtacggatttcaaaatttaagttgggtcgaagtctaaaatattaattataagaaaaaaaatatttaaaaagttttggaaagtgttttttttttttatttttttttaaattttaattctaaattaaaaaattaaaaagtaaaaatatttttataatacatgctctattgaaaatattttcagaaaattaatgaaaaaagtatggtcaatcaaacttagactaattctatttctttctctcactatagctatataatataacaataaacacttttaaactaaagaatatgcttttgtttcaaggatcatttatatgtatgaaacgactaaaataaagatacatattttggtggcgtgccttgtatatagttcttttttactagaagtttgtagttttttattgtgtgagtcatgtggtttagtttttattgtaataatggtgtttactatcccaaattggtgatattggctttgtgtcgtttttgtttggttaattagtaattttttccctcgaattttgacatatactaaatcgtatcccctgaacttttttggccattaaaaattttctccgaactattgagattgttaaatttaaggacttttgtataattttagtaaaaaaattctaacatggataaaaattcaaagagcatgatttagtacatatcaaagtttgaggggtatgatttggtagatatcaaagtatggggagcatagtttattacataaacaatcactgaaacagtaaaa

SEQ ID NO: 242888 - DNA, 1814 bp, Cannabis indica
acgagtttttaaaccatcaagatattctagtatttcagttcaaaaagaaaaaggtattctagtattctagatttcctcttcatattcacttatttttagaattagttttttcagagctcataaaaagatgcaatatccagtgaaacaagttggcctctcaaatttgagttatttatttctattattagtctcaaatgtggcaaaataatcatgtacaatacatacctaaaaaaagtctgtggacttccattcaggatcattagttctaataggagttacaaattgatgggaagattgaatcagtagccacacaccaaaatcatatgtggaaagttttgttggaagttgtgtttgttaaaaatcgctagagattgcaaaactgcataccgtggcaatcaattcctgcagaaaaggaaacaaatgaaaacatagtgaatagcaactaaggaaaaaatagaaccgaaaggactaaaggaagggaggccggtaatcagtttatgccatcaggaacttcagtaaaaatctgcataaagaaaaccagaaacactaaattgaaacttacagttagctgtgtgttgactggcttgtccaggttctgttagacttaactccatatcatgagttgctgaccaaccaggttcatatgcttcgagaaaacccatctttgccttgtttggtagatcatggggatgaacaaatggaactccaggtggccaccctatttccattcttatattggcacacgggctatcaagcgtgtgaatgtgattctcacactccttcaggttgcaaaacctcagcttgatccccttcttatctgcgatgtcctgaaccctttcctttagaactctctgggcttcaaggcgtaatctttttgaaggtggaagaggtttagatcttgaatcattcttcctcctccttgtcgtatgcttcgtggatcctgtaccagcatttcatcgaccaaggacctgctgttaaaagcttctcactagagctactcacacaaaaagaaacaaactacaagctaacatcaagatgcaaattcacacaaaaccaattcttttaaaaattcatcatcataaaactattagtatcctttttcaaagtatagagtcaggtcatcaacatagcaattcaattatggcaatcactaccagtcaagcaatcagataataaaagttagtatattgctgcttaccctcttgggtggcattaaaattgaaattcgagacactgttcctgtttaaaagttgatcagttgggtgcgctttctgcataaagtcatcaactggtactggcagttggaactgagcatctaccccgtgaccagcggccctcatttctgaacagctgagactactcatagatttaggcatgagtttgaaagctaaagagcatcggccaaataagttactttggagattattaatatctgttctgtgcagtgcagggttgaaatatcctgcagtttcgtgataaagtgcaagtccaggataaacgatagcctcctgaggaccaagaacttcatccacgagattccaatgaccttgacaatcttttatgtgtaaaccagccttatctgactttactagagatatcaagcttttgtcaacttgatgctcgtggtcagaaaacattaccagttggccatcctcttgggttgcaaaattatggtgttgagctccctggaatgatggccttgcatgacagcagacagatagcactgatgacgatatttcacgaggtctcaagggaacattatcaagtatttttgagaaggacgagcttcgtaagttcagaaaaaagctaatggc

SEQ ID NO: 242889 - DNA, 1022 bp, Cannabis indica
aaaagtttggtatgtggtgatctaaatgtgggtgggtctcttgctaaggcccaatcatgtaaggggcagattggtttaaatgtttctaaaggccctactgttgactcagtttgtgggcaagcggtccattcttaacttgatgagaatagggccttgtctagtttttttcaagcccaagaaaccatgttacaagaacttaaaaaatttgggagcttggatttgtatgagatacgacggttagggggtgatattggtgtcaagcctacttctgaaactaatgaacgaactactccttttaagaaaaggaaattaaatgaggcctctgcttctttatgctcaaggcctcaaaattgttccaaatgcaccccggtgttattcgtcatttcttgtgggactccaaggagcaggatcatgagtctaaggtagcctttaaagaaccctcttatgatatctcgatttcacgaagtcacattgatggtgttatgaagaaccctatggttggctctttttttattgaagtctggctatagtgtgtctgttcactcttgtacgcctgtggaggagaatgtcatatctcctccacatgagccataagaggcgttgcttggaactgtagaggattagggcagacactactacaaaaaggggtttttgcgtcggtcaacacctctggttaaacttgttgacatatgcaaaagtcaacctacacttttttgcttcaattatccaccgatgcaaataattattaattagcgtcggttatctatcctacgctaaaataaaaatcgaaacaaaagataaaatataaaaaaaatatgtatacattattagcatcagtctacaatcgatgcaaaaagccattatatacattattagcatcagtgtacaattgacgcaaaaaggcattacaaaaatcagttatgggcttcggcccatctttagaaaaccctacttacatatatttcaacttaacctaattccctcccagtcgtcccatttcgttacacacacacacacacaca

SEQ ID NO: 242890 - DNA, 1978 bp, Cannabis indica
aatcaagctccacttgagaacaaattccctcagttcgcaccttgccaccagtgcccaaaagtatccgatagcaagtggtggctgatatgggcaggcctactgccgcaacaacttccattgaaataaagtcgtgggttgcttcgctatcgattaatacagtgactgtctgattaccgattttggccagccaatttcatggtgttggcagtggagatgccaactagagaattcagagaaagggtggcaagagtctcttcggtggccactgtttcgctcgaatccgatgagaggagggtgttgtcaggaaaatctaattctttttcgttcgcagtgagaagaatttgaaggagcttttgttcacatttacggccagggtgaaatttcttgtcacacctcaaacaaagcccccgagaatgtttctcttagtactccgccttggtcaaccatttgtaagatgtgtcagtggccgatcgagtgctaccaattttggatgtagttgatgccatgttgactgaagatggagaatatggtcgctgctgtgaaattggtggtaagattcgttaaggaaaattttagtaattagcacgggctgctgaactcgacccaaaagaatgcttggacaaattgggcttaagtaatgggctcgagttcattagttgatggcccccttcaattctttgggtcatttccatgatatgggctaacccctggggctgcgggatatgcaatgttgccttgatttcttctttgagtccttttacgaatcctccttctagaatatggtcaggtacgtcggttacccgagaggacaacatctcccactagacacggtactccttcaccgtacctgtttgaaccatcgataacaactcctctgagagacgacccaacaggtaccgcttagaatagaaagggaaccatttgcttgagcatcgcccaagaagtaataagccagcgttggttctcccactagaacaggatagagcaccaccgtcgaggccaacaatggtcgtatcaagtttcatcgactccgttatttttgtaagcaaaaaataacgttcgatacgggcaatccaaccatcagggttatcacccgcgaacagcagaatttccattcgtgggaggtggtagtctagatcgttcgagggtgaatttctaaacaacccaagctgtattgggggtcccattgggctgtttaggggaggtaccgccatgttcatcgagaatttcggtgtttgctggtcaaaacaaattctgatggagctgggtgtcctaatcaaagatccattaccttcgagagctcgttattgtcgatctacgttggtggctgccacatcgggagtgactttgattgacaatgcgagtatttggaaaatttggctcaccacagactccatctatttggcgacgatactctcaatggtggtctgaatttctccttgtaacttctccataccctgtgtaaccttctgcacatctttacgaaggtcagagacctcagccccaactttttctttgataatctcgagcatagcatccttcttaggtcccatggaattaggggctttcataccaattgataggtcaactatatcgattcagatcaaaggagaaaacagattaaaagaaagaatgaagaaaaggaaattctgctgtattcaatccccaagaaattgagagcatagtctctccttacaagccttagctaagaaaaatactccttgctttcccactacaagactctattatttatatttaatacccatgtgactcccatgagccttagctacacccaaacaaaacctccaaacagaattacacagccacattattccctgtggcagacaccttgttagacttcctactcctttgaccttacacatacgtcacgggaggtctctcagatgcacaactagattcactggagcagtacaaggttttgctccaaatttttctaagtgttatacccaaaattcgg

SEQ ID NO: 242891 - DNA, 318 bp, Cannabis indica
gtgaaacaaagtactcaggtcttatgggacatgcaacaaaaggtatcgtatggaagatgaatgccttggtgaccttaggtcgtttctgatgggagacattagggagggtgtagcctcgccttacatgtctatgtgttcttccattgtatggacttggttatattctgtggaccaaagatatgagtttcctccttgtaggtgggtctagggctgagcataaaatataaaaaagcaaaaaaaccgttcaaaccgacctaccgaacaccgttagaaccgaaactgacagaatcgaaaatcaaaataaccgatagcggttaa

SEQ ID NO: 242892 - DNA, 4148 bp, Cannabis indica
agagagagagagagagagtatgaggacgacaatggcagttgtgtgagtcccaatagttgcggatcgtgcgtctgaaccggctataacctcaaccctcacctcacctacactacactacactctcccatctttttttatttttgacagaaaatgggatttttgtaatttattttttaatttgatatttatgaaaaaaaaaaagaaaaagaaaaaacaatgactacacaatcaataatgacaataatgccctttgcaatgtgggttggtggtaggtggtggagaagtaaaccctagaacattccccattagacttgttcaattttactctcttgactcacacagtttttttcataacccatctgcatcagaaccttactttcattctttttcttccttagggggtgttctgaggtgagcttcatctttctactgctggttgattttgtaaaaaaaaaaaattgggggtgtttttgatctgattacttagctaagatttctttttgttttgtttaaagtagtattattttcatgatctttttgttttgcttttgatctgattgattttgtaattattttttgtcttttgggtatttttgatctgattactcagctaagatttctttttgatttgtttaaagtagtattatctttgttttcgtatacagtctagtgatgaacccaaactcaaagattatatatttattttctttgagctgattttgaagataaataattattcgtagattgcatatctgttcttgcttatgctgggttaaaaattttgatggctgtaatttcatattttcttttctgggtttgattgtctatttgaatagtttgtagagcaacagttcaagaaaatattgagtataggaattcattttctgtatttttaaagatgtacactttagtgggtatttgagtgttttaaggtttggcttcatttactttgtttaattatgcttgtgaaagttcctaagatccattgctgtaagatcaaatggtattgtttgacactatccaaaaatatgaaattgacagtatttaaaaggaagaaaagaaaatggctggattgattttccattctgggtttttctaattggctattttgcttagatcacatagaaaaatggtgaagggagttgctgttcttaactctagcgagggtgtcaaaggaactatcctctttgtccaagaaggagatggtaactaactacaattgtttacttgatttgattatgttaaatgtctatagccaatgtagtatttagagtgatttcttatgcaattcttttacagggccaaccactgtgagcggaaatgtttcgggtcttaagcctggccttcatggtttccatgtccatgctcttggggataccacaaacggttgcatgtcaactggtacagtacagcttctgcaatctttgctcctttatagtagaaagaatttaactatgcttccatactttgtgtcttgtttatcgatcttaattttgagtttcttgtaggtccacacttcaatccagctggtaaagaacacggtgcccctgaagatgagcatcgccatgctggtgatcttggaaacatcattgttggtgatgatggtaagcaagcaagtatttagtgtttatatcatggttttgaactgcttgtgtacttcatagatagcatgtggcaatttggcattcgggtacattatatcttgtgggaaagttatgttcttagggcttgtttagtacatcgtgttgtattgtattgtattatttaatacaatattatgtttgatatcaatttgtataaataggttgtgtaaaattatactatctttatcataaactcgaccccaacccactctggcttcggttccgaggtttgggttcagggtccagggtcatggtctgagccttaacttcagactttttgtaaaatattataatacaaattaatacaaatcatttgctatgcactaaataatacgaaacacatcatattatggttgtaataactaatacaatacaatgttttatccaaatattgtattatttgttatttaatacaatacgatccttatacgacctactgatgaatgataatagctcattctcttattcttctttgtttcaggaactgctactttcacgatagttgacaagcaagtaagttttgtttgctgttccttttttctttcaagggtttaattctctaatgcttcatatcataaccataactttttctaaaagttcatattcatttctgttcatagattcctctttgtggttcaaactccatcattggccgtgctgtcgtcgttcacgctgatcccgatgacttgggaaagggtaataatcaccccccctattgcttcctctcaaatactcaaccctttttaattgtttaaaccttgataacaacttgtgatctaactcaatacaacataacattggtttgaatactcaggaggacatgagctaagcaagagcactggaaatgctggtggcagaattgcttgtggtaagttgatagtagtagtgtcaattgaattgtaatccaagtgttaattcttatgatcctttgtgtattcatattttcttttttgctattgtgtaggtattattggtcttcaaggatgaattgcctccttatgactatcttgaataagagggaaaatacatagcatattgataattgggttgggtgggatccattttatgcttttgtacaagtttgtacttttgtacttgtggagaccatgttctcattctggttgaatttgatatacatgtgtttttgtgttttggtgaccattaacttctctcactcaagacaccttaagcctattaataagtaatgagaatcaatggtaagatagtcattttcttatacatttgtttacttcttatacatttgtttactttaatttattaaaattagggaagagagaatttgttttaataaataataaaagaaaaggaatactttttcttttcttaagaaatgtcattaaatgggtgtttggaatgaggtgtttaaaaaatataattatagagaatattataatggaaaatataattgtggaataatgtgtaaatttatttggttgtgtaataagtaattataatcatgttaattgaattatataatattttgttttagtttatgaaaaaataaatgtaaaatttttataattaataataaattattaaaaatgacattaaaataatatgtttattgtaatataaaatttacattgatgtaagtttagattaatttttgctattcgatatacttttaacataccagagcaaatattttacaagaactttattttatttttagcaatagatcaccattaatttttgatgcataatgcatattttgattatgtatatcattactcataatgcatatctttatttaatattcaaaattacaccaaccaattcagttttttcttttatagaccaaacacattaggctgttaagctctttatgggttaatgatttttcatccctactctacttttatgggttttgaccttttttttctataaaaaaaaaataattttgatggtgtattatacacataattagagttgatgtttaggttttttaagtgataattatatatagaaaaaaaatgagttatccaatgtttaaaaaaaaaatattaaattaaatgcacgtgactcaattagcaaagttggtggagttgaaatggatataatataatacttgtgttaatatcactatagtcaatgtggattttgtataagaataatatagttttgcataacaaaacaaaacaaagttgaatagtaaaagaggattgcattgttttattgaattgtgatgttaaaggcgtgaattgtggatcctataaatatatattggattaataggattagaggagaatcttgagttgagaattgagtattaagatgacaaacaagacaagataagataagctctatcccaaaacaattttcaaatgggcttacaatggcttcaacaaagcccataacccaagctacccacatctttatgggggtaagttgaaaaataccccttttattaatcaattaatcaaatttacctttaattttatatttatttgaagtatacctctttttatatgtattgtacccaaa

SEQ ID NO: 242893 - DNA, 586 bp, Cannabis indica
actttgtcaagaggaagagttgcatcggttaaggcaaccggctgctcctgttgtgcagcaaccggctgctcctgttgtgcagcaaccggctgctcctgttgtgcagcaaccggctgctcctgttgtgcagcaaccggcatcggctgcccctattaagcaagtggtaccacctgcacctgtgtcaatggtgtgtaatcaggggttcatgttgctgcatagagattcgaagtttgagcagtttgtgaagctgaaacctccaacttttctaggaggtactgacataatcaaagttgagtagtggatgagtacaatcacccgtatccttgataatatacttgatggttgaatggtcggtgtagataatcaccttcgttcccacaagataagatcagaacttgtcgaaagcaaatattacagccaataactccttttcggtggttgaatagtgaatttgagggtcgacgacagtcatgcttgcatagtaaatagaatgaaaaatctttcctcttcgctacccaaaaatggcagctgatctcatgttgaagaaggtggttatacttggtaaaaattgttggaaattatttta

SEQ ID NO: 242894 - DNA, 1487 bp, Cannabis indica
cgataaccaatccaaccacaaaaatagtaccaaaatatccaacaacaataacctcaacaaagttaccattagcaacaataacaacaccaacaatcccaacaacaagaacaattggtgggcattgtttctgccaagggcagaccctaggcagtaacagagtcaaccactttccaccactcttctcagggttcctccctaacttttaattccctctaaagcccaaggaccctggtaggagcttttaaagcaactcaagtctgtagagagtctgctaagaaggcgccatgacaaagaaaggtccgtccttccaaaaagggctgaaaatctctcagtcgtgaagagagctgagattactgagggaattttcactgctactcccgtggattctatgattgacactaaggctttgagtaatcgactgatgcccaaagtagagagagaagttgttgtctttgctgccgagctattagaccaagcggctatcagtgcaagggagttgacttcagataagtgggcatcctacaacagtagtgacttattgcttttgcccatggaataaagcaacaagctataggggtaagtcctatatttttcccctctctctttctttttattccattacaattgtgtgctgcaggctcatgtttttgtgttgccaactgtctttgacagtcgagatgaccttgaaagaggttggagaaatggtcgttgagcttgacaaggcacatgctaagaatcagtctctacaatttgagaataaggcactacttgctgaagtcgcgcaaacaagtatcaaggtctcgacactataaacaaagtcaaggcagatgctaaaggttggattgagcaagctacaatcgagtggtaggtgaagattgatgctgcagacaaaaaggccagcaaaaaatactgggtgctatttgagaagtataaagccaagttagattagaagaataagtcagagctagaccaacttaagatccaagtgctctctagggtgatatccacacgactaacctggtaaaggacaagcttgaaatgtagcttgcagacaaaaatgctactcttctttcttcattagaccaggtgggccctttacaaaacaatgtccccaagaagggactagtgatcaagggcaagttgacgatttgcataaatatgtcaaacacgtgacaaatgaaaaggactcctggaaggttaaacatgagcaacaagttataatcacctaaggtgtttgtgccaccagtaatgctcccttgaacactattcaggagatgaagagtaaaatttcccactaactggccaatgggagtaaagcttttattgttttaagggccatgcaaagggctagagagactgctaaacaatgaatccgtgatgctatcaactcagtgactcatgataaaacaattcgtcttcgatctattaacttgtcttacgtattgctcctacatggcttgtgttgaccgagattttcggcaactatt

SEQ ID NO: 242895 - DNA, 721 bp, Cannabis indica
aaaagaaaaaccctaaatcctctaaagcttagaattccgtaattcggtcttgttgggtgttgaacgaagcgaagagaggaagaggaagaagcagagagcgtttcaagcttctgcgaaagagaaagcggtggaggtaggagaagacagtattaaaccctacatgcgcctaagtttttaggtacaccttaattaatgtggggaggcgaaacactgaatcttttttacacgtgtcggctttgtagttgtggataaatattctctgcggcttaggtggtaacggaaaaccaattgaaaaatgacacgtggtaaaaggcaaattatttgaacttggtgactgtgttttattatgctgaaattacgatggagtccctttgtaagctgacgtggaataattttattggctatattttttgtcagctgctacttgctagttgctacgcgcttgttatttttgtgttttatcttttttattaaaaaataataataataaataaattgtgtttatcttatatttaaatttttttttttctaaataaaaaaattatacgcggcttcgtccgtgtatgagtacctagaaaatttatggtatagtgtttttttggtatttaaagtttttttggtggagaaccaagaaaattaatagttcctaacattataataaattagagaaatgttaatatgcttgtaaagtgtaatatttattagtgtaatttaatattga

SEQ ID NO: 242896 - DNA, 655 bp, Cannabis indica
cttagggaggccaaggagacagtagaggacctgatcgctcggctgaagtctctggaggagctgcacaggctgacttgcagaccactgccaacctgaccctcgaggtgaaggagcttcgtgacttcaaggctcaggctgaaaaagaaagcaaaaagggatgagctcttggcccctgttgtcttccagcattgcaccaaacgctttgatgatggcgtctttatggcctcgcagactaacggccataaccataagcttgacttctatccaaagcttgaggaggttctcgtccgcttctgagagaagaagaagagacttgatgccttgctggaggagcgcagggggcctcgtcttccaccccgtattgattaagccagtcgttgatcacgattgttattattactatctctctcttttttatttcttttaaatatttagtccttcttcccctgtaagacaatttattatatattttcttaaggggagacacttaaggcccgtccccaggcctttatctcttttttttagagctttctgttgggttcgaacaatttacatttatgcttgaatacatattttgctttttaacttcgttaagcttttagcctatttcacatttgtcgacgcggtatgccttactactgttgggttttgtgcc

SEQ ID NO: 242897 - DNA, 2034 bp, Cannabis indica
tgctacaacagatatgatgaatcttatatgggtactactccaactggaaactctgtggatggaactaaaccaaatccaaataatgcagcatttgttgccacacctgagatgcttaaagatgagacatggtatgctgacagtggagccaacaatcacattacctctgacataaacaacatgaatcagaagagtaaatacagtggtaaggagaccttaattgttggtaatggcaacaaactctccattcatcatgttggttcaggttatatttttgcaaatgacattgatatgttgattttaaaagaaatgttgcatgttccagagattactaagaatctcatctttatatttaaattgacaaatgataataatgtgattgtgtaattctcatctggcaattgttctgtgaatgacaagctcacaaagaggaagttgctccaagagacacttaaagagggactctatcagtttgaaccaatctgtgtcaagtcagatcaacacaaatctcttctctgttcttctacaaagtccaagtctagttatttttccgctttatcttcaatttccaatcaaaatgtaactcagtctagaactgagaatgtgttaaattcagtgtcaatcaaggaatattggcataggagactggccatccatccaatcatgtattgaaccttgtgttaaatcaattaaatgttagaaattacaaaaatgaaaagtgtcacttttgtgaagcatgtcaatatggaaaatatcattcacttcccttcaaacataatactaataaggcaaaaggcaatcttttcactcgatctcatccatactgatatctggggtccaacctcaataatgtccaataccaatttcagatattacatctctttcattgatgatttcagcaaatatacttgaatgtatcctctgaaagtaaaatttgatgctctcactgcctttcttacgtttaaaaaattaattgaaaatcaatttgatagaaaaataaaaaggatgcaaactgattgggaaggtgaatactaggctttctcaaatcttgttatgaacatggcattaagttcacacattcatgtcctcatagcttaactcaaaatggcagagctgagagaaaacacatgcaagtggtggatatggggcttacccctcttgctcaggcaagcatacctttaaaattctggactgatgccttttagacatctttctacttaattaacatactgttaactcctgttataagcaatgtgtctcatgtcgaaacaattttttctagaagaccatattacaaattcttaaaaatgtttggagttgcttgttatccctgtcttagagcttaccaaactcataaatttagatatcactctaccaagtgtgctaatcttggctatagagaatacttcaaaggttataagtgcttgagcaacactggtcgaatttacatttcaataaatgtaatcttcaatgaaataaaatttcccctcaaaactggtttcctaaacattcaccaacttgagaaagatgtcaatgttcaagttcctttttggtttgccttttttaatgtccttcatactgtttcaacacctcaatctcagttcaaaattaatactcaaactgattgtggtcatatctcacctgttcatggagcaccaatacattctaatcctgtaacttggtcaacaggtcaaaacaccgatcaacatgtttttgaccaagaagatgccaatggtggcctaggggtgttcgtggagcaagtggtgcgggttgtgacctttttttgaaaccaaaccgcatatgtggtttttgtaatttctcaaaccgcaaccgtactacgagatcttaaaaaccgcaaaaatcacaccacaaaaatacggtgcggtgcggtacggtttacactatcaccattatcgaattataataaaaatttaaaaatcaatttataaagttctaacaatacaaaatttttttattaaaattttaacatcataacatatatactaatcattaagtcattatattgaattgtctcta

SEQ ID NO: 242898 - DNA, 529 bp, Cannabis indica
taccaaagtagttctgcagattttaaatgaaggggctgatgctactcctctcaatcataccattatcactctcatcccaaaggttaagaagcctcaacgcattacggattttcgaccaatcagtttgtgcaatgttatttcgaagttggtaaccaaggttattgtggctcgtttcaagcatgtactgcccgtggtaatctctgatacacaatcggcttttcttgccaatagacaaattcaagacaacatccttgttgcttttgaacttgtgcatgccatgaaacataaagataagggccgtcgtggtatcaccgctttaaaacttgacatgagcaaagcttttgaccgtgttgaatggggttttctcaaggctgtcatgactaagatggggtttgcatctgagtggatttctttaataatgtcttgtttatccactaattccttctcctttctcttgaatggccaagttacaggatcgatcttgcctacaaggggtctaaggcaaggctgcccactttctccctatctg

SEQ ID NO: 242899 - DNA, 1394 bp, Cannabis indica
tttttcaaaagtcaaatccgttttcaagtcaaatgagaaccaccttctcctacagatttacacattaaattaaggtatcgtttggtaccacttttgtttttaattttttaatcacaaaatgaaagtaaaattttgtttttaaaaattttatttttaaaaaaccaaaatacattctgtaaccatttttatttttcaattttaaaaacagaaaacaaaagtgtgttctgtaaaattcattttcatttttattttttgattttatttaagtcaggtctaggtctggggtcggattcgggttcaggtcagaagccgggttcagcgccagggctatggggagtggatttgggtctgagtctggtcggagtccaaaatattgattaagaaaaaaaattgtttaaaaaaaatattaaaagtgattttttttttgtttttaaaattttgatttctaattaaaaaattaaaaagtgaaaacaattttatagaacatgtttttgaaaaatatttttcttttttctaattttaaaaaacagaaaactgattaaaaattattaccaaacgccacctaaaaaaaaacactttaagtaaaaaataattttttaataaaaaattaaaattaatcatgtagcgattgtttatattaagtaacattttacataaaattgatcttaaaaattagaccacattacatatgtggctagactattctaataaacaacctccattagagatactgttatgggtcggttaggagagacaccacatcattaccaggcccggccctgggcatacgcggctaggcctgtgcctagggcccacctagcccaggggcccaatttttttttcctctttttcaaattatatattttttttattgattttcaaaaatactatatttttttaacataagggcccaatttttttttctgtgccccactttatttcaagcccggccctgatcattacttatcttcttttctacttcttcttccactctgttttttttttcccttaaacattattagtattatatttatatttatatacacataatttatgtatatttatatttttatacacttaatctatttatttttttatgttaagttctgattgtaaatttaaagtgtcctctaaagaatttttattaaatgccaagtaggactcttacatgaacagacgacatgttttcatttgtcaaaattattttaattatttaaatgttgtaaaaattatattaattcatttataaattttttaaaatattataaaaataaaaaataaaataaattcttctctttttttttcctttacttttctctttcttctttgacattatcattgaccttcggacctcccaatcctcatctccaggccaccaccttcctttcccccac

SEQ ID NO: 242900 - DNA, 798 bp, Cannabis indica
gggaaactgtggatcaacccagtattgggcaatgataatgcaatacactttgattttatttgattaattaagttcaattaggtcatctttattattttgccaagtataatcttataatatttggttttaatttcttccaagccactcaaatatcacgatagaatcatgttcgatttcgataaggtgcttaaattggatgaggaaaaggacatcctcaatatacaaaaggagagtgccttatgtggtagatgttaatgttcatgaatttcaaaaagtttaaaaggtaaatttcatattttgaagattgtggtttttattgattacaacatgaattttgttgaaattcactttgcaatcaaaatttaagaaaacgaaatctacagtgcaataataaatattgtagggtctcttccttcaatctcgttgaattattaaacttttagttgtcaaacttgtacacgcaataattatctgaacctaaatcaccaccgaatattgttaaaaataattggaagtcaaagtgggatgatatcatgttgcattgaaactgatcagagtaagttttcaagtaacattatttcagaagaaattctaaaatatatatacaaattatttcagaagaaattctaaaatatatatacaaataaatagtagtttatttctttttctattttttaatcaattaaaaggcaaatgttatgaacagctgatcaaatttgtcaagaataaactgacgatctgtcttgttgaattatgattgattcagaatttttctaaatttttcgattaatgtgtcag

SEQ ID NO: 242901 - DNA, 1351 bp, Cannabis indica
taaaaaataaaaaatattataagttttgaaataattttttataatttataaataataatattacatgtactaaaataccacgtgtacgagagtgtacaggtaactataaaaaatagagtacactttaaatttgctactccgtaggagttttatcactaaaatttaaagttgtaaaattaagtaagtgttcatgatagttgaaagaaatttggctgcaatttttttttaaatagtccaaaataaataacaaacatttaaacttcttaatttctatttagagagtaaaaaaaaatacacgcacacacaagtccattctattccataatgcggcatacattaaatattgattccataattttagctaatattttgtgtaatggagaataattttatttaacttcattacaattccctgttttaacgaccactccaacatttatttatttttaaataaaaaacaaaaaacgtacaaaaaaaaacaatataaaatagtgaattatttagttattataatgatttgaagtttgatcaacgtagtcttttactagcaaaaaaatagtctcatctgattggccgatttggattcactatcccaatagcctccttttcttctcttacttctctccgccactctccttttacccagcctctctttcgaagcgtgcacgccactctctacgcattcttcactgttaacactcccactgaaacctcactcgcgtttacagcgcgtatagatattctcagtgtccttcaccacttgcttggctttctctctagacttcgtcgaaggagccatcgccgagaaaaactagagagagaaaaaagaggtttgattggctttggaaaatctaatccatacaactaccaaggacgaacactctctattttgggacacgttaacgtcatacgcaccacagacgcatcgtgattcgttactttattatcagtcgtcgttttcttgccggaaaatggctgagttgactcaggccgaggtggtttacttgcccagaactgttcaagtctggagagctcttctcaactggttagggttcttctttcagatctttcttcggatccttagagctctcggtcacctccctcttatctcttcctcttctacctctgcttcttctccttctttcaaacccttaccggtaatcgaattaccggaccatgaccctcccgcctgactccactgttcaaatcgccacagtccacgattctaactccgactccgaccaccgtacccagaaactcacggtactccttttttgaatatgttatttgagcttgggaaactccgtgactcgtttcaattatggtgctgaatattgaatttttattcgtt

SEQ ID NO: 242902 - DNA, 742 bp, Cannabis indica
tgggtccatcgtgggaaaattttttcacctgaacaaggtttgagacaaggagacccgatctccccttccctcttcatacttgcagttgaaactttatcaagattgttgttctctaaagaaaaggctggtctcctgaaagggtttaaactatcgagaagaggttcgaccattactcatctcatgtttgcggatgacattattctattcgggcaagttaccatcaaagaagcaagatcattccttgattgcctaaacacatattgcaattggtcgggccaggcagtcaacgggcttaagtcttcaattttcttttcaaagggtgtaccccaagaaaagctcaagctatctctcagctgttgggaatgaaaagaatgaacaacaaagcaatgtatctcggtctgcccctatttcgatcgattaaaagaactgaggatacgaatcacttaggggagagagtactcaagcatgttcaaggctggaaggctaggctcctttctagcgccggcaagacatgcttaatcaaatcagtgggatcaacgctatcaaattatgtgacttcctcagatgttatcccggtgtcaacggcaaacaaaattgatagaatccttagggacttctggtggggagatacggatgataagcgaacacttcacactgtgtcttgggcgaaactgtgcacacccaaggtggctgggggtcttggatttcgatcaactctcgctactaataaggcgtttcttct

SEQ ID NO: 242903 - DNA, 3493 bp, Cannabis indica
  modified_base (177)..(177): a, c, t, g, unknown or other
atcttggataatctttgttggcgagcagcaatttagatttagagagcagttaaaggaaataatgaaagttgaagtctacatatttatttttaataaccattaaaagaaagctatggatggatgataccaatcggtgaggagaaaatagactggattgacacgtgatgtgtaaaattntaaaagataaaaatacattaaactttaaacctaactaaaattaatcaagttgtaaattaaaaattcaaatgaaatataaacatcacaccttataaaaaaaatagaagagtacaatccacctcagcattcttcattacttttataattatttttttttaatttttttgttagattttaaacttgtttgtatttacatttttaaataagtcaattaaataaaaactaaataatagatggaataattttaaattaaggttgtagttataatttcaaattataaggagctttacgtcaaatattaaaataatttaagtaaaaaaaaataattactaaaaaaactttatttaataacaaattacaaaaataattaataattataattaatttaatttaatttaaataaaatattatattgctattaagttacaagttattttgatataatttttaaactaataacaatatttatttaataatgatttaatgattaaaaataaatataattactatgattatatatatatatttgatatagttattgaaattttttatatattaattttatattaagggtaattgtaaattcatttttttacattcttaatattatttatagatagtttaaagtagaggccacataacttttcataatacatatctaacttatatgcgtcacaatatattttgatagatagaacaagtgaatagggacacgagatttaatgctgcttatttaatgttttactaagctgagataagtccactagctaaattctagtaagagtaggagagtcaaggtcatataaacccagtaaggcaaatgaaggaataaatgtttggatagaaagaaactccagctcaccatcatatcatatcaaataatggtaaatcatgggacagacaagaataaatagttgtattccttaaagggaaatagagtaataacaacagttactttttcaatattgctattggacactaatattattcacactttatgattagtaagtgaatttttttgaaatctattttcttaagttacatgacacccacatcgagaatgacactaataatacttttagcaattctcttacttttatcatcgtattggttcaataatattatattctaagtctataaagactacaaacaagtaagataaaattaataactcatcactaacacccaaaagggaccacaaacaaaaaaaggtttaagctcaatgacattattaactattgttgcgtaccttacatttgcatttttcatgcaaaagaagtactcaaaatttgacatgaaattgcatttaatattgcttttatgtgtttgaggcctgtcttgttagatgtcacatacatagaccaataaagggttcaatattaatcatttaatgaaagctatggaagaaactcctgtgttttcacaaagatgaaaggttgttttaaaccccctttggaaaaggactgaaatgaaagcaaaactgagtataaatgcagatacacataggtctgtgtttgtagcagaagataatctttcttctgcaaaagaccaaccttattaattgtgggctgtttagaattcttgccaatcatttcgtcattttttgctgtcatgcatttatacttataccctttagttggtttaaagattaaataggttcaaacccagtcatgagccagattaaataggttcaaacccagtcatgagccatactcttatgatgtttggaccatgtgctcttaatagccaaaacctccttttaacttgagaagaaaaaggaaaaagaaaaagaaagagagaacacctttcttgtgtgatttgtgaagtagtactctttcagaactaggggaaagcttattctcttataaatgcaaaccagccttaattttcttaatattgcctccacattcaatttttcccctcttccatgatgagtttcatgattatatgtgaaaattgtagaaatgggtgttccctgcagcccaaaacattgtcttgatgtttaaacaacacttgagccatttgttttggactgaagggagctcctaattcttttattttcccttctctagtttccaagcttcaatattggtccatggtcatctcattcgtagtgggtaagttctcttttactcaaatttgttactaaatttgaatgattaaacaacccattttctattattttttgcaaaaactattacaaacccattttatatacaactttttgattctaaatctatgtttgtgtgtgtatccttcttgcttgtggattggtcaaaatatttgatcatttaacagtgtgctatgtaatagtacactaggctccaattattagaagtgcaatatttaaatcgtgtaaaatctaaataaaccctttactgttatataaagcaaaggttcaaaaacatgttcctttctgaaaaatcaatgacatgtacaatttaatagtacctttaattcttttttccttattataaggtaagaatcatgagactccatttttttttaattttaattaagatccacctttaccgcaaaataataacaaataataaaaaaaacttttctaacacactgataaatagtacaacagctcactaatggattagataagcccacttgtatgtcgaaaatgaatattttttttaatctttttcttttaatctggcattgtattgaatcaaatgagttcttttgaattctatttatgttgacttttctttgttgtgtcttacatctgtgttaaaatatatgcgtccaccagtaattttgttcaactatgcattaatttagttttgtgatcgaatagaacattcccaagcttattttataatacgagttatgatttcattatatttttaaattaattttaatatacatattattttaacctattcacggttgttaaaaacataaaacaatttggtaaactggaaaagttccttctcctcatttctttttcaggaaaaaaaaaaaaatcgaagttcaattatgggatttttatgtttttagaatcatcaaaataaaccaacaattttgattacaatgaatcggatcaaatttgtaagtcttaagtactagaatagtagaaattcataatcttttagaatgtaattcattaacaaaattaaagaccgagaacaaaaaatgaaaacaaaaatagatatatccagtttacaaggagagctaatccagaaagattaacatgagaaactcaattggtacatccaaaaaaatgaaaagtgagataaaagctaaaacaatggcacaaacgaataatgttgttcaaaggattattttgactggttgttgttgt

SEQ ID NO: 242904 - DNA, 1030 bp, Cannabis indica
tgatgtttttcaaatattgaagtgtaatttgcatctatacattgtttctcaaagaaagcatccaagttagttgttagagtttttagattgaaattctggtttaacctattaattgaattttcacaagtggcagtggtaatttgattatttggaagctgggttatctgtttgtttctttgttggtttgttcttttttagtttttagtcttactcgagggcgagtaagcatctagtttaggggattttattaggctattttagccaaagtttcactatttagtgttattttttctctttgtttctacttttaagataattttctgcttgtttctctctgtttcaagttcccagggtgtttaaagagaaaatttattaatgttagaatggacaaagttaggaaaaatgaggaaaaattcaagcgaaattttgcaaagcttgctgcggcgagctatgagggagtcccaactaattaatctcgtcgcgacgagccatgtttacagttgcatcgagcaactttccagaaagggttatttttgagtttttaaaagtcgccgcgactagaccattcgtggtcgcggtgatgccttcagtgcaaattcgtgggcatttttcataatttcaagaatttaagttgtaaccttgttcttttacaagtcttacaaattttgtgtggcaacagagcaatttctccactaatttcttttttctctcttctagatttcttatgttgatttttgtattaattttgattttaaatttgaatatggagattatgaactaaacttcctatttagggatatgatgaatgttgattgaaattataccatgagtttatgttgattgttattccttctttcttgattgtgaatttattcatatttgtgcttaattacatgtttgagattgatcacttgaggcatgatttataatctcaatacaaaatctaaaaagtgagtactgagaatgctaaaattaataaatcttacttttgatgtgaaatgagagtatttacatagcctttgtgacattt

SEQ ID NO: 242905 - DNA, 570 bp, Cannabis indica
gtaataacaagatctgagcctggatctccttctctacttcgagtttggttaaccaccatctttcgcattatgattgagtactaaacttgctatgtgtgggcatgctactctatcactaaaggcttgaattggtgaagaacatcaagagggtttgaaatcactatagaaaggagcctctcatctactagttgtctgatagagttagaatactagatttaggttggttgagattggttggaagagaatcagagcatcatgttcccttaatagtatttcaactagggtttaggatttaattatatggattaaaaaataataatcggaaaaaatatactttagtggccggccacttaatgggcctcactagttataattttgccactttatttcaaccttatatcctttctttcaataataccatattttccaagttcaatccataaatgtcaaaactatttatttaatacttataataaattatcaaataaaattgtcatttattttatttattaattagacttaacaaagtctcttaattaacaaataaaccccgaaatctcttttcttcac

SEQ ID NO: 242906 - DNA, 640 bp, Cannabis indica
ttagatcaatatcaaagttgcaacaccaggtgttctaatcttcgttcatcacaagacataccttcgttgacatctaccgatgagccacgcactcattcctatcgacttcggctatctacagatgcagcccaagatgtgcgtgcaaataaaatgggctttggtatggttcttcaatcaaaccaaggagagactctactcactttggccacgccttggaccggactacaccagcccctacttatggaagcacatgcattgcattatgctctttcttggtgccatagtcattcccttgctccggatagcatagtttcagattgtaaagttttagttgattatatttgtaacaaaagcacacatcatattcatctcaacaaatttgtaattcctattttcagcttgctgtcatatttccctaatgccttcattagctacattccaagagaggcaaatgaaatggctcactctctagctaagaaggctctaggccttcaacaggaagctctgtggacaaactctacactaactttgtgattgtatcctgtttttgcttgttctcaatggatactgttattcaaaaaaaaaaaaatttattttttttttgaaaaggaaattttacttttctatcttaatgaaatta

SEQ ID NO: 242907 - DNA, 521 bp, Cannabis indica
attcgaaaaaagcaccacacgtagttttccttttaattttttttcttttctgttaggtatttggattatattaagagaaaaagcagaataagcgaaaatggataaaaaagagctggggatcaggagttgagttggagttgcttttctatgattaataagtgggaacccaccagtaacaaagggtgcgcgtgaaatcacacgcgattgagacttgaggtgcagtcaaatcggtggtgataacgtgggcccgtgtttgacgtgtttaccttatcttctacacataaacacgagtacgcgcgtgcctttagagaaagagaacgtgcgcgtgtggctgcctaattaaacaaaagatctatttgagaggataatcttggtatgactctgctggataaccaattttagtggtgaggtgttccctgtgaggtttttaggtgagcgcgtagtatttgtatttacgtaattgtatttttggtatctaaaatgattatggaaaattagtttatatattattttaatttttt

SEQ ID NO: 242908 - DNA, 878 bp, Cannabis indica
catataccaatttattttcttaataaatgtaattcaaatgtggctgtaacaacttgctctaacaaattgaaaacttgtactacagaacacatacttgctataacaaaacagaaacatgaataaattttgtaaaatttaaaacttgacacaagagaattatacatggtatccgtattcttccaaacactattagtccatggggccacacccagagaataaaatcaattaataaagtatcgaagattataaaaataattgagttaaacaactttagactccctctgatgatttgccacaatcctttgtaattcacttttgccaatctaatttttgaacaccagcaaacaacgaactcccttcgatttttgatgagtaagtgcttacttcctcccgaagtaagtcttggacaaatcttctcccttcgactatttttttagttgttttgtagtttatttatagttgtattatagttgtcatgaggttatttttctagttatttttggttattttatagtttgcgtatagttgatttatagttgtcgtgaggttgatttctcattgttttcttactttttcctgagcaaagtgtatttttatatttttaaaactttacaagtgtatttttgtaaataaaaattttagaccgtaaaactgtaaataaaagacattatcccaaattttgcatatctaacgtggcacctacacctggcttaatccagcaaacacttgacataacatgggacttttgagcacgagtgtgtcgggcaggtcccaataggctaatatccatgaattgtatactgcattctaggaagcatctagccaggctatcaatatgccggccagatgggagaagattagtgtaccgtccaagattt

SEQ ID NO: 242909 - DNA, 568 bp, Cannabis indica
cttgagcagtgtcgggtactcagagctcgagctatgggtagttggtgttgaccacctcgagactacgtgtgcccaagtttttttttactgggagcatgccgagacaaggttgggggtactactcttgagaccaccatgtgggggttggggtataccatcccaagaccaccccatggtggttgggggtatcaccccgaggctcaaaaaagtcctcctggagacccaagactatatacctcaggtggggtgttaccttgagatagggggtctcgagatacaccccgagctgcctttttttacacaccccgagattggggtttgggggtgtctcaccttgagactagcatgtggttgtcaggatgtcaccccgaagccaaaccacaatcgttagcccccttcaagcttaattttttttttccaagatggatgtgggggggagggtgcaccacccccgagaccaccatgtggaggtcgagattcaccaacctaagaccaccacatggaggtcaggcttttagtacctcgaggtgactgagatgtagtcgcagaactacatatgtttatggag

SEQ ID NO: 242910 - DNA, 701 bp, Cannabis indica
attgatggagcttgtagtgtgttctagcttctaatgtggtggattagtgtggtggcttgtagtgtggaaggttgtagcttctagtgataagtgaagaaaagaaaaaaaaaattggtggttgtggaagataggctttcgggtggggaattctcatgtgaaattgatgagaaaaaggattggagtgggtagatgtaattggggagggtattatggggaaaacacaaaaagtgtcatatataattaattatgttaagtataagtttagggaaaattttttggggtaatataagtatgttaattcaaatttccctacttgaattccacatttttttaagaaattaacattacactctttagaatactacactaaacttattatggggtttaaaaaattataaccctcatagcaaatagaataatctttaatattaattaccattttcttccaaatattaacccattccaaatggtctttaactaaatttatagtcaattatatattatctaggtaatattttttatatttattaattaatatttataattgatgaaagaatttatataataaatattggcatattatttgaagagataatttcataaatacacaaaataacaaaatattataaaaatatggacctgtaattttttttaatatcttcttttccaaaaaaatacaagtaagaaacttgtaaaaaaaa

SEQ ID NO: 242911 - DNA, 3520 bp, Cannabis indica
tcatgggttcaaattccataacaaggcctcaaaatttaattcgtgtgttggactcatatattttcagcatattacatatcagtttttcttgcatgcaaaagaacttttgtggcatgtgtctgatgaactagcaaaatcgataattcagttcaagtaattatgagatcagaccatatcaatgtaacgtagttggtatatacgtacggtacggacgtattttatataatcttacaaggatgcatacatccaccaatactaattaatagcagctaaatattacataattccatgagctgaaacagaaaagaaaaggagactaatacatatattttgtattacacttacacatacgtaccatgaaaagttacgtcgtagtaatttatatatatatataaaagttatatatatgatctactacatattgttgattgatccacatttctttcttatttccccatatggtgcagtaagtatcccaacagtactgagcttgatcattgaagcagcaaaatcattagagaagagatatgggtcgttgctgtaggaattaacaagtgctgcggcaataggatcatccaataaagcttggtcagattgaagaagtcccctcttgttgaccacattgacatagtaggaattatcaaacctaaaggtactagaataatcaagtggggccaggttggagtttgaagtgtctttgtttggacacatgttttgtaaatttgatagcattaaagaatccatggatgggtcagagctgcctgagtctttgaagtcaaacagtctcttcttgaatgtggagcactgcgcaaatcctatggtgtgtgcgcctaaatatgacacactttatttaaatctcaatatatatataatatgattgattgtattatgattaattatgataaatttaaatacgtggcatattgtctcaaagattactttctctgtttgtgattggaggcttgtataaagcttgtaatttattgttttggtattgtcttgatgagttggaaatatgttttgtgattaatacaaaagctacttgacttaccaaaaacaaaaaagataaatgtgtataatattgatagagaagagagaatatataactaaatatatatatatttatacctgagaggactactacatcctttaagtcaagaccctttacagtgaatttagcagtcatttctttaaatgactcagtaggagctggtatttgctcattagctgccttctgacttgctgtagtcgaatctcgtcgtcctaatacgacaggccaaaaaggtcctccagcctaaacagcatatatatatatatatatattaattattaaatatgtttatacatatatagcattataattatttattaaattttacaaatttataatcaattaataaatgtgattatatatataccgattgaacagcttctctaacaactagagtaagaagatcagcgcatgaaacagtggatggacaaaacctttcaacatcagccttgatattatcgatcacatcataacctctaagcgattttcggtttggaaatgaattcttttctccctcgaaatcttcagtgtcgtcaagaagcactgatgcatcacatccctacatataaatatatatatttatatatatattaatttactataagttagacaaaatgcttaattataaccaaaacattaataagagattatgctggtagcattatctaattttctattttttatataatattaattaaagtgataattttacatagcaataattaatgtaatagaatatatatatatatatatgtaaatttaaagcctaatttaggtccaactttccgatttccattgtcatcgaaaccctaatcatgtacatgtatagcataaaatgtcacatacattaaaatggttattaactattataccactaatgactatagtatttattcgactaataatattcctctaataatattatgtccttttttttactaaatatccaataaaagagcaaaattatatcccaattatcttttctattgaagtgctggtgattgtagtcaatgtttaatccaaaaatagtaatagtagcaagatatgtggtcctatattttgacgtggaaaagaatatgaaaatttggacaatatactaatatgaaaagaaggaaaaaagaaaaagtagaatatatatacatatatatatacatatagatattaacttacatccacaatgcaatcgtggaagtacaaccgaagtagggatgcagccatcctggtgtcatttctgatagcttgccaaacattaaacctaacaatcattggcaaccttggacacgattgatcatagaatcgataatctagctgcccttcaccaaaagagaacattagaacaaagagcaagaaaaaatacaaaggaatgaaggtgaagttacaatggactttgtgataagtagtagtcatcttttttttttttaattaatatttgtaattctcttgattgatgcaagagtgtttatgttgcattctgatgattttcaactagagtctttgatgtcaatttatacatataggaaaaaacagtggagaaaaatgaaagtgatgaatccattggttaatatgcccacagtggccatgtcattatggcggccaactatagaactaaactatttatttaagtcaaagtgatgatggtcacaggatgcattatctcttttggactatatacagtgattgcatgatgaagtgcttccattataatctgactacaaattaatatataatatgtataattttaaataattgacattatcacaataatacaggagtagagtacttttattattattttgtttagaacatctttaatgggcataacatgatcaatttcaaggacatgcatcctctgtatgatagcttatcgttggggacaacctctgatgtcgtacctgatcactaggtttgtagtctaacacgtgtaggcagagccttcacgggctaggagtgtagcttagtttatatatcgtatctcaaaatgccttgaccctttagggaaaacccatattctttgcgggagctgatggctttggttcttggaacggagggagactttggctcacggacactcttcgtgttgctagcagacagggaactccctatcacggagactcttcccacaaagttagcgcctttatcttcccagagcatcaattaaggaagtttttcagctattaacttcttagccttgcttgatcaaagtacatgtgtcatgattatgaaaacacgaataacaataatgtactgataaccaataaagaattcattattattgttattgaattttgagataagctcctgtgtttttattcattatctggtttaaaattttaattctaatttcaagtttgatttgtgattcttatgagttgttattaatcataacaattagcttggtgtccaaattttgtaactttataaatatgtgttttctgtgtgagataggtaagtgtgtgagaagtagagtga

SEQ ID NO: 242912 - DNA, 534 bp, Cannabis indica
tgatagggtggcctgtgccacttttcaatttcaagaagacgctctggtctagtgggacagggtgtccatgattcatgatgtgacaactatgacctgggaaaatttccaagaactattcaatgctaggtattataatgtagcagtcagaagtgctataagaaaagaattcccccaactgactcagaaagaaaatatgagtgttactgagtacacaacgccatttgaccgtttggcaaggttggcctcgggaattgggccaactgacttctataagaaagagaaatacctggatgggttaaatgcgaagatcagacacgacttgatgatcactactgacgacagtaccacctattttgaaatggtggataaggcactgcgaggtgagggcgcagtgagatgcataattgagtctcgtgggactccgattgttggcggggctccctacccctcttgcatcatgtttcagtaggggaagtagtggctcgaccacaaatcaaaaaagaaagggcatctactgcaaccagtggctcgggt

SEQ ID NO: 242913 - DNA, 604 bp, Cannabis indica
gcaaagaaggctggaatgaattgggccgcatctgaagttgggcttggggctggtgaatctgctgctgaggccataggaatggctgagaacaccatcatcatcacaaccatcaaaaataccattgttgactttgactccattttctctcttgataaagaaaaaactctaaagagaaaatgtgtgaattgagagagaaaaaaatttggtagttgtgtttgtgatgatgttttgagaatgggattgtgtggttctatttataagcattttggaaaatttgaaaggaatataaaaatgagagagaaagagagtttcaagggacagccttgccctaaaggattggttggcatagaatatggggcctaacttagttaattattttaggtgttttttaatcactattctcaaatataataaatgatatattattatttattaggattgagaaatattaatttggtttgtttttgtcctaataagttattggtttctgtgtttcaaaatgtaataatatgtgcacatagacaaatcacacgcaaatttgacattacgtacctcgaagtttaacatgtactaaatcatgttctctgaactttcattcatgtta

SEQ ID NO: 242914 - DNA, 535 bp, Cannabis indica
gttgtggctttgactctaatgttattttgttatgttttaggccttgatgaacctaagcttagcacatgagggctcccagggatccttaaattcccttagggagtaggtgaagaccttggaggattcccttgtagtgaaagacaaagccatatctgagctggtggctctcctggcaaagagatagagaatggtatctggtttagaggctatgcttggcgctagaaacacaaagaacatcgcaaaagctaccttcatctctgagttgcagtctgaccttgatgagcacaaaaagaaactaagggaggctcttgatggccagcatgccataagggaggagtatgctgacttgtcctccaaacacacttacgagttgaagttgcggaacccccgagctactctgtcatacatgggtagtgaggcttttgtggagagaacatggacctatgaaaaggcacttttcgagagcaagttggaggcagaccaagtcactacctatccagaggggtcatcatcagagactcatgatgaggggatg

SEQ ID NO: 242915 - DNA, 698 bp, Cannabis indica
tacaatctccaaaggaagaagccaagtcgatgcttcaccaataagagagcgcaaaaaatagtctttttgttgtctcccagaagattgttccttgatggtcacacgccaaagtcatagcacacatcacttccccccacccttcacatcacaattaatctttacctagtctaaggaaggaggacttagaatccacaacaataataacaggattaaagagaaggattataatttacgtaacaataagtgatagaatcaatatagtgtttgatgttacgtattattattatgtaccttatcaatatgagctatccaaacagtatcaacaacaaccgacacataaagaaagatctcattgacattggctcctttcttgtcaaggcctcacaagaacttcaccaagtcccatgtactgagacttgtataattaattggtataagatcctatggtgaagaaaaccaaaaatggtaagcaaggttacagtgcaaaaaaaaaggtgttccgtgaattctttaaaaccaccagatatgggaaagtaggggtgggcatcatctaatctaatctaattgaaccgaaccgattcaatctaatctaattgcaaaaagttagatatccaattataattggattgaattggatgttaaaagttagattataactggagtggatcggttatcgaatgtcaatctcaaaatctaat

SEQ ID NO: 242916 - DNA, 1307 bp, Cannabis indica
gctcctttcttccagcgcacgcaccaccatttaagcatcggagaatatggcgatagaagagttaccaacctccttccccatctgcagcgcccaaaaaattgcgaacaactcaacttccactgccaaattggccctctagcttctcacaaaccaggaccagcaatccaaattgcgatcaaacaatccacctgcaccaccatccttccacgatgcattagtaaagaagactacgttagaatttgagataagatgaatgaggttccatctcaaaaccaattggcactgggaggagtagcctattcatcttatatatggtaatttatttccacacattagcaatgcgtgactaactataatacaccctcctcacgtttgggcctggaaaatgtgggtataacgaacgacctttaagagaccacaggaccgaacgtgacatttgaaagaatcccacaaggccaaatatgggaaaatttgtgggtgtgcacatcgggaaatttttggattttgaaaccagtcaaagactcaacactggaaattggcacactttggccgaaaggtcccaaatagaggttaaaggggagataacggaagtatcttttggaccggcaacactttggctcacaacggatcacaaatggctttttggaccggtagcactttaggctcacaatggatcacaagtggctttgataccggtggcactttgggctcacaacggatcacaagtggctctaataccggtggcactttgggctcacaacggatcacaagtgactctgataccatgttaaaatttaggataagatgaatgatgttccatctcaaaaccaattggcaatgggaggaatagcccatttatcttatatatggtaatttatttccacacattagcaatgtgaaactaactctaatagactaacctcgtggacctaggaatcttccttctctacaaacaatcatgccttctaaaccctaaattctcaatatcttcgccttgaaaaagcctcgattcttctagcctcaccagcaaggctttcctaatagcagaaatatcaacttttcgacctctaaaaataagatcattccttgctttccaaactccttctaataaacttcccataaatgacaaaaattgccaaataaaatctcctgaaacttttgaaaccatatcaactatcctgtgcaatattgttttccttgtccactcaacctgcaccagaggaaaggggccactgaaccataaagctctcacgaaagggcacttccaaaaaatatgcataggttgaccaagtcacaaaataggtagg

SEQ ID NO: 242917 - DNA, 827 bp, Cannabis indica
gttgatctgaatcttcaagtcccaaattcttgaatactccatatcttgttctctgtaacgttctcttcagcaagtacttcaaaacattcagttttctctttaccgacatccaattcatagtcgtgaatcatattaacatcgtctaggtagttaataatttttgatgagttatcggcatcatcttcaagatctgcgtcggaaaattttccctcttcccactccatatcagtaatttcagaggcattttcacttgaatagatttcttcagtttcttcatgttccgacatggaagagtaatccctgtcttcataataattgcctccttcagaaaagatttctgccattcccagagattcatccgtgtcaatctcagactgtggtgatccgtcagacaagatctcaacaacttgctcttcaaaataaccatctcttgcttcaacttctcctttcgctgcttcttcagttccaccttttgaacaagctaatacaaaatcattcttttccacatcatcttccttagtcataggatagatttctataaagaaatcaatccctacattctctgcagcctctttattctcaatactcacttcctcctcagatggtaactttctctcctttcttgggctcaaaacttgaattttcatgttcttctgtgtcttcaaggaacgtcttctagctgacaagaaacacttcaatggaggcaaaggagtatgaagatgtccatttagtgagcaatacgtatatgggcaaaccttcatgatagaggttccatcagactcagttcctccaggagcaagagtcagatgagtaggaaacttggagtc

SEQ ID NO: 242918 - DNA, 1322 bp, Cannabis indica
atgaaaaaaagcccaaaaaaaaattataaaaataatttaattacaacttacttttaattaaacaagcaactattaacgatttaattatgatatttaagttatttctatattaatgataatatttattttatcctaacaatctgtttaaaaaaattcatataaaaaatactaaataaccaatgaaaaaatatgtaatgctcctgcatgttttttgtttgctgcactgcacttgttttattttttttgtttcccaagctgtagttagtcttcttttcttcaaccttccaaatttgattctttctgtgggagacaacactatgatgtcttgaaaaaattctagtaactaaatcccattctcgtaggttttcgactgggtatactgtttcttaatatgttcgcatccatgcttttgatgtgtagtaatgtgcacaatagttgtacgtgtctatattcaagtctttcatcactgcaactgcatggccacattacatttcatctttttgaaatttattgcatgtgcatgttttgtcctttaagtttataatttgtgttacatcttcatctattacctcaaataggttttcatttgctagtttcacatgcatttatttcaatttgtacagtatatatagacacatcattgtttgtaaagaatatattcaaagcaactttagttcaactaaaaaaactctataaaaataactttttcattatagataatgctacatatagtttcaacttacaatcgcaatgagtatacatagtttcctatgtagtttttttttttgttttttttttttttttgatgatggtgtcaaccttgttgtgcattttgtgcttcttttctgttattgtatgtccattcttgcatttgtaatcgcaaacactccaaaaatgttgtgactggtgtttccttgtctgttacattttttgagttaagtgcttcaactatattaagagtcatagttgagtacatgttgtttaaacaattttttatcagcaacaataatttatacaactgatatgcaacttgatagtaacacaaaaacaatttttttaatagtatttattttattatatttttttattattaaattttattattttacctattattttttgagtgatatcttgactatttcttgtggctatttttttttctatatatggtcttaagcgcttttccaagttgtttggctccctcatatgaaatttgaactctatttcagtgtaagcttttgttgctgcaaagaatggacctctaaaatgctttgcattttttttaattttgtttttaggtttgagaagaggtggaagatgca

SEQ ID NO: 242919 - DNA, 1951 bp, Cannabis indica
tatttattaaatatataattaaaccatcatttaactaaccaactaaattttgaaaacttagggtacgttgttgaactttaaatcttgtttttagaaatatcaaatttaaactaattttaaactatgtaggtttattataattagttttataaaattaaattaaatttctaataagataaatgatttgagaatgaccaatgagatatttttaatatcattttctaatgttataatttaataaattaaaataaagataaattaactaattttaaaatagatatgtttagccaattattattttaagaataaaataattaaaaaataataattttctaaattatatgtaaaaaaaatctcaaattaagccttttttaaattttgacaaaaatatctaagttatttgaatatttgtaatattatttataaatttctaataagtaaactgatataaaatataatttttctaattatagtttataaagcataaaatattttacaaaataaaaaatttatgaatttaaaaatgttatggttaggatatctataaaaacatgtaggccagttttaaatttataattatataatttgtcatagataattttaatataatatttcaaattaaaaggataatgctatcttttaatttaaaatatacctaatattaaaatatctaaacttataattaaataattagtaaattttaacaaactaacaaatttttaaaatctgaccataatttaaataataaaataatcaatttttaaatttaaacattaaactatcaaaattaataataatctattaaatattaaatattattaatttgaaaaatttgatatttaagtttaaatatctaaaacataatattttattaagatatttagggttttgaaattgaaaattttcaaattggcctgaaaaatcacccaaaaattggatttttaatgactgcccacgagataggctgctggcaaccttgggcgcacgccagagagctttgcagggtccctacccgagatatctgggcatttgcagcatctccctcactagatgcagggtcaggtgtgtgctgggtcgtgtccgaagtggagctgaccgtgtcttcacacacgaattgtcctaatcgacacgcgcatccctccttgtcgagggcctggctcgcatggtgctcaagttctcaacactcaatgcaccaaaatccaaaaaagcacaactttctcaatttttatcaaaatcgagttccgtaaaaataaaagttccttaatttttcacaaggaatccaaataaattcttttcaaaacaaaaataaaattattttcaagaaaaaatttcgtaattcacattcaatcatcaaatcacacataaaccaacatgaacatatccaaatcaacaaattcatcggtttaaatccatatttcataaaagtaaatcattaccatggctctaataccagttgttgggattattttaccaagatctagatttactaacaagtatctttcatcaacaccctaaatataaatatctctaaaataatgaaattaaacttataagagtttaggaaaacccttgttcttctgtctattatcaagatctaaacttggatctctttctctccttcgaatttggttacaaccatattctgctcaatgattgagtacttgacttgttatgtgtgggcatagcactctatgacaatgggtcgattatgaagaacaataaaggaggctcgaaattactatagaaggtttctctcatctactagttgtttgaatgagttagaaaactagatttggttggttgaagaattggatgagaatgagagcatcatattcgttttatagtatttcaactaataaaataatgggcaaaaattacacatagtggccgaccactaaaaggccttttactagttacaattttgtcactttatttcaaccacttattcttc

SEQ ID NO: 242920 - DNA, 1207 bp, Cannabis indica
ataacataaggtacttggttacctcttgttgtaactggttactcatctatttaccataagggtccctagttacccttatctgattttcctattatttttttttttaaaaaaaaaatcaattttctcataaaataattttttgtaaaaaaaaataccatatttttataccaaaagtataaaagtacataaaatttgtaactttctcttttttggggaattttgtacctcgtaaaacgctctcgtaaatgatgaaatagataaaagtatactaaaacactgggtgtataatagatttttcttaaattattcacacttgatattaaagaatttatttattaggtagatattttgtaataaattatttaattcttaggaaaaaaaaaaattggatctctatgcattagtcaaataagttaaagagatacaattaaaaatattgaataaagtaaacatatattacttatcatgttgatcaagaatcaagtaaataataaagctctgacaaattaggttagagttagaatttttttaatgcaaaatataaaaggttgaccaactaggtacgctaaaggtataatgcttaatattaaattatactaataatgagatttgaaacacctttttgtgtttattgaaagtgattttgagacggcaagacgcctaaggaaatttattccagttgaggtattagtaattatgtgattcaatgtaaacatatctataattttctgttaaatcgtaatttttcgtttatttcaagatattgtaattttgcggtctgtaatgtggctaagtgagctttttccaaaaatgtcactgatatggttgaactttcttctataccagacaacatcatatgtaatgaccgtgaagtttaattctatttaattttaatctataaatgtacttttattaaaaaaaaaaattatactaataatagtataataattatatgtcacaagtggtgtttacctaatggacaccttatcataccacataagccataacaatggtatagaaatatacttattaaatatgtaaaaatttcccaaattaataaagatgattaatcaattgatgaacacataaatcccaggggtaagttgaaaaataccacttttattaatcaattaatcaaatttacctctactttcatatttatttgaaatcatacctctttttatgtgtattgtacctaaaataccct

SEQ ID NO: 242921 - DNA, 562 bp, Cannabis indica
gtatatttctgtatccacacaaatggatatgattacttaatttaggtttcagatctttagatatttacgtctgcattgtatgctttatatatttacttattgtccgaggaaaaactaaaaagttgcatgttttgtattacatcaaattgcattgcatttcagtctttccaagtttgatttcattgtccaatcacagtagtttcgtgatctgcctacttttccagctttattaattaattttatcacacattgcctattaattaatgggcacacttttttttcgttgaaaattattagacatgatttctgataattaagaagataccattgtaaatttttatttcttgtttaacaattaaatgctcattttcatttttgtataattattccgctatataggattatatttgtctaaccttcctggttatttttaaacttgctgtcttcccacataattcacttgatactttattgtttacgcaataaatgtagatttggccagtttagttttcgcatatatgtggcacactgaacatatcaagatacatttcgatagccaaaa

SEQ ID NO: 242922 - DNA, 2975 bp, Cannabis indica
ataaaaatcaattattttgaagaggcgcctcacttgtaatagtacatattagtagtgttcaaaattatataagacataatatttaaatgtacgtaatataacaaccactaagtgttagagaacactaataccttttagcattaccaagaaaaaatagagtgtttggctacaaattaaaaattattgtttaagacagcattaccaagaaaagaaatcttacatttaaagaaatatcaaacaatcaattaaagtaatgttatatagatgcgtttgtgtgctgtctctctttgccaaacatctgaacgatagtttgatttcactataaaattgggttttgtttttcaacattttttattggggcttgtattaattttattatttaagtgataacatttctaagatctaaatctttccttattattttctgcagacattttctagaaaggttgattttacgaatattcaattgcacaagaaatctctacattttacgtcattttatattttactaatattagacaatattattctaaaaaaaatccaagataatatagatttttttttttctattttatcaagtatgaaagcagctagctgtaaatttggagtgcataagatttcctaaagttgcttgatcaccattcagaacttctaaaaaaaacacatctaaataatgttgattcacctttccgcattgacaaatactatattcaacatactaataattaaatgattccatacctattttataaataatattgtactacttatttctttttcttttgtgttgttatggatttattctactcagcctttttcagatctgaattaagaaaatgattatggtaaacataatttaaaatattgattgaaaaatatttaaatattaaaacttcaaagctcttcattctttcattctttttgtttttctcttaaacaaattactcttgtctaaataagattccaaagcaaagatacgcaacatagtgtgaaaacaaaaatgagccacacaattgcattttctaaaaatccaattgacctcccaaaggttaagatttccaactgataaatggaacttgttcactaagtcctagatgttgtgatgcaaggtttgaacctcatggcgtttcctttgcaccgcaaacactgcattggttgagtcacattggaaaatcacgttcttgaagctttgcttaaatgcttcctctacacccgagcaaagagcaactacttcacctgccaagaggattaaaatgacaaattcaagaagtaaaaatttttgtgacaactctatcctcactgctaaacacagccgcccctgtcgactgagcctccccaattgctacatcagtgttgcacatcatccagtgtgcaggaggcaggagccacctagacaatgtagcagcagctggtaattgaacctcggcaagctcaataagccttccactgatgtgattcaaaataacggtcagaggaattgattttccatcatagatagcataatttctctcttttcaaatgctttcaaagacaatggcagccctgccaggtctatactccttcatgaaccaattcagccaattatttcaattggagatattagcatcactagttctgataaaattttgatccaaaattaatagtatttttattgatttatgcaaatgattttttaagacaatcttttagtatgattcgattttgttcatcattgtatagagtcttgttatatatttttatttttaatatgttttgctctctctaaatacatttgttctcttgcattttttgcattttttgtatatggtgcaaaaagtttatgtaccaaagcttttacttgatatggatgatcattttgttggctatataacctaagtgcatctctaacagaaattgatgatttattgttaaagcatatcttgtaaaaaaaattcttgaatggtgtgctaaaaattgatttaaatttgttacataacaaaaattaatcaaaatttaaattataatatgacatgatgtaaaatttacattataaatgaactgattttatatgctacttttaaaattttcataaacctcttacatttgattttttatttttattaatatagatttttgttaatgcaagtatattgtgtattgcaatatagcttttacttttaagggatgtccaacctacaaagattaaataattaactttattaagaactacactttaagtctaccaattctaattaaactcaattggatatgaattataaaaagaaataaacataaataagatttaatataaagaacaagatttcagattgttaactttcaagataaagaacatactagagcattaactttacaattttaaatcatgaactacaatttcccaatcgttcaaaccaattcctggccttgattgtaatttcaagaacccaaaaatattgcatgtatcaatcatgcatataagcaatcaaactcaatcaataaatatgatatttttattcgcaattaatcaatcaataattcattaagcactttgattcctttaaatgaatttcataaaatttataaaatctctcagtctcacaatcatcctatgtcataatcctaagtccaacctaaagtaatctttctcacgcataaaccttagatttcaattcacatcaatagtgatcaagcatcaatataataaatattaaaaaaaagaatatatatatatatatgaacaaaaagaacataggaataattgaagaaattctaatgatgaagttcataatttcaaactaaagataaaagagaaaaggaataagaactaggttgataatggtttaagcttgatcttttatcttccattctccttctattagatcattatctttatatcaaggttctgttgtaaagttattaggattcaattagttgttaggcctattccttccttcgtcgactttactctgttgtttatatataccttggctcttgta

SEQ ID NO: 242923 - DNA, 510 bp, Cannabis indica
ataatattggagtcaaatatatacatataaataatttgtatccactcataatgcatgcatgcaggttgtacgtagatggaactcccatcagagagttcaaaaacaaggagtccattggggttccttacccgaaaaaccaaccaatgaagatctactcgagcctatggaacgcggaggagtgggccacgagaggtggtctggtcaagaccgattggacccaagctcctttcacggcttcctacaaaaagttcaacgatgatcaagcttgcgcttggtcgtcttcttcctcattatcgtcaccgtcttcttgctccaacactactaattctgtcttggtttcacaagaattggacacaacaagccaggagagactcaaatgggttcagaagaattacatgatttataattattgtactgatactaagagattcccacaaggcctccctaaagaatgtattgcagccaataaaccctaggctttgaacttattataattaaaaattcacatat

SEQ ID NO: 242924 - DNA, 994 bp, Cannabis indica
ctgaccatgaaatatgagataaacattaatgaaaaattagacatgggaatcagctgaatacctcaaagcaagaaagcactacatagcaagtggatttcagtaggacatgatggaaactagttaccataaagaccaggtattaaaggcttcgagcaaaaggaagaaataatatttctatctaatattgacactaactacaatcaaactggtactgatataattttaggtatagaagaattacagcccggctagatataaagataaactttctttatggtgatttggggatttatacaaaacaatgattcataaaagaaagcaaaaatgacttggcttttctatggcttcgcaatgctcataggaaatggtactttactaacttcatgggtaaacaatgatctcaaaagatgtcaagcagatcaacgtttttctatcaataattttaacaagtagtttccttattttgttattgtatgtagatgaaaagcttgttgtcaattccaacatgcaagagattattaatttgaagcagtttgtaacaaaatttgggtgttgcaaaaccaattcttggaatgaggatcaagagatctatgaagtctaaactttgatgttgacacattttgagtacatcagtgaagtactctacaagctcaatatgcagaatcctaagcgattgagtacactgttagatgttcatttcagactatccaaggacaaactatcgaagacagatagtgcatacattgttaaggttccatatgccaacgccattagaagtgtaatgtatgctattattatttgtaccaaaccaaacattgctcgagcaatagattgctcctctctccacacagtggtagatatgctgtcatcactgaagttagtaaggatatgatttagcttttaaggtgtcttggaataactcgtatattattaacactttgtcgaactttctctcttacgttaaagatctctaagcagcttcgtagatgtagcc

SEQ ID NO: 242925 - DNA, 704 bp, Cannabis indica
gaagaattcattgagtgtgacatattcatgatagtcttctagtttcatggctcttatcctccatgttcgagaagatcctcgctcgaatggttggttgtaacatagctgctgagatctagtccaaccttgaagaatactgctcttctcaaaaacgtgccaagatcagtcaatttcatacacaactttgcaaaatcaagctcacttattctctgaatgattatctactcaagattaagcagctcatagactctcttggtttgatcggccatgttctccccactcaagatcagatcgaagcaatcttcaatggattacctcgagaatactttttattcatcacttccttatcaactcaaaaagatgcttattttgttgctgaagttgaatctctactgatggcacaagaagtacaaaataaaattgctgattctaagcttgacatagccaaaccagaagttaatcttgcagcttagtcaaagaattcgtcacctcaacctagatttccctctcatcctccaccagccactcctcaatcgaatgttagtagaggtatgtcctttttaccaagagttggtcatcctatgtttggatcttatcctactcctttgtacaacagctatggcttgctttctcttccatcatatccatccttatctcaaccatttcaacctccttgaggtagtttttatggtgctaatacaact

SEQ ID NO: 242926 - DNA, 586 bp, Cannabis indica
tgaaactcattttgtaatggtctacaaggtaaaaactcatcctgacagctcaattgaaagatacaaggcttagttagtataatatgaacaatatagttcaaagtgatgcatactaactataaattaatattcttcaaagttgggttagaatgaactgaaatcacttgaagtgtaagtgagcaatataaaaattattaatatatgcttatttggttcatcctgaagatgttaagtctagaggtactcatggagataccttaatgttataaagtattgataattttaaaatgataaccatgatggaaacggtactctagaagagactcccaagagaagttagacataacacatttgatcataattgaatccctgaagtgattctatataggtacctataaatgataaacatatttgaaaaatatgtaatttaaagagatctctataagttatgtcaatatgggaggaaattatcatataatgaaatttttgtcgacaatagatgttgaatgtttgcatatgcaataaactaacatgagatagcaaggatcatggtattagatttgtcgagaattatcgacatacattt

SEQ ID NO: 242927 - DNA, 975 bp, Cannabis indica
aaaaactagatgtggcaaacaatcactagaaacacaaacatagattaaatttggggaaaacaaatgtctagtcagaaaattctcaaaccacaggtgtgtcatttagtttacttatttaatactaattgatttatcatgttaggactataaattttgaagagaaaacaatagataggattgtgaactggtaagaacaaggatcatacaaattgaaattataataaattatttcaagaactatactaaatttttttcaatcaaaaaaagaactataatcacttctgatatggcggccttctcaatcccttgataagacatttcaagaaatataaaacaggcacgtgcaataaagtagttcaaatcaccacaaagaataaagcttctacttcagaaaacccatgtgaagcatcttagacctagccacaagattacacaccactaccactaccctgagattaccctcctttaatttccataaaatttggtaattgttgcatattatagtatatcacagccacaagagggagacctattctatttaggttaaaacattgaaagaaagcaataacttacataattaataaatagatactggactcttatatcccatacatcaataattactcagattgaaaaatccatctatgatacatttctgaacattcaaaactaactaaaacataaaacactaactttccaatcattacaaaaatcgggaatgctgaaaaatttacaatttagtcatacatgattctataacaaaagtttaaccctcacaatacgaattacggttcaacattttttttaaaaggctaacattttgctctgcaatattttgaaaatttcatgaatcagatggaatattttgttctttcaaaatgtttttacatatacaatgcggatagggataggtttcgcattaccatatacgaatttgtatgtatctctatcgtgtctgtatatatatatatatat

SEQ ID NO: 242928 - DNA, 626 bp, Cannabis indica
aaaagtaaaaaataccgcctgacaatacttttgtaaagaaatagcaaaagttagtataccatgtaaatttctcttttttgaatatcaatttcaaaaatagcgtgaccaattcaatttataattaataccgtttatttttaacattgattttaaaattaatggaaattttacttacaccccaaaaatttctaaaaacacttcattctaataatttttattttatataaaatttatatctttaattatactaagttttatttaacttttttcttccaattcatatgcttaaaaaatatacctattgaacaaaaataaattatattttaaatattatgacagaaaaattaaaataaaaaattatatgaaattttctcagaaaaatataaaatatatatatatatatatacatgaagttaaaaaaaattataaaaatgaaaccaaaataagtattgaaattaatataaattaatttgaagaaaaaaaaattaaaaatgagtgattttcaaaaattatttaagtttatattttttgtaataatgaggtatatttatcattttatgggaagcaaatgaaactggttgttacagttatttttgtaatcattcgtaacatatattggatgccct

SEQ ID NO: 242929 - DNA, 997 bp, Cannabis indica
ttttttatgtattaaataatacaatgttttatccaaacataatgttacttgttatttaatataatacaatatttatacggtctaccaaattaattctaaatttgttaaatattcaaataagaaagcctcttaaataaattaatatataatattaagatgactcattttgattttgattttgaagtactcaagttcttaagtaatcacaacaacagagactataattctccgttctgtatgcatgagcttaataatattaatatattttatgtgtgcttattgttttagtcttatcctaaaatttacttacaaagccaatctctcatattatatttatatgaatgtttttttattctaaataaatttaattagatacataaattcatttatttgaatttaatgagagactagtaccatttaaaacaatttgaataaatatacacatgcacaatatatatatgtataattttatgaaagaacaccgtattgtattatattgaattgtcttttatgcaatatttttatgtaaaactatatatggtattaacttttatggacacctaaatatataatattttagtgtaaattaaagtttaatatagtattatataaaaatataatatataatctaattcaatataatacaatacaatacaatacaacttaatacggcgttccaaacgtgtccgaaatttattatataacaaatatcaaagttttgattcaaattaatatacaatacaatatacgaccgatcggtccagaaaactgcatatattatatagggatagttttaaaaaaattacaaaactacattgtataatattttaaatatttttatattttttaagactttgtttacaaaaaatatattttttgatgtatttttaccttatactactcttgttattttattgttaagtttttattatttatatattattttatatgttattttaatattgtttcattgttgtttttgtgttactttcacata

SEQ ID NO: 242930 - DNA, 1088 bp, Cannabis indica
gtttttatattttcttatatacaactgacatttgcaaaaacacggtttttcagcagtccctaatggattcatacaggacaataaacaatcctatcgctcaacaagctcctaatgttgaagagattttttgatgaagtggaaataaattaagaagctaaattgacaagtatggaagagatggaggagatgtgccaacagttttttgatttcatgataatggaactagaggtagactttgaattgaatgtaggtcttgataggaaaggtgtgttggtaaagacattccggcagagaagcttgccaagaggaagggtgaaggagatcctctcaaaaatctggcaattaaaagataaatggtgaatgaagacaatgctatcaagattatgggggatcttctttgatgaggaggaagataaaaagctcatcctaaaaaattgtctttcaataatcaaaggtgttctgttgaatattagggattggcttgaagatggttattggcaaagtgttaatatggcaaaagctagatattgggatgaggcttatggccttctgactccatacctaacatgggcaaacattgatttcatagacaaaaaaataaaaaaaattaatgggtgagtatattgattttgatagtttgttatcgagagtgacaactactaaaagaggatactcgaagtttcaggtgtacttactcattaatcatcggattgtggttggtttctaccttaataaccttaggaaggaatggattcaattcaaatatcataagctccatccattgtgtttcaactgtgtgtacattgctcatacttattctaaatgtgatagaccaatgtagtttgcatatccaccaattggcaaggatgttcccctgtatgggtcatggatcaaagtaggtattcctatccccaattgttttgatctgaggctccctctgcttaggaatgtagtgtcaaagtatcattacagtagggttgctctggcaaatagtacagacaggggcaagaaggtaactttagaaggggacaatgactttccaaggagacgtactcaggggacaactagaaaaagagttattggtgtag

SEQ ID NO: 242931 - DNA, 816 bp, Cannabis indica
ttggtgttatgtatcattgaatgagaattcaatattgtttatgtataatatatatacatacatgagttaattcgtttcagtatgattattatttttttttcttgcgttaagcttcagtcagtgcctactgttttggctgtacttttgtttgtcaatttattaaagttttatgcatattatatatatttgatcacatcgatatatgtcttcagtattgaattgtatgattatggcttgatgttaatggatttcatgtatatatacaattttttttattgatgaattaatgcttcagtacatcgatatgtcgatatgtcccataaagtttggtttcccttgtttttttcgcactgtgcttatgggcggctgtatatatattatctttagaattgtaatggattaaaaaaaaatgatgtttaatacatatatttagtgtatggttttagtgatatatatttggaacaatttaattcaaattttggtgttggtttatgactaatattttgagtaaattaattgaaacaatatgtcgccaaagtgacctcttttgtgtagattaatttatttaaatattaggatggttgtgtgtttgtaattgatgcttatattgactagcccaaaggtaagtgaatattttgctagatttcaaacatacctgtggcgataaatgtgtgacaattataaggtattttgtgtgagcaatacgttagtccaaagattgacctattgtttgacacagttttattgtcaatatttgattgctacaccaagagtaccgcttacagttaatattactgtccaaagacttgatattaa

SEQ ID NO: 242932 - DNA, 2960 bp, Cannabis indica
gtactcaatcatagtgagtaagacggtggtaaccaaacccgaaggagagaaagagatccaagttcagatcttgataatgctctgctacataaaggaatcaagggctagagatcttgagcagaaagagtcatattattccgctgtaaccaatgtaaggttttcttaaacccttatgtgtttatttcattgttttagagaattcatatttaggatgttaatgaaacatacttgttattaaatctagatcttggtaaaatattcccaacaatttcatcatctgctcattgtcctatttttttaaagcctgaaccaaaccagagttttccttataatcctaaatttaagttttaaaatgcttggctcaaggagccaatgtgttttgagattgtaagggactgttatgagaatgggaatgatgaaaatttgtttagtaaattcgctcggtgtgcgaataagttgagtgtttgggggaacaaggtgactggaaacttcaaggtgcatattagccgttgtaagaaggagctccaaaggctggccaacagaagagatacagcttctattcaaagacataaagaagtaaatgaggagttgtttcatgttcttgaccaaagagaagctttttggaagcagcgatctaaacagctttggttaaaacaaggagatcacaatagcagttattttcataaggctgccacaactaggaaaagacacaacaaaattgtaagtttgaagaatgaaaaatggagttcgggttggttgggataatggactttctcaagtgatgattgattatttcacaacattattccaagcttcaaatttgtcttgtcccgaagtgattaattgtgtaaatagctcagtccttagttttcttcatgacgagttgcgaatggctatctctgaagaagaggttaaaagggcgatctttcaaatgcatccagataaaagtcttggatcggatggaatgacacctggtttttaccagaaatgttggagcattgttggtcgtgatgtagtagctgctgtccagagtttctttctgacagggaagttcgaactgggttgtagcaaagcaaatatagttttggtagaagaaacatccagaggatatgacttagcttaggccaatcgtgttgtgtaatgttgtctataaaacaatcacgaaggtaacggtgaatcgtatgaagccgtatatgaatgccattgttggtgatactcaaagtgctttcattctgggacgtcttatttcggacaacatcctgatttcttttgaggtgcttcattatttgaagagaaaaaggaaaggtaaagatggctttatggctctaaagttagacatgagcaaagcctatgataggattaaatggccttttttggaaattatgttaaggaagttaagctttgaccaatggtggatttttttgttgatgaagtgtgtaacctcggctcaatatatggtggttcatgagaataaggagatggggccaattatcccttcccggggtattagacaaagggatccactatcctcgtacctgtttatcctatgtgctgagggcctctcggctttgttgtacaagtatgaaagagctggtcttattcatgggtgcaaggtggctaatggagcaccttgtatttctcacatgctctttgcagaccatagctatctgtactgcaaagctaccattttagaagctaccaggataaaagatatccttctaaagtttgaagcggcttctagccaaaagttgaatgtttcaaagtcttctattttctgtagcaccaatactacccagcaacttgtgatactattaatagtatgttaggcatgtctattgcgagtgaaggtagtttgtatcttggcttaccaagtatcttaagcaggaataaatttgcggtgctgggatatctcaaggaaagggttcggaaaaggattgaaggttgggagacaaagttcttgtcacgggctggcaaagaagttctgatcaaaacggttgctcaatcacttccaagctatgtaatgagcatttccctgttgcctttggacattacgcgtgatatgcatgaacaaattctggtggcaaggtgtgaataatgcttaaaatggtatacattggttctcttgggataggctttgcttacataaatctaagggtgttatcggatttcatcatctgtgggatttcaacttatctatgcttgcaaaacaagggtggaggctgctatctcgtccaaatttgcttgtagctaaaattttcaaagctaggtactattcaaatggctcctttctcacgccacagctggggtctaatccgagttatgtgtggtggagtgtattggaagctcaggacctagttaggaaaggtacttgttggtgtgttgttgatggtgaagacattaatgttctccaagaaccttggctgtcaagtgatgaagatccatttgtcaactcaaactatccttgttagtttgaatccaaagtttgtaatctaatgtctatagaaggtgggagttgagatattgagatcttgaatgacttgtttaatgagagggataagaagcttattttggatatccccttgtatgttggccacggtagtggtaagctaacttggatctacgaaacgtcaggcctttattctgtcaaaagtgcatacaatttactccaaaagctatatggcaggtggaactctagtgaagatgatcacaccaagttttggactaaatcctggaagctgaaaaatccccccaaaagtgaagaacttggtctagcatgtggtagggaatgtctgcctactttgcagcagctgaaagtaaaacgagtggatgtacaaacaatctgtccaatctgccatggtgaagatgaatccattgttcatgctctcatgacttgtacaatggcgaagcaagtgtgggatcgtgttggcattggaactcattttgtagcagctgaaccaata

SEQ ID NO: 242933 - DNA, 616 bp, Cannabis indica
gatacagagacgtttcaagggtgcactataaaggcatccgcagcctatttgattaattaattatgttatttgtgttacaagattaaatatatccttaaattatattctatataggcttcatttggtaatatgtgttatttagaatatattggagtgagagagaggcgatagatatctcctcttaatttcccttcgtataattatatttgaatagaatagggaaaacaaaggcttatatagtaggcgagagtaagagaaaaatttaattaattttgctttcgcattgtatttgtgcaaacaaattaccacaaaaagaaaaaaaaaaataaaggtagagatgaaacatgtttgtacaattttggttgggttttgtttaagggacatgttgtgggtgtgggtgtgaatctgatatctgatgttgttttgggccagcgtggttatagctgcgtgtccctgccgcctcatctcggccccttaacatgtcgtacaccactaccgcactacctacatcatcaaccaaaatactttaatattattaaaatgtatatatatacacttcagcaataaatgccatattagggtattagagatgaaacctctcacttactctcacggc

SEQ ID NO: 242934 - DNA, 1767 bp, Cannabis indica
agagaatatctcaacaactttgaaatatctataaccacttttaaaattcaaatattaatctaattgaattaattcaataattacttaacaagacaaacctgcatagggcataggcgcgtacccttgtctgtttaggacaaggatgatgtcttttgtcgtgataacttttgtctcaacaaatataatcttgacaaattttgtcttaataatttttgtcttttcattatttaattaatttgaaaaattatttaattatcacaaaaataaataattactattttttaatccaaaatagatttttttagaacgatactatactactcctccatttcctgacagtgtttcaaggtggcatggacctataattctaagctacaataagctattatttattgagtctcatcaaccaaataatttttgtttattaattctatgattcctccactaaaagtatggaattgaactcttagtaattatagaattatattactaaaaatataaaattaaactcttagtaattatagatttatatttactgagttatactgcagtttccgttaatatatcaatttcagtaattagccctccatgtgttcgtaattagttttgattaaattaccattttattcttctaattacttctttactctttagtaccattaattcactagtggaagtataatttagatcccttttaaatttgtgcacaatattccagttctagaattaacacttaggtggtgtttggttggagggaataaaatagaatggaaaagaaagaaaataacttttattctattcatttgtctggttttattttgaagtattagaatgtcattcttattttagctatattttcattccttctaaccaaacgctacctaatgcgatctttgttatgtgagtttgagttcgaaagagtagagttggagggagtagacatggagagaatatgaaacccatgcatttgaggggattaacattaccactattttaattaaaaaaagtgagacctacttagaaacacaaaccccttgtcatttaaatttaatttaaattttacattcccatcctcatcaagtttaaacctcataccaaacgccccattaatgggaaccaaaattcaatctgttatgaaattcaatattccataattataaatcatgttcttctcacccacccacattatcagcttcccaaaacagaagttgtaagaatcatcttctttgagaaatttaagagtgaatcaaagaaactaataatatgaacaagagttcatgattactcaagatttagaccgacccactattgatcattgttataatatgaattagatctttatagtaaacgacatgttagataaagacaacttcattcatatcggtccttgtcatatataatttctattatatacaacaccttcactttgatgtcatactacattcgtaatccgaattgagattacttgcaccgaagaatgggcatcagtgaactgtactagcaaccattgattaaaaatctataactttagtatgttgctgattgttttattcttagctaagtgttcttagttttctgtacaactataagccataactttatatatgaataagaatttttctgatatttatatataaattattcaatattaaatattaataatttaatacttaaacatatatcaaaatgttgaactcgttattaataatcagaaaaaattttataagcttttcaaggcataaaccctaatcaggcaagctcagccta

SEQ ID NO: 242935 - DNA, 622 bp, Cannabis indica
taagcgtttgaatatctctgaagagagatagagaatgttcatgttcctgtcaggagcagaggctgagcagcttctcatccttttgaggctgatgtattgctccaagcaacatctctctcagcgtgcttaatccgttctatttaatttatatttatatttatatatatatatatatatcattacaatgaagtcatttgattctcatctcaacatagctagatgaagctaaagagaggtgcatcatcagtgtttgccagccgggtagcaacttgttagcagctggatattgcctgtattcaagctcagttgttttcactctttctatagggaaaggagtatttgcattcaccttggatcctacttatggtgaatttgttttgacacatgaaaatattcagattcccaaaactgggaaaacttattcattcaatgaaggaaattatgacctttgggatgaaaagctaaagaactatcttgaccaccttaggcagcctggccccagtggcaagtcctattctggccgttatataggttgcctggttggtgaaattcatagaatgttgcttcgtggtggaatctatgggaaccccgataacaagtacagcaaaaatgggaacttacg

SEQ ID NO: 242936 - DNA, 1656 bp, Cannabis indica
aatctgccagttatcaagtatttcagcatgaaaagaataataaatgtttacagcaagagaatttagggataaaaggaatgaaaactgacccttgcagtggattcaggtgggggtgtaccgagcaaatcggtcatgagatccaattggtgtaccacatttttcccaggaaacagtggcctccctgtaagcatttcggcaaatatgcatcctatgctccaaatatcaattgcaggtgtgtactgaacacaaaaagtagaggtcttagtctaagaaacaaagtaataaggcaaccgaacacttgatatgatcttcgagtacaaaattccataaaaacatggtcaatttaacatataagaaagagcaacagatcaatggtgcttagagaaatgaatattggtgattcaacctgtcctaagcaaaggaacaatacttgaagaaacaacccgaaaaaacttcaaaaagcatcagaagattgttaataaaatcacaatatagagatgatatcacaaagatcaattccagcttacttttgagaaaaatgaaccgcagagctcaggagcacgataccatcgagtggcaacataatccttcataacaaaaagttcaataagtaatacagtttaacagattgttgtaaccatcattaaacaatagcttaaagttaacttacagtccaaaagatagcagatggggcatcattgaaagaaactcgagcaagcccgaaatcacatatcttaagtttgcaatcagcattagcaaggatgttcttaggcttcaaatcgcgatgaaatacatttgctgtaagaaatatgatgaaatcaatcaaacaaattttataaaaactgtgtatatatcagtaaaaacatactaaacaacaacaccaacaacctgtatgaatgtatttaagaccccgaagaagctggtataaaaagaactgataatgctcaggagtaagatcatcattcgccttgattacttggtgaagatcagattccatcaactcaaaaacaacatagatatctttaaattcccgtcgtgaaggaggcaacataatgtgttttatttcaactatatctggatggcgaagcaatctcaacagcttaatttctctcagaattcgagtagcatcagaaacatgttcaaaaacatcattaatcttcttaattgcaactctttctccagtatgagtgtcgattgcagaaccaacaacaccataacttcctttcccaataacttcctgaatctcatattggcttccttctccatattcagtgaagaaatctgcctctgctccctatacaagtaagctataatgtgtcattattaacaagtatatggaaagatggagacctcaaacttttaaatctttgtagttttcttagtatttatgatgatattttgatcattggaaacaatgtcaagacatagctgagatctcaaatccatctaaaggataaaagaacaaaatcttgactcaatctcaaacattgatgaaatgataataataataattctaatgacaattcaataagaacatacaatttggctaaactcctaagatcacatttcaaacacaaaactgttctataatttttcatccaatctgaaagagactttattttcttaataagaaatcagttctgtttgacttagatt

SEQ ID NO: 242937 - DNA, 548 bp, Cannabis indica
tgacaataaaatattctgcttcactaataataataagtatcattgttaattatttaaatataacagtcttaaaaaaaataaacaaaaaacccttgcttcctcatgataaaaatttgcttcagaatatttgttcatagaatagtataaagtcagatgaagtataaatcaacatgaaattttataagattatcgtttaagtacaaattaaactcattttagacttttcaagtcgcaaataaaattcatttgaggttgcaaagtaattaatagattcattatcatgcttcttctcttttcgagtagctatcttgagataaactataaatgaaattaatcaattgaaaacatattaaatttaaaattaagagtttggctttagtttggttgcatactagagttgtctatatgttggcacaatcataaaatatgagtgatttttctcgaatgatataacacaaaagcataataactacattgcaacttgggttaaatggtagtagttagtctcatcctcttcccataaaaactttaatttcaatcatgaattc

SEQ ID NO: 242938 - DNA, 1522 bp, Cannabis indica
aaaaaaattatctatgtcttaacactcacaaaaagaaaattgtgttttgatttctcagtgtcaatttaaagacttagtctggttgttttgcattattttttcccccttgtttatgatctagtttccttttacttatattataatgcactgttttttggtgtttggttgtcaattctgcagtacagggaataatttgtttggattggctcatttgctgtaaactacttttgtctgtcttaagttaacagcagcatcacatgtggtaaacgagttaatttctgatctggaaagttaaatatcatcattaagcacatacactctcttttttctctatcacacattatcaaaaaaagtgttttgattgcaagaagataccttaggatattttcctagccaactaggttctgctggttctaaaatggtaaactcgaatcttgaaaacaatgtatggggcaatagcaggacagctttgtccacttaccataaacaatctccaatagcagtgaaaaaggtggcattaagggacttgcaaaatgataacagaaggttcatatcttatggtccggagagttcatgtataacaggaggaacagtgatggacagtaatagtatcaaggtttttggaactaagatactcacctccgaatgcccttgtagccctcctccgcgcaagcagtccttggagggcaatggtttaaatgaactcgaagcggatgctggaataagccttgatttggaactaggtaaacgaagaaatcagaacattccagaagataatgctgtttctgttaatttgaaacggtatttacaaaagcaaccaaacctacctgagcagccgaacaagaaaccggatcatggggcatcatatccacctgcatttgcaccaccttctgctgcttctgtaattgcttcacctggtaagcctcttatacttacactatgttgctatctctgatgataaattctctgccttgcctgccttcactgacttctgatacagcaaactctgaaggaaaagtgatcaggagaaggatggaacgattcattcatctgcagaaagttctgaagcagtgtgatgaatctgatcagagggactacattcaaagtaagtcgcgatgttccgtagattgtatctaaagggtttttcttttctccttttttttcctcataatcattgccagtgctgaaaatgctctttttggttactctgttagtgctctttcgtttatctccgcttgaacttagcagacatgccgttgagctggagaaaaggtcaatgcaactatcagttgaggaaggtacttattatgtttatcaaagtaagaaatttttaggaagtaatgttgttatttctagggaactatacttagcatcgagtctgaattgtttcttctttttcaaatataatatgggttatgactttaaatgttaaaggaagaataatgataatagagataagtattcacaatttcttctatgctagttgcctttgtgtttgtccaaccacccaagcatgattttt

SEQ ID NO: 242939 - DNA, 1076 bp, Cannabis indica
ctactcttttcttccatattttttctttgtattgcaattcaactattgggtcccgtgtattgtttatatatatatatattgaatagaagattgttttggtgtgcttttgataagtaaataataattttgtagctatagaactttcttttaagctaggtgtgctacctacttggccatcaaatcttttaataggaactatatatatttatatatataaatgtaggatgtagaaatagaaattttcaggtaatagttgatttgtttgtgtgagtatgccattgtttttcatggcacaagaattttttattttttattttatttttcgatgccatttgttattcttaataattcagataaataccttcattactaaacttgatgtcttattaatccaaaattatatctgtacgtctgacaaagtaaactcatgttgttttcatatatctagaagaatgtctttacattattttttatttaagttatactacctgaagagctgaggattgttttgctttgtgttgtcgcttagcttcgtagttactgttgttgggtggctactaacccttttgttgcagttggttgtttgttttgtgacatcatgaacttatatatatgtatttagcaaatttattgtgaatattatcataatgaaatatatttgagtgtagattattgagtgagtactggatgtcgtatcactaacttctggtttcttaaagctattattcagagtacttgtcatcacttcttattttacctcccttagtaccggtggtgatcagttcattaaaggtatttttatttttactgatttatctttccaattgtgaaaaatatattgttttgtatgaaaactgagattgaaattgaaattcattaaatgtatttttatttttactgatttttctttccaattgtgaataatatattgttttgtatagaaaaacgagagtgaagttgaaatttatatgaaagactaaaaagttagaaaaaaaaacgcaatatatttttaattttgatgatagtgtgttagtgttagccacttgtattattatagtccatatgtgatgatagtc

SEQ ID NO: 242940 - DNA, 880 bp, Cannabis indica
acgataatctactctcactcatattgatcatcattgaagtgtaacctaccctaccttatgtggttctcacactaggtatccaacagggcaatcctttatcaaaagttgtactcacccatgataagataacctacaagtaaactcatacaagcagcacaaaaaaaaaaacatattctgcaagtgttatgctcacacaagcagcaaaaattcaaacacaaatcacatgctaataagaggctattttaagccatcaatccataatacatagttaagaacataactaacaaacccataacaaaattgtatgtttcaacatacaccctattcataaatgtccactcttcttacctcgattgctaagaacaacatttgcactacttcaagctccttaatgtagttccttgttgagaacaatatcctcaaaattagggtcactagagtgcccgtcggttctggcaccgaagagatgtaaaaactttctcttctctcttttgacacgtaattttgattggtaaagttttacagggatccaaaacctcattatgatccaaaacatcccaataacttggctcaaagacaatgtcttctttactgccggtgtaccatctttaatgtagtcaaaattgtattatctcattactgaccatttttctccatttcttcacatccaaatcactcctaaagctcccttaagcttttaactcaaaaaccttccacacacgtttacatttgaaactctccaagaacacctttcttcaacaagaagatggtgactttcgatataggtgtcattggaccatctattgacatcacaaccaatccttaaggccctttgagctcaaataaaacctcatttaatctaggaaacaactcaaacaca

SEQ ID NO: 242941 - DNA, 871 bp, Cannabis indica
gattgttaacggtattgttgtctgttcatttcgagaatcagctcttttacatggtttactagaaggtgacaataatattcatctatgcttagaagaagcagctacatatcgaatgtcctatcaattgcgtcaactatttgctactattttgatattttgtgttcctaacaatcctttacttctttgggaaaagtataaagaatccatgtgtgaagattatattgctaaaaaagtgccattaattactgacgaatcgaaagcactacaagaaattcattttttgctagagggagctggaaaatgtttgtacgattacggttttgttcactctcttgcaaaattaagacaacaagagcaaattacaaaaatgatcaatgaagaaaaacatatatcagtctctaatgatgatctactattagttgaaacattgaataaagaacaaaaaattgcatttgatttaatttttgaaaaagtattaaaacaggaaagtggaatattctttattgatggccccggaggtacaggtaaaacatatttatatagagctttgcttgctactgtaaggtctaaaaattttgttgctcttgcaacagtatcatctggggttgcagctggtatattaccaggtggccgaacagcacattctagatttaagatcccgcttgtatttgatgaaggtacaacttgtaatgtaagtaagcaatctgctctatctttgcttttacaattaacaaagttaataatatgggatgaagctcatatggtgcaccgacatgcaattgaatctttagataaaatgttacaaaggcaagtctcgaaatctgatgtggtgtagtctaagagttttaaacacacccttattgactaacat

SEQ ID NO: 242942 - DNA, 1127 bp, Cannabis indica
gttagaacaaacaccactagcaaatctttgtttcaattgtggcactctcatcttggacaccctactgtcaagacattcccaaatgtaacgaacaaatgtaatattttgaacaataataaaaatgcatcaaatttttgttcctcttgctgccttggtaaaattcacaaatctctttttcttagatctaacattgaatacacacaatctctacagcttattcactcagatctatggggtccttctccaatggtctcttctaatggatataactaatatggtcatttcacatatgcatactctaggtttacctgggttatccccttaaaaataggttttatgttgttcaaatattcattaactttataaatcttgctgagaaagagctgaatcttcccataaaatagttgcaatataattgggggttaattttagaccttcactcatatcttttttataatggtgttcctcataaactctcttgtcccaccactcatgaaaagaattgtgtagcagagagaaaacataggcatttcattaaaattgcattgatacttgctgctcatgctactctttccgtaaaattttgggatgaggtagttcgtgcctctgtctttctcattaacaaacttccatcttcagtactcaaagaggatacccaccttaacaaactctttcacatgtgcagcttgattactctcaattcagggtttttgagtgctcctactatcataatacttgaccctcaaatagacacaaacttgccattatatctgaagagtgcacttttcatggttatagtctaaaacacgaagtttataagtgtgtgtgtgtgtgcctctggcagattctttatctctttttatgttatctccaatgagtaccattttgtctatgctaaaaataaacagtctaaacctactcaaactggtacagctgaagatccaaatcctactattcctattccaaatgcccatctatttttcaccccacttctcccctactcttgactcaccatcaaagtctacacctgagcctacactaccatttattgagattttatgccctaaataaaatctatttcaatttattcttatttactaattgataaaaatcagaaatcattttat

SEQ ID NO: 242943 - DNA, 2131 bp, Cannabis indica
taacaacatattctatgaaaaaacaaacaatgtaacagtacaaaaaagataaattaaattgttaaaactatgtaaaaaaaattgtaatacaaaaatatattgatgagttgacattattttatttattgtaattaagtcaatattttattatttttcaagttaacttagtagttatatttttattattttatagttatttgtatgttgtttgctaaattattctaaggttgtttttgaaattttttttttattttattttattgaaatacaatatttttataattttaaaactttaaacacattatttttataaaattaatataataaaaatgtataaaattctatatcactatattatacagtatttttttcttcattttacagtatttttgaaagaaactctatggtcaacttagcagctcgtattacatcacattggaatgatcatgagcctttgtgtgtaagccagattgtatctctctctaataaagcccatccatgacccatttcttcaccaaacgggtctctataccttaaatcaaagcaggcctaagtccaaacctcaacagaagcttatatcaaatttttaaaacagtcctaagttcgaagttccgggtcctggtccagagtcggaatcaaaattcagagtatggcaagaggagaaggaagaaaaagagaaggagaagataatgagagggatattttaagtaaaaaagaaaataaatatataatatgtattatgagaaggattgtacgttttcataggagttggtgattttagcatggtaaagtgaaattttccatgtaaaattttatttggtgagttccactcatattgataagattgaatttgggaaaaaacactaaactttgagtaaaactaattatctcaaatgttaagaagttgtaattagtactcttggttgtagtgataatattactaaagtttcttacacttaaaacccggtcttctatttgccatctcaaaagatgtgtggtttgagtctccgtcggtttgaagacatgaacaaaactcttcttaacaaaatcttctaagttcgaatgcactaagcatgaagttcgttggattagaaatgtttttgattttatcaaatttttgtatgttaagagaacttgtaacctcttctttgttttcatactttgttatgttgtcatgaatgaaattttcattgcatcttgtaagtgtagagccattatactaatttagaaaaataatcaattttactaattttttatgtaatgagcttttagtttttagtttttttttaaaaaaatcaaagtaattttaatttttagttttatactctttgataataacaaagagtatttcaattttcaacactaccactgtaggaatggaggctacgagaacacttcttcgactatccttgtttgccccctctttgaggaattcatgggcgaggaggtcgggcaaggcagaatggtattcctcagtacatcctacaattgggacgtgagtattaaaaaagaaaagttccacattgtttaaaaataacatattttactttattctcatctataaattcattagtcacttataatttcctcacaaagaaaaaattaactaatttaattatttatggaatattaatttaatttgtttaatgttcattctttgccaccgcttgacaagaatgtattattatccttaaaattcatctcgcatgtattgcatttaataacaaaagaagtattagaggagtgactcgacctattgtgtgcgtgtagcgcatcaaagttaccataacccatcgcatgttagaatatgaattagtagaggcaattagtattaattaatgacatttttatgattatttatgattttattatgttgtgggtcccatttttagaaatgagtattagagttataatttttcaatttcagagattttattaaactctagaagtattatttatattaaatataaattatgcaatttttataatttttgttcggtgatgacaaaaaatgcagtggatgaccgttagagtcacatcggtaaatttaaaacatattttttagcgggacaaatatttgagatattatgaataacgggattaaacaaaatattcatgatttatttatatt

SEQ ID NO: 242944 - DNA, 1067 bp, Cannabis indica
aatagctcaatcatcaaattaaacatttcttaaacacttatttattttcctacataaaacatttcagtctcactcacatacatcctctcataccccctacgatcacttgagctaattttaaatagtttttgattaatttatgtttaagcttaccaatatttaccatgcatgcccttaatttctaaccttatcttcttcttttattttttttcaccatttatttatgttttaatgaaaagtaaaatgaaagagttggagtgatgatgtacttgcacgcacccaaagttaactctttacattaacttacttcccaaaagcctgcaaccagagaccaaccttcacttcccttttaacagcataaatattattattatttacattttaccaccaattttttttttttaattaattgcaaatttcttaggtaaggatgacgtatgtctttttaccaaatgtaagagcattgacattactttcattttagtcactaattatgtctagtattattgggaaatatcacttataagtacttaataattttttataccttacaaaaaataataataataatttttaatagattaatttgtggtataaatatttaattttaactcttaattgtaaataaatagttaagtttaactttttacagtaataatacctaagttatattatatatttatggagtttccgtagatatttaatcgttaagtgtcaaattattattcacgtgttattttttagtagtatatttagattaatttttaaataaaaaataaaaatttaatgacctagaccaatcaagaactgtcacgttggtcattgacttaacacttaacggtcaggtacttacataagttctgaaaatataacatgagctagctagagatgttatgacaaaactagttacggttactgcatctgttcatgttaaaaattatttttaaattagttatatcaaaaaaactatcgaattaaactcatagtcttatttattgtaacgccccgatattttgccttattttacaaaaatactattttcatgcataatttgaaaagataaaaaa

SEQ ID NO: 242945 - DNA, 1028 bp, Cannabis indica
ttccattaagatcgattacagttaagtaaacataatccacttctagtggtatacaaagcaggaacaaaacaaacttttatttcagaggtttgatttcaaacttatttttctaagaattgcacgattaagaatttgagatatttttacattctttgttcactttcgagatttttcctctgaatttagttttgtagttcaaataaaaagcactaaactttagagacctaaatctcatcaaaaggaaaaaaaaaaaaaataacattaattttagctaattaatcaggaattgcatatcccattttcctgtgcatgacttttcctccatatctattttattcttggccctgcataatataaaggctaattataatttttgccccttgaattttgacatgtactaaatcatgcctctgaacttttaaagtcgttaaaaatacctctgaactattgagattgttggatttaagaactttttttcaattttagtaaaaaagtctaacatggatgaaagttcagggggcataatttagtacatgtcaaagtttgacatacatgatttgatagatattaaagtctggggagcatggtttattacataattaattactgaaatagtaaaattgaatgaaattagacaagaattcttaaatccaacaatctcaatagttcaggggacatttttaacgatcttaaaagttcagggggcaaaaatcttacttagcctaatataaatacatgggaataagcaaatgaaaaataaaatttcctttttttttttctccaaacaatgtgaaaaatagagaaaactcagagggatttaaaattatatttgtttgttctggccctgggctgctccggtgcctaggtggaggtggtggcgacgaaaaaaaatgacgttgagatactttgcaagtggacacaagctattctacttcgatctgaaagagattcctcgaggttgatatctaaagatttctgagaaaatcttcgctggctccaattttggagtttcgacgggtttggtattt

SEQ ID NO: 242946 - DNA, 476 bp, Cannabis indica
gtaacttttgcaaaacccaaaatggtattttaattaatggatacaaattaatggatacaaaaaaaaaaaaagatattcttcaacttatttccaaattaatcagtttctagcacaatattgaaaagacaagttttaagctaaatgaccttctcagaaccattttagcttaatacctatcattgcaattttcattttttacaatttttaaggcataagtttgtaaaatatgttttttctgaaaaaaaaaaaaaaattattttatcgaaatatttttccataaatgaaaggaattagcttgctattatgtataacatttagaattttattataaatatttgaaatatatacatttttatgctaagttttagaaattattataagttaaaaacgtcactattcttttgttatattgtaatacttttaaaatgttacttaatttaatatttggtgtcctttttacaaatatcattattgat

SEQ ID NO: 242947 - DNA, 1547 bp, Cannabis indica
aagatggcaggctttatatctctcgagatatgttgtttaatgaaaacatctttccctttgctgttgaagcttcatctcacatctctccattagttaccactattgctcactctcttgcatctccgctagtattgaccttcacttccccatcttctaatccaccacccttcccacctgacctgattcccaccattctaactactccaagcacctcctcccaatctgacactattcctgcacctattgccattcatgttcaacctgtgctacatgttcgcattagtatttctcttgcagatcgtgatgttcacaggtccactactgctgctcactcagatattgctacagcaagttcaactacacatcctatgcctgcaccagcatctcaagttgttgatcaacattagtggcatctgagtctcttgttcctgaatcttcaaatgctaatccaatgaaaactagatccgaatctggaattagaataccaaagggtcttctatatgagctcagattttgaaagttacttagcgacagttttttatatattgtatattgagatttttttttcaataaaatggaacaagatctcagaattatgaaaccttatgtatttagtattatttattaaagtttaagtttaattataaaattttagttaatcacgtttttttaataaattctttgattagcaaagaagcacacaacatttaaaatagcacggtagcgtgtttaaactagtagggtgttacaaccattgttgtacgagccaagtttcatcacagtgaagaagagtcaagcttctaaggtgagctctcaaggatgtagcctaagttttagggtgaaccttaccaaaattaatgtgtttgatctccttacttctctgtattttacaattctagttttatgttgattgatatggatctataatcttgaagtactttgattgttaccaaaaaaaggctaatacaattgtggttcctgatcaaaatcatgatttagaatttaattacgaaattacaatcatagaattaagtgtgtgcaaatgacaatatgtttttgaatggttttcttttgttgaaagataagatcagggttgatctgtctgtgtgtctgttcactggatttttagtcaacaaacacataatcataataaatgaaatataaattaaaaaacgaataataaatgtaaataatgataccagaatttaaagagtttgacccgaaatgtcgataatagactattccccttgtattttattaatcagagttgcaggatcaaggacagactcttgcatgtaaaagataacaatggtagagttcttttttctttaagtactcaaacttttagatctccttcccagatcatgggtgaccccttatataagggaagggttggtgcttctcgtttcaagagacgcgaccattgcagagatatctcagccgtatttttggttttcagaagtggttgaagtctgattcttgtgataatatcccactatcttcgtgggtttgtaaccaacgttaaactttttgggagattttaatat

SEQ ID NO: 242948 - DNA, 1365 bp, Cannabis indica
tcagatcttgataatactttgctacagaaaggatacaagggttagagatttgaacggaagaagtcatttaatttcgctgcacccaatgtaaggtttcttaaactttatacgcgtttatttcatcgttttagaaagttcatatttagggtgttaataaacatacttgtgagtagatctaagatccttgtaaaataaattccaacaagaatctcactgaacgaccaggctgagcttattaggaggccctcccatgaggaaatcaggtgtaccctgtttgccatgagtagtaacaaagctccatgacctgatggaatgtctgttctcttctttaaacactagtagggatttgttgagaaggacttttgcgaagctgtctcggatttcttatggaaagggattatgcataagggagtcaatgctactaatatcgtcctaattcccaaagttcagaacccgaaaagacctaaccactatcgggcaatctctctttgtaatgtgctttacaaggtcatctctaagatcatagacaataggattaaaccactgttacctaagcttatctgtcccacccaagctgcctttgtgcgtgggaggaatatagaggataataatgtgattgcctaggaaatagtccactcgttcaataggaaaaaaggcagagaaggtttatttgcaataaaaattgatcttataaaagcatatgataggatgagttggagattcattgatcgtgtgctttcatgttttggggcgcctcaagagtttcaaaattgggtgtcttagtgtattactaccacctctctcaatgtctgcctaaatggaggtccctttggcaagattatcccttcttgtggtcttcgacaaggtgaccccctatctccctatctctttatttgggctgcggaattttttgtcaaggcttttggaggattcctaagccaagagaactatcagcagtatcaggctcagtaggggtggccctattatctctcatattttcttcgctgatgatctcattctagttggaaaagccaatttagaggaggtcaaaggatactgggagtgtcttaagaagttttcctcttggtcaggatagaaggtcaataaaatgaagaccttgatcttcttcagcaagaatactccccatagtatgaaacaaggaatcaagaccttgttgggaatagaatcggtaacgttaattatttggggcttcctttatttagatctagacaaaaagatgcagactttaactttattttggataacctgacatctaaattgcatggttggaaagctaagacactttttaaagcgggtcgtgctgttgggttttatgccctaaataaaattctatttcaatgtaat

SEQ ID NO: 242949 - DNA, 644 bp, Cannabis indica
ttttcttggaattataaagggattttcttgcaactaaacaccctcaaatgttcaaagtttaatggcttccctgtccacaccttttgaggtgtcttaaaagttgtttggtactgagggacatctgtttattagattacatgcagtcttgagggcttctcccaacaatggtctttccaaaccagcccctacaagcatgcatcaaacactctctaacaaagtcatgttcattctttctgcaatgccattttgttgtggtgtgttcaccactgttttgtgcttaaaaagaccttagagcacaaaacatcttgaatttccctgagcagtactccaggccattgtttgtcatgagtaccttgagcttgttaccagtttggttctctagaagcgttctccactcaatgaaagtatcaaggcatgattcttatttttcaacaagtatacccatactttcctaatgaaatcatctatgatactcatcaatttcttgatggtcctcaaaggtctgagtgtacataggctagtttctctgtggtagtgtgtttccctttattgaattttaccctgcaggccttcccaagcacacattcatcacagaattctaacctttcttgcagtttctgtttgaacaacccttgtctgtttaa

SEQ ID NO: 242950 - DNA, 2024 bp, Cannabis indica
gtttttacggttttttagattgcggtgcaggtgcagtttagaaaattggaaaaaccgcatgtgcggggttagtttgaaaaaaatagttaaaaaaccgcaccacccgcaccgcgaacacccctaatatattttacataaaaatatcaatatatattatatttttatgagattagttttcatagtcttttttatgcttaactggttagttttcagtcattttcaaaaattatgtttttaaattttttaatcgcaaaaataaaaataaaattttgtttttgaaaaacaaaaaatgtaaccatttttgttatttaattttaagaacaaaaaaataaaattgtattctgtaaatttcatttttattagttgattttacttaaatcgggtctgaggccaggtccgaggttaggaacgagggcgggtccaagtctggagccgagtttagattcagtttccaaagtctaatttgaggtcaaagtctaaaatattaattaaaaaaattttaaaagtaattttttttaaaaaaaaattaaattcttaattaaaaaattaaaaagtaaataaattttacaacataattttataaaatattttcacttttctaatttattttgattttctatttaaagagaatagttccaattacaaaaaatttcattgtatttgatacaaagataagatataaaacctattgttaaacaaatgaataaaatagaaaatacatcatcatcacctagcaagtattaattattaaagctcaattaaaactcacaatacattattttcattattttttcttaagaagagcttccaaattccaatgatatgatgatgagaaatagatctgattcaatgaaacaagaacttgtcctttttatattttgcttgaataaacaaacaaatactaaacactcagctcaactaccatagtctttttaactagtgattcaatttgaagaatcaataattactttaggtataaaacttttcaaattttcagttaaatggttaactagctcctcatctctagacttcttaaggatttcaactatactgtcaatgtaaggagatttaagcttaattcttttcatgagcattagttttaccagtttcacagcctccactgagtgatttctttcacaaagtcccaccaaaaggagagaatataaatcagaatcaatggaagtcaagtatcccatcttctcaatttcatcacacaactcatatccatctacaactcgaccacccaaagcaagctcctttatcataatgctgcaagccaaaccgtctggtttcaacccaccatcgagcattttcctaaacagcttctcggcctcctctgtccgttcatttcgtttcaaagacaccacgagagaactatagcattcttcataagaaacaccgcctcccttaacaaccttatcgatcaatttataggcctcattaagtcgaccctccaaacaaaagcgctcaatcaaacaactagctgttacacgatttggagagcagttacgagcttccattcgattaagaacctccagtgcttccaatgtctgacctttctcacaaaacctttgaataacagacgtatacgttactacattaggactgcaactcccgccttctttctccatttcatctagcaactcaagggctttctccatattcccgaatttacagatcccatgaagaagaacagagtacaaaaccttatcgggcaaacaaccatgttccttcataacctcaaacaatcgaaatgcatcatccaatcgacctacactgcaaaaccctttagccatttcaacataagtgatcatatctggataaagatcaatcaaacccatttctttcatcaaagtttcagctgtattcatatcaccctttacgcaaaacaaccttataaccaaattatacatagtagtatctgctctcaaaccaaattccggcattttcctcaataccaacaatgcctcatctgcaagtttcgcttgtttgtacaaattcaagacaaccttaaaagtcttaac

SEQ ID NO: 242951 - DNA, 684 bp, Cannabis indica
gtaatatgtttttgaatctttaaaacacatatataaatataaaattaaaaaaatgtaaatttaacttaaaaaaatgtgagaactataaaaattttatgtcataaaagataacttgtaataaatagtataaaaaaattattgggattatttcacaaatacacaaaaacaataagaaaattacaaaaatacagttttatgaaatttcaaatatttttacgattttattaattttgttcacagaaaatacagtcttttttattgtactattgttaatttgttgttgattttttgttatttgtatgttattttattgttattgttttgatgttatttagatgttatttttatgttgcttttatgtagttttcttgttgtttttattgtggtttttctatagaaaatcataaaaatataaaaaaagaaatctttaaatgtaaaaatataattgtattataaaaaatgatgccttatatacttatcccaaaattatttctatacaaattttaaaattttaaaattagattatttatagagattatttcacaaatacacaaaaataacaaaaaaaattacaaaaatacggtttcaaggaattttaaatatttttacgatttttttgattttatttacagaaaatataatttttttatgttgtattcttgttaatttattgtttgatttttt

SEQ ID NO: 242952 - DNA, 1813 bp, Cannabis indica
gactaaatgtatttttagtcacaatccttgttgtgactaaaactaaattagtgacaacttgtaactaaatgctatgtttaatttagtcacaagtaacattttgttgtgacttaaagtcacatttaatcacaaaaaaattatgttgtgactaaaaagttatcactaaaagtaacagttttttgtagtaatatggtaggaatcatggttttgtgtatggaaaattatgaattttgtgttatctcagtatgtctgatattggtttatgagttaactttgacagatatgtattttcaagttaaaatagctcgaacaggtattaatgagttgttagtgagctatcaaagttagttttgtgtgagttgttattatatatagttggttcttgaatgttttaactaactctcactcattttgattctttaatagagatttttctctgttagggtaaaaatctttttcttctttttcttcttctttgtttcctacaggttacaccattgttgaaaatttcaagcttctgtgtaagtaacaattgaggttgtttcatctgaagggagttcagattcatagttgaaggaattttaacataatcgaagcaaggcaagcttgtcttcgaatctaacgtgaaagttagatcttagggtaaattattgtaaggattattgttgtactgttttacattactttgatttacaaactggagtttgtgttttaacatgaattcttattggagattatttaccatagttcggggaacccaagcactagttagctggaatgcatttccaatgcagatgaagcttgtaaatttgatgtgttcatatcggtttagtttccgcattattagttcttgataattcttgcaatctattagtaaaacaattaggttttactctttcataattggtatcagagtttgtctttttctcttcttgaaattgtgattctaggtctgttagatttgcttaggattaagattgatttgctacaagttttctggtgtgaacgcaaacaatatgatattttgttgtttcatctaatccaccttcagttccatctggaagtgcattatcttgtgttacttttatttcttaattcacaagtttaattcaaatagagatgttaagaaagggagggtccacctctaagccaaatatgatggaaggacattcagggattgtcgttgacggatcccatattacaggcgagaccaacaaaactagagggcctacgcttggacactccgtcacgagctcaaaagcgacttcctggcaagtgaagaacaaggctctaagcaaccaaagcatggagagcccacgatctctttctcaaaaaggaggtcctttccaagacacttttcagcacaacaacccctagtcgttaccgcacaaactgagaatataactgcagcgagatacatggtggacaatggagcctccctcaacgttcttttcaaaatcaacacatgataagatgaggctccaacttgctgacttggcgccctgcaatcaagttatgtatggcctctctagtcgaagcatcacactcatcgagtatatcagattacccctttgtgttggagaaaatccaaccactagaactctaatggtgcagttcatcataatcgatgttccattagcctccaacgccatgatgggcttaccgacccaatgcaacctaaaggcggcaacacccatctaccatctttgcctattcctaacaagacatgaggtggatgtcaagaggagatcaacaatctgcccgtcataacctggccttgcccaaagccaagaaaaagaagattcacccacca

SEQ ID NO: 242953 - DNA, 586 bp, Cannabis indica
tgttgatggctcttttggggattgggtcatgactttaattactcgattttatgagggggaatgtagttggtaatcattttgtgttgggcgatttggtatatgcataactaacttttgtagaaggcaaagaagaatgtggtggagaatgttgttaatttagctcaggtcactcttgatcaatggacaaatgctcaagataaaagtcttctttttctttcagtggatgcctcgtgtctttcagatgggattgagatttggtctaaactaaatgctgataaactcaaggtaaatagacaaaaagtatgggtttagtggagtgattagagatccccacagccatgtgatgactggtatatcaaaattaaaggcgaatgttgtgctagctgaagttgctgaagctatatctctaaaggaagtattttcgtggctgaagagagatttttcaatagtcaaaagtgttgagaccgattgcttggagttagtccaagcaatccgtagtagtacgtcctaaggtgatgctttctacatttggaggtgttgtagaattgtgttaattccatttttggcacatttaattgaacaaaaa

SEQ ID NO: 242954 - DNA, 911 bp, Cannabis indica
tatattgtttttttttttttttttttggtaggatcacttagcgtcagggtataggagaaaatattaagatttaaattattaaaattcctcctaatagttcatgcaaaattttttgcccaaaaattcattagttcttggttgggcttataaaaaatgactgaaattaatttaactatggggatgaagtttgaagggaataggtgttcaagaaagagttaaaaagagagagactgacattgtggataaagttttagttttgggggttgaagataataataaaatacattaaaatatgatatatgaaaaatagaaatggataagaataaaaagtatttttggcaaatattgatttttccttttgaaagatggtaaatatatttattgaaactatttattgttaaacaatatgtatctattaagttgttttcttttaagtttttttttgtttattggtggtgttttttgaagttatttttttaaaaaaaaaaatattaagaataataataataataaaattactcaaatataataacataaatatatattattagtgggtttattttttttaatgtaaattatatcttgcacccttatttcatactattacatcatttgattattaattaatctttttttattaacttagttgtgtaaaatatcatcaaacttttaaaattaataaaatatatactactacgagataagtatgattgagagaaagattcaactttgagagtgtgggacgtgcatcaaagccaatgattaatttttattggtagaatgatatagatcgatctcttatatctttcataatttgttgttctaaattatattaaaaatatataattaataatttttttgttataataaattagtaattaggtgtatatacattaattatattttgaaaa

SEQ ID NO: 242955 - DNA, 2414 bp, Cannabis indica
ataataataataataaaaaaagcaatgtcaataaatgaacaatgcattttggtatcagtagttttgcacttctcccattgacttaccatctctcttaagctccggagtttgtctcttcttcaagagatagtaccataatagggacagacctatgagagccactactagagctactactggtaatgctatatacataatttctgtttttccctttgaacttctatattcttctgtcattgttcaaaaaaaaaaaaagtagtgtcagcaaaaaaataagcaacacagaaatcataatatattggtttagttctcattttgatttaataaatcaaatactaatcattatatattgaaatttagaattaagacatacccaagtcagaggaagccattctaatataaatgtcttgaccagaatcagcatattgtctaatatctatcagttctttgaaccaaagtatgcaaccacttcctccatttcttatgtccatattagcataagctgtacaagagcaatttttcaagcatttctgctcacattctttgaggtccatggtcatgttgtaccaggaaaagactgtgtcaggcaatttaatgctggaatattttctaaaaccctctccttcaatgcagcccaatgatgtttttctttcgcatccatgcgaccaatctccagagttatagtcttccttggacttaggcacgaatccctccaagcagccacaagcaggtgagttgttgatattgcaagtaccatagggaccacatgttgcatacctatcacaatcatccatctgtgcactcaagtagaaattccaaccctttgttctgtcaatccaagtgaacctttgaagatgtccattgagatccaacacaagccttgatacaactgagttgctgataagtttgtatgtgtaataaatctccttctcattgcaaacaaagtcatatgtgtatatgggatttggtttcaagttgggcataccactgaatctaaggccattccatggtccagacctgaaccttattactgatccttttctcagataaaactgtggtacaccattgggatcaagtatgtttgtgaactcaccatcagaaggatcattatcactcttccatgaagtcaatcctcgatttatgcctgttaccatgctaattccatacttcatgcctggaagaagtgtattccctggatagtcaaagctttgccatatatatttccctacttttttttcatcatcatttctcactacaaaatttcctgtatctaaaagctgagcaacagggttagttccttgtttcgtcgaattagaagaccatacagttttgttgccatcatagagaagggatagaattccattaccagaaagttgaaagattccagatgaatcattgagaggggtgtctttgttggcaacccaaaccactgtcccagaagctattttcttataccatattcctaaatacctgttttttgagtttttggggctaaagaatccaagctcaaagcttccaccagctgagactatagagcttccttctttaattgattgagttgcagtaattttgtctgctccatttgtgatttgaaagattgatgataacaaaaagcacactaaaaccaacattgcaatggactccatttgaaggccttataaaatcaataaacttgggcatattagacattgacttaattgatgatatttagaaaggagaaaatgaaaaccaaggacactaaaaggatcatttgaaggacttgtttgcattaccatggtttggacacgagaagaatcattgctatgacttgcctcataccacaagttttgtaagtgggaaaccaattgttaagagagctgtccatgaactagtccatgtttaatcctttgaagcatctttagattgatatattctaattgattttgtcaactcttattttttatttataatgtcattataattacctgatacatgttttatatatattaagaaaaagataaaatatactaatggaactcatagagttgaccatagttttttattaacctgtttaaatatttgacaataaaatgacattttatttgaggtaatgaaatgaaatggaaaataaaggaggcaacttttatttcattttattttttggtttcattttatagtatttgaatgatatattcttattttagttatgtttttattttattttttaaccaaacatcacttaatttggtgtttgttatgtgagtttgagttggagagaatagagttggagggagtaaacttagaaggaatatgaaacctatgttagttgggaggaataaaaatataagaataagaatgggaatgtgaataggaattcaatcgaattaaattgaaaatgtgaaaaaaaaattgatacaaaaataatttagtttttt

SEQ ID NO: 242956 - DNA, 1313 bp, Cannabis indica
acgtacgttgaaaattatctgatcatgtcctagctagtatttattcaacatgtatataatataatatgagaaatttatatatatatactacatgtactggatagcatataattattgtctctatagtaggtccttgagaatcatctatatcacttcaaaaaggtgtatatatatatatatatgaaacacaataatcaattgagagagaaaacttaatgatcagtactcatccaattgattgccatgaagacctgacctctatatatgcacatgcatacatatgatcgatcgttctgtacatatatttatatatttatataatataaagaaactaagatggtcagaactataatgtaaatatatttgtgtgaaataactgtataagtaactagacgtttcgttactctgttggtcaagaaatggtccaagccaatggtagcctattgggaaccattgttttgtacttattattattgggggtgtactgatgccatttagcacagcaacacacacacacacataatatataaatataatatatgttatgtatttataaatatatatataaactgactcaactcaatcacttcgaaacgcactataatattatatatgcttatggtgttaaagagtcagctccccattttcctctccatttgcgtaacgtagcgacgtaaatgcttacagtgcttttctaccaacttgatgtatcttgtctctatcatatatcatatatcatgtataataatatttgaggatatattagtaatactataaggtgataacattctataattgattagcaattcttcattatttttattaaaataaaaagtaatttatagtgtaaatacttaagtttaactctcggttgtaaaaaaatatacttaagtttagtttttgactaaattatatttttagaacttctgtaggtatctgtctgttaagggttaagtcgttatctacgtgttattttcttattgatttatttaaattaatttttaaataaaaataaaaatgtaatgatttggaccaatcaaagattgccacatggtaatttacttaacattaacggtcaaacatctacaaaagtttcataattataacttaggtattattacggttaaaaaaaacaaatttcttcgtatttaagtagattgcctggtagcaaatcttattttaaagtaaaaaccaaaacaaaataaatagttggggaattatatttgcacctcataaaattataaatacactccattattaaaaaaaaaataaacttaaataatttttaaaaattactcttaatatttttttaa

SEQ ID NO: 242957 - DNA, 546 bp, Cannabis indica
aatccctctcttcatctctattctctatttttatgtgtatatttttgtttagtgttgtaatattatttatacatgttttgtcctttgtattatttgtcgttgagttgtaatcttgttggtttgatatttctattggagcacaacaattttccaacagaaataaacaacaaagtactcgaactaataacttacatatcagatttacgtccaagttgcttgtggggtaggatgacctaagctgaatgtgaatcattggagtgtggaataggatgacttattgcggaagaaagggaagaacaataaagtgtctttattgaatgaattgaatgaaaaatacaaaaggaatcaagcctttatataggcaagcagagagtatgaaaacagaattcctcaaatcaaggaacaccataaaaacaggaacaatataaacggaaataacagataatagacaacaacataacaaccatagcagcatactaacagaacacactaccactaactggtatatatactaactgatacataatcttgttacccccccccccc

SEQ ID NO: 242958 - DNA, 3268 bp, Cannabis indica
ttgtatttcatgaatttgtgatttgcgctctgaaagatctgatcttttttttttcttcttgtttgtataaatgcaaatgatgaatagatgaagactgtaggtagaatagaggaaactaattcattttctttttcttttttatttttgctttattaaaattatataaattgtttttgtcgtgcttttcttggttttttttttaaaattcttttgcttagtttgcaagtaaatctcagttataatctagtcagggtttcacccagtttcagtatttattattccctttaagaatccttggactccaaggaatgtttggtcataagagttttcttttgtatatgtattttcttaattgatagggtagcttataaattgtatgggtatttgcttggattgcaatgagtgtattttggccaataataaaacattggttcattattttactgcagattctgaaagtcgagagtttattatatatttaagcctgattgttattgagattggaagaacaccatttttctttgccgtatttgttcattgttgattgagaggtggttgctgtgaaaattactctgaaaatttcattttaagacattttgcaagaaatgggtgtttatgatcaaggttttaatatgaaatctcttcccttaaattctcccaggaagagaaagacgcggagtagacgtgaaggtaattcagttgcggatactctagcgaagtggaaggagtacaacagtagtattgaatctacaaatgatgatggtaagccaactcgcagaattccagccaagggttctaagaaaggatgtatgaaaggtaaagggggtcctgataattcaagatgtaactacagaggtgttaggcagagaacttggggcaagtgggttgccgaaattcgggagcctaataggggaaataggctctggttaggtacttttccaactgcattagaagctgctcttgcctatgatgaagctgccagggcaatgtatggcccctgtgctcgccttaatcttcccaatataacggactacaaatcatgcaagacgtcttctaaagtttcttcttcattggctactccatcaggttcttcttcagtgaccactccagcaggctcggaatctactacaacatcgaattcgatcctgtctgaggtctgtgcggatgaggaatctaaggtaaagggcattgcttctggtgggaagaatgaagttattcagtcgagagtaaatcctcagcctcttcttgtggctgaagtagctacacctttaagtgcggtgaagtcagaagtgaagctagaagaagcgagcccgaagcctgttaaacaagaggctaaagaggacaccatggaagctgagtatcaaacttgggacaagttaggtgatacggaggagaatttactgcagagcttctcaatggatgagatgtttgacgttgaagaactattgggaatcatggacggtaatgcaggctcagtggaagatatttgctgtaatgctcttcaatgggacaatgaagatattcagaccaacgaaccatctaatttatcttatcagttggagaaccctgatgccaagctactaggtagtttgcgtcatatggagcacccttcatcagggctcgattacagctttgatttcttgaagccaggaaggatcgaggataataatatttgcttggacgatcaggcctacacttgggattatccaattacgagttttgagatggaggggatgtctggctgaaggaggaatggtgcatcctcaagatggactctgcgacattagattagcgatcacaggtcacaagaaggccagaacaatgagtttctagagttgcatttagaatccgacaggctcttggacttggatacaggcagcttgatgatagtttggccaagcaaactttgtagattgctatacgaactaggaaaaatatacataatatacactatttttctttttcccattttcctgggactgacttgttcgtttccctttgggactaacccgttaatggcctgattctctatagcttttagattgggggattcggctaatattacataatgtttctttgattcgtttttcaccttacttttgtgtccgtttcctggtcgttaccgggagatgggcagagggtctacatatacacgtttcccccgtctcttttcatacgataaaatttctttgatcagttttcacgttaactgatattctttgttgtagatataagatgtactagattataatgactttgttcatcatatttgtgtgtagaaaacaaatcctggaaagccattattcaaaatatatattgaaggtttcaaataaaatctataatatttatgtacattgtgtctttgttactttgctgcaaatcatgagtttttcttgtttgaatatagaatctgggacttattgtctgatatcgtggtcaccactgttgactattcaactgggaaattagaaaaacgtcattgttacctttcattaaaacatgaatgtgttgtggtgatagttattagcttacagtgcgttattaaggatgcaaacagatcccggcaaaactacaaatttctttgtgtgtcttgttcagatgtttactaattagtgtgtagtttttggtttcaagtactgcagtgttcctcagtatttctcacatttgggatagtatcttattatgtacattgtgtctttgttacatttctcacatcaggtttcaagtctttcaaagaacaacgataatcagggatctaaaatttttgatctgtggggcttaattattataaaaatatttattatttattttatattaaaattataattattttgtagggtttttttttactattttattgtataattatttaattaaataaaagatatttaattttttttaacactaattttttttactagagttatagcctcacacttttattattgcgttgtctctgacgataattaactaaattttaaataaaaatactcgaaatgaatgaattatatgaacatgaaagaactagaatataatactcttgggataaatcctaacgtgttactttggggtttaaatattggtgaaaaatccagtctttgatctattcttgttatcgtcaacttttttccctagtaatagtactaaggatgtacattttcttatggggacgggttccactggggactcgccttagtggagatttttgtctatatacagaataaagtaggaataagaattattttttgtctaaacgggatggagattt

SEQ ID NO: 242959 - DNA, 1208 bp, Cannabis indica
tattaaataaaaatatatagtactcaatattaaaatatactaataatagtataatatttcttgtaatatttgttacacgcttatcatttctttttttctaattgtttttatatatattgataaagaataaaagaaaaacaaaaaatttgtacgtgctatgatttatgtttttaccgattttattttcaattacagtttttttttatagaaaagttataataatttaaaacaactatagttcaaacataaaaactctttaaaaaaaatagttcaaacgtaaaaataactatgtacaagtaacatgcaaacaacaaacataagatttttgtagaaacaacgtgaataaaaaacattatatataattatatataatctattctccaatctactaaaaagtaaaaagaaaaatacaatttaatttctatggtaattatagagatggcctaactttattttttttatacatattatttatgaccattggttgaaaaattgtaattaagaatatattattattcttatacattattgttggaacttgaaattttataaaatgagaagtgatgaagtgtgagtgtattgagttccagatgggataagattcattagaagtatatataatgtctgaaatcggaacatgagttgaggtcccaaggaatacctagttttgaatagtgatgactcatacaccaaaccaccacacatgagcacgcaccgctatccgactgagctagcaggtgtggtgtcactttatcttttagagaaattatttattaaattattatcttgatcacgtacttagccttgtatataagtgtatggcccaaatacaaatcagtaatatgttatgtgctacgtgcttttcttactgagtctctcaagtcacagatattatcaacatgtgtaggtaaagaaaatactaaggctgagcatcagtgagtccagagctcggggatgattgtacatgttaagattggttcgacctggagagttcggtctcaagacgactagtgcctcatttttgtagttgctgtgacgtgtttatataaagtgtattttgaatatgtttgtaaattttaattaaagatgggatctcaactttttgtatggatgtatatatttatagagttttatttcaaagttctaatatgataagatttttgagaaaatctttgattagcaaaagacagcacagtaagtaataaaat

SEQ ID NO: 242960 - DNA, 1672 bp, Cannabis indica
taatcattactcaactaacatttgagacaatttatacatgtcgaatacaaccatcaatccactaacagaatttattccatatgcttacaatgctcactattctccactaatataaataattacataatcaagaatcagagtgtctttttagacttgtaatagaaggtttaagtacaggtagataaagtagtcatttaagctcacatataccataagcatataaattcaaaaccaatcttgatattaacatctaatttaacataccatataatttaacataccccaagctcctctttatttccaaagattgagaaaaattgacactagagcattttttttttcattcttgtgtttcttttttattctttcacttttatatatttttcttttctcaatccttacttgaacttttcaattgccaacaccactctacaaagaataacacccaatataattcaatccttattttttttttctttttatatgctcatgatactaatataggaaatgaaaaataataaagtgttcaattgcgctcaaaataagtgtaacaataaaaagtatatctttaggctcaaaaagggtaactaaggtgagatttaaacaaggtcggcttgaaaggcacaatcggtcaaaaaattacctaaattactttcttaatcatgcgtcttctatcatttcacttcaaatagtaagcaagcaaatgtaaaaaatttctcaactaactttccacaatccacatttatcatgcataaactacttcaattgttagaaatttaccaattatgattatatgttcattaacgcaaaaaattgaagctaattgagaatgcaatctcactaagcacagattttgagaaaaaaattaatcaaaatttttctcaaaccatgctacatactcaattcaacattgactcatattcaatattcaagagtttgactcaaaataacataacatagacaaacaaacacactaaaaaaacttaaaaattaagttcaccccaaacttgaatggcacattatccccaaagtgacactaaggactaggaaagagaacttacctgagtgccacattagtatgacagtgtaggaggtggtggttggtacggacgccaccatgtggtggggccgaaaaatggtcaggcacctcaggatttatttttcacatcgacaagtggttgatgcccataataagtatcatgcacgatagcttgaaagttgtcattgtaaatgccctctagcttggcatgacatgagttttttctaaaagtagcaccaacaacactagaatttggatgatatgcttggggagaaaccttcgatagctcgtagaggatgtaatatggtgcagttgacattaattaaaaataaggatccactagtggttcgtaatataatagagttaacgaactcaaattaacaactacaagtgatttagcctccaatgacacatctttcttactttgctcatgaccatccacaaacttgactgggatttgatcttcaataacttcttcactgaggatggttgttgctttagtcaccaaatcaaaatcatcacttgttgagaaagcatccaatgtacccaaatttttaattaaaaccacttcaaatgggtcttgctcttcaattataggttcaatctctactgtgtattcaactaatggtactt

SEQ ID NO: 242961 - DNA, 1200 bp, Cannabis indica
acttataaattatttacaaaaactttctttaaaaaaatttgtagaatattttgctaatactacaatatctatagttgtataaaaaaattgaagttataattttcatacatgccaaaaaagagacaccctttatagtaagagcaaaagtgaggctcacttaattaccataaaatcatgtctcgccctctttactttttttctaggaataaaaagtatggaagaaatgaaattacgacatcattacacgtcgagattgctaaactgcatgagccaagagataaagaagagaggggtctcagtttatggggccttttacaaatgtgctgaggaaggagtggttgagatctttgttagtttagcaaaaacaaatcctcaccttgtgttttactacaatgatataggaagaaatgttttcatggcttcaattgagcatcgacaaccacaaatttattgccttctgcatggggtttctactaaacatgtcactatagcatcattagattgtggacttaataccatgttacacatggctggattattggcacctcctaatcaactcaataaaattcctggggctgcattacaaatgcaaagtgagctacaatggtttaaggtacgtacttataatatgagaatacaggttcaaacggtttattttacatacctatacttataaaataaaagagacacgtatatgtaacagaatatttgaagattgtttttaagcatgttaaatcattctaaatttttaaaaactttatagaatattttgaaaaatgataatgtacactttaatattagaaaaataaaactatttagataaacacgaaagacatagtcatttttgacggttgtacaaaaaaattttgtagtgatatatatatatatatataacaaataaaaataaattagaaatacaacttatccatgtgacaaaaaggacaaaaagtaaaataagagcatgaaattgagaacatcacataataaaaaatatacactgcaaatatgcatgtacagaagcctcatgaatatatttattaatgtacaaatgtaggaaatagagtcaattactttaccaaaatatttgcattcaaagaacaaagatggactcacaccaagaagttgttcacaaaagaacacaaacacttgatgagcaatggtgaaaaatggatgaaagacacagcaagttcatgcagtttg

SEQ ID NO: 242962 - DNA, 691 bp, Cannabis indica
taaactattatatatattttaattaaataaataatatcattttagaaagtaattaagtgtttaatataatgtataaaagggaaataaaagagtaaaagtggtcaagagtataatagatcattcttattcttctatggtaataagacaattaatatgttctttttttagaataattaaacctgtaattataaatcaaacttattcatttacaacaacaaatgatataggggaggggacatcctctaaccaaacagagatttatccaactcaaaagtatgttttgctaagtcatgagcaattttattggtatctctacaaacatgaaagacagcaaatccagaaaaaaatgaaaaaagaccaacaacttccaataatatctgcaaaaatagataacataggcgagggttgattgatgcaaaagtagataacataggcgagggttgattgattgccatggaaactttaagcgcatttatttctatttcattaataggcaactgcaactgtgaagcccaaaggagactgtgaaaaagagccaaggcttccatctcatgagccttataacaccctgtgagaggtttggaaaaagcaacaaccatgtggccaaattcactccaaacaatagctccgacacctgaaattctaccagcaatattaatagttgcatcaacgttaagcttcaggtctcctc

SEQ ID NO: 242963 - DNA, 4978 bp, Cannabis indica
gtccttttacttttatttcatttaaggagatttttatttgcaccccaaaaaattataaatacaccttattttaataatttttattttatataaattatatatctttaattatattaattttttttcaatttccttttgattcatattcttaaaaaatatacatataaaaatatatatagtttaaaaattattttaagtttaatttttttaaatattagggtgtacttatcattttgtgaggtgtaaataaaatttccctttatttaatatttataatgtaattctcattacatagcttttccaatataataaagattctattggataatgtaatcaccattacattgtaatctcattacatcactttaaaaaaataaaaattataacagtaattttgattccaatacaatcatcattacatcaaaccaaatataaccttacattttatattaatatttatgtgtagttttattagtacataatggtagaaaaaattatggacttacatttaaatagcatgacagatgatacattttattttcaaaaagaacctgtatcacactatctttatttaaacgtaattaatgaaaaataaaatatataattaacttaaaattttgacggggattatgtgcctcaaacacgtctttacactagcatatatagatagtctgagggaaggatgtaatttaaatttttgttgtttctgtttgtaaatggcctatatattgtctatttagttgtagacacacaaatttaaataataaaatctcatcttgcttaactcaatatctttctaaattttttttaagcttttttttttaattaagatagataataaaaatattatcataagctcaaaattactaaatatatgatatattaaacaaagttgttataggaagtatcaatttcaataatataatctaaaaaagttaagaggaaaaacaaatattagaaaaaaagttattaatgttttgaatgttaagtaccctctaataaactgacactaaaattaataaaatctttggctatcgacttgctctttgtcagaagtcctggaagtattattattaatattatatataaacggctggtgtgatttaatttgtttccattattaaatattaaatttgtagcccatctaaactaaaatcacaatggcgagactctcacgttaatcatatcagccgtcagatgaatctatcacaattaaatcctgcggttaagattagcactcgtcagatttgtgaatatgcggaacaaaaaagtgggaccagcatagagagtctaaagctttgtcggagtccagctccattccgcgtttcaacgtcgaggaaagaaaaccttgaggaattcgcacgtgccatccacgaccccaggtcccaaccccaaccttcgcacgtgccatccacgacccaagcccccattcttactgcaaagtgcaaacataaaatcacatttttcttgaccattttgcttttggttttgagccaaaatttctttcattttcaggcagtagacttggaagtcttggattgattttcctgggactcttcgttcaatattttcttacggagatcgactggtccttcgtttaatctttctggcatctcttgtagtagctcacgatgtcggttagttttctctctttttctgttcaatattctctttttgggtttcggtagttatttttatttatttatcgtgtatttgttgatatgaatagatccgttttgagctctttaagtaaattgattgtggaatttgtgttaataagcagattaatcttgtctgttagttaagctgtggatggaagtttgtaaacaagtgtgagatcttttttttcgctctagaattaaattcttgtttgggattatatcggcccaagatttgaacttgattatgaggaattgagaatcgattacaacaagcaagtctttagattaagtaaaggcgtttctgttttcccaacctagtttctggaagggggcttgataatttgggatggtgtagtgttcttgctttgcttacagcttaagaatttcaacggctttcttgtttatcatagaaattaaagaaacgacaaattaattctgtggctttcctattgagatggtgttactttttgggatttggtttgtgttgagtgcttaattaaataaggtattcattatttactcaggggcttaatgttcaaaaattggatggttattgtatggccagttgcggagagaggctgcattacattttctgattttcgtattacttaaaagtgttttcaaaccttatttgtgctattgaaagagtgcacaaaaaaaaagtttgaaagattgactcttgtcaatattcaattttgggaagcttatgttattgtataagtgaggatgtaaaggtttgtgtcttggtgggtatattatattgaaagatatgtaggaattttatttaaatttgaaatgactcatttctgggtatatatctttgttagtggttttttttttttttactatttcccgtccttaaagctgctgttacatactgtagaatgaatcctctacctctaattatttgatttgcaatggctattctggtttcattttcattgtgaactcctctgttgtatttaataatttttatttggatatctctactaattatcttgctttgcactatcatttttccttattatagtactcatatatccagcatactgcagataaaaactgtcaaggtcagtaacgtttctttgggagcaaatgagagagacatcaaggagttcttttctttctctggtgatattgaaaatgtcgagatgatgaggtagctttctcatttatttgttttgatggcattccaaattaagtattttgtcataagaattgagtttattatatatgctcttgtagtgataatgaacgatctcaaattgcatatgttaccttcaaggatgggcaaggagccgagactgcagtcctcctctcggtaatgttatatccagggttgatcctaggaagaaaagataaatggaaaaagaggagtttattgtatctgattattttacaatcctttttttttttttttgtttctttgataatgatcaattactgggttcttataggagggggcgtgattaggaaaaagttgaaaagaaaaagaaagacgaaaaaaactattatagtcatctaatctaaacaagtcaacctagtttttcatatttagttccccctactagtctctttcctctttccctgcctatttcctttgaactgaagaagggatttacaaaaagctcatcaaaggatagttcctctgcgttttatttatctatgtatctattgctttgtacactcctacattcaatccaatgatatggagaagggcattattttagaaagcatattttgtcttagatggtccccctcaacacggtaactaaatggagatgatattatatattatctagagttagtggtgctgacaataagatattacatctgaatcttttaggacgaaatctaaattggtgattttacatttttgcacttccaagcttcacctttgatctcttatcgaaatagcttctttaccttaagtttcctgtcatgtcagggagctactattgttgatatgtctgtgacgattactcttgctccagattatgagctgccaccagctgcttcagcaccccctgtatgtgtctcctaatttaatttcaaaagcatatacttttaacaatgtaagtcacttgtctgtttatttgcttcaatatgtgcaggtaacagaaaataaggctcctccaggaggtgaatcggcaattcgtaaggcagaggatgttgttagtggaatgcttgctaagggatttgtattggggaaagatgcagtgaacaaggctaaaacttttgatgagaaacatcagctgacatcaacagcctcagccaaagttgtttctttggacaaaaagattgggttaactgacaaaataaatgctggtacttctttggtgagtgacaaagttcgtgaagtggatcagaagtttcaggtttcagaaaaaaccaaaacagcttttgcggctgctgagcagaaagttagtgaggctggatccgccataatgaagaatcggtatgttttcactggggcatcctgggttacaggtgctttcagtaaggttgccaaagcagcaggagaagttagtcagaagacaaaagagaaagtgggaatagttgaagaggagcagaaaagaaaaatagtggatgactacgcccaagttcatctctccgagtctcctaaagcatctgcaccgagtgagccgaagcaatcaaagcctgaacctgctcaaggcttgatcctttgatttgaacttgtgtaaattccttgagaacatttggatcaatctttgatagctttattcttctagcatgaagtggcgagtgtaggatacaaattagttggacaaaagctgcaatctgtgtttaccttgtctttaataacgaaaaggtaaaataaacaaaacttacttttgtgaggttgctggagttgatttcgctattctttgtgcaagattccaatgttgttcgaggatattccatgtaggggaaaaaaagttgttggtttaaagggtaaccatttttaatgtttttcttcaaatgccgaaagtacttttttcactttagttttaattatggatatgttgtaagttcgtgtgtggctcagctcgtatttattcttatttttcagaaacaagtttgtcgtgtcgtgctacaaaaaagatatgggacgtactgtgtcgtgctaacatttttaaagagtaggtacgacacggctcggttcggtatatttgtgccttgctcggatttgtgttgtgttttgttcgtgtcggttcgtatttcttaaattggctagcttatttttatatttgggtttaagtttgtgtttttactttttcttatatatttttttataattactaaattatatgtat

SEQ ID NO: 242964 - DNA, 2999 bp, Cannabis indica
ttcgagtcttaaattttaatctgtacaagtaccactaaccagtaaaatatttcatgtttaggatagatagccggttccacactctcccctgccaatgagttcttggatagaaggacatagaatttttgaaccttttttaatagagtaagctcggtttgcatcaagaggaacaacctgtaaattcttgaacttgttctttactctgactacctgtttccaataccaactacttgtatatatatttgttaaatcagaatattaatttctttctaaaacaccattacaatttttagcaacatagtcaagtatctcttttcaactcatttcttgttaaactttacaatttcaaacattctaatttacttgacttgcattcttaaggcaagtgggaaattttaactttaacaaattccttaataatgtgtacaattacttttattctcttcaatttatgtaactaaaatgtctcgtatcttaccttccaatattgtaaaccatcgctgccattagttgttgctaaaaaaacaacttcctaaagtgacttatgtgagtctgagctatccatctcaatagtcgcttcaatggtgtggttgtaacagccaacccaacaacatttttatctcctgtaaacatctttaactcacatagtaattaaataagagacgatttatagtttcttcattgataccacacatcaaacaagtagaatcacaagttatattttaattgaaaatcctacattttgtctttagtatgttcaggaaagcaagccaaagtatgaagctatcattaggagtattaaaatacccccaaacttccaaatgccattacattcggtcttgatctggacaaagaagttgatagcccttcttaatctgatattgttcatttccaaattgctacaagtcaattaatttcttgaatttttctttgatggccactatcctcttccaataccaactaatattggtggggacaattgggcctaagaaggactggaactttcgagacaccttcgtcttctgtaagagcatgctcacctcgctggtatcctcttcatcttcctctaacagtagtggtcatcatgaccacctccaacctttttgcttcctaacacatcttctccacccttcaaagtgtcgtggtggcactgcatttatggcgatggacactcaacaacctcccttcacattgctgaggtcagatcccactcgaaactaaagaaatttagggcaagccttgatcaacattaatgaaagctttgcctgtttgatcttctctctgagtaaatctaatgataatccctctttgtacttaatttttaggatcctttcgtatcctaagcatgtttctaggtttaatcgctatgtctaccaacctggcatgtgggttgatttggataatccccaacctaaaaaggaaattaaatgctaaaagttctatcttcttaaacacttgagtgtacctataatcgtataagcccccaaatttttcctcattttgaaattctgttcatagcctatttaaggacccaatcccaggttgcgtcttttaccatttttgctcaagttttcctttctttctacctgtatttattttaccaattatagaagacttagcatgttctttctctgcagtcttgaaccttactgatacagagaatactatgcattctcttgttgactctgctaaaatccatgaatgacttccaccagctccactcttattctacctcatggccaccctctacactacaaaaaggtataatcataattctctaaagaacttcttagaaaaatgttggaagggacggttccctattagtgtcaaagaaaggtcattaaactctaatttgtacttagccgctttccattatgaaggtgataggcgacaagccatcataaactaaccttgaatttctgacaaatgccctgtccttcttgaaatacctaatcttgactccatcctcgttcctgaagctatttgtaaaatccctttttgggtccagctccataacattcctttttcctgatgatctatctctttcactagacttgtgggccaaattgttggagtcttgctagagatacaccaaccatccctactcaaaacttaggattaatacttacggattcatgttatgtttgatgtcactaaacctctcatgaggtgcatatctattctcttccctaggatggccattgctacatggctgaaattgaagtatgaagacctcccagaccattgctactactatggattccttggtcacacttacacatggtgcattgactacatgagggccactgatgaatccccacaccccctccacttccttacaagaatgtgctgaaaggaaccactagaccaaaccaaggaccttttgtaatactcccctattacaattagccacgactactagaaattccccaaccaaaacaactcatgaaaatgccaagccaacaagttgctaacattgccacacacagtgcttcccaagggccacgtacccagcaagagttctctttctagcttcaggaaggagatcaaacagactcagctggcctattcatctccacccaagtgatccctattgtcaacctaagtcctagctttaccccaacaatgcctagccaacacccccaccaaactagcagaactaaactcaccctggcccctctttcttagcccttatgccagttgcttttagaggttctactacttgttctgcatccctaagacaattgcatttcccaagctcacacagatcaacttccctaggtgctagccccatcaatgcgcccctactggtctcaaattctaaccccactctttttccagtcctaaatttgttgttctaagagtccccaatcctctagccttcgttgatggaagatcagaaggcccagctaacaagacacaaacaaggaagaactagcagaccagtgctactagattcaagaggcagctggcaccagtgggtatagagtagagagaga

SEQ ID NO: 242965 - DNA, 1982 bp, Cannabis indica
gtgcgaaaaagaagaaaatggtgacggtcaaaaggaggaattgcgattgcgagtagcctaaaatcccaaaatgttacacctcgtggacgagttcgaacccaggaagaagatctgcaaagtaccatctaagtcccgtgagttctcttcttcttcttttcttttttccgttttttttaggtttttcttcgctacactatgccaatatttcttgattggcagcgtcgtggtgggtgtgagttttgggaatgaatcgatcctcctatgtgtgatcgtgccactattgtgattcctagcctgttgaaaaagattcgtcagttgaaacaagaaatatcaataatttttaggtcataagtgagagaaataaatgagcaaccttaacttaaaaagctacctgaaagtgagagcctacatgataacagtccaagtattcgagttcctcaatgttcgagctgccataaaaatagtaaaaatgccttttgtaaaaatattgtcatttgcgttgttgtttcttttgtattgttttggttcaagatcctattttaactttattatttagtaggattttgaacaagtgttcctattaattttgcatgtaatacttgatattttggaatgaaaatggttattttgacaagtttagatcttctactgccaacataaaagttaaagtatacatattccaacaggatttgtcccaaaataaacctatcacaaaagttaaagactcaattacctaaccattctaaaaagatctgttccaaaataaacctagcgcaaaagttatctattccaaaataaaagctttctattaatggaggcagtagcagtaatgctataacatttaacactaacaattacataacatttaactatgacaaactaatactataacagttaacttcattgttgagtagactatgaggtcgatccttcccttgctgcctgttccagctcactgcttctcctttcacattctcctttttaatgtttatgggattgaattttgaataggtagcttccgtcctttattttttgaacctacaccaatatgataacatagtcaataccaactgaaagtgtattaaaatatttaagtgatataaaaatatacctatagtggtggtagtgttttagattttttcgcattttttagttgtgtgaccagcctccatacaatttgagcaatgcattttcgtatccactttgctacttttttttttgttgatttgagcgtttatatattacaatcatgttttacctgggactcgaacccaggacctccaagacacacacacccacctatggccacttgaactagcctcaagtggttatccactttgctacttttaaatgttgcatttggtggaggtgcctcatcaactctttcgttcctttttttctttagcgtgccaggcaggttgtgctcaataaaaagtaatattagaatgcgacttttgtcttaccaccacttatctaagggaaaataaatccttcataaactacttcaaaaacttccctgtggtagtatttagatagtagtttcaccatttatttccacaaaaccggtaatcacacctaaacactagcccccaagagattcctcaaagttgaaatctccaacaaaaacatgtgttgtggtctaaaccaagggaggggtcaatcacaatatggttatcaagttatcaacaaaaatggatattgccttacaagagcctgtggagtgtggaggccaaaatcaatagtaagctggaatttaatagagtattatagcacataaacataaagcatctctattcaaagaaatatctaccaattgaaaagaccaactttcaaaaatggaaggcacaaaaggaaaagacaacagcattgcacaaggctatagtataaaatatttcattatcgaatatggtatacatcagaattcatagggttctagagttgagacttgagattacagagcatatccaaaacccatttcaatc

SEQ ID NO: 242966 - DNA, 440 bp, Cannabis indica
tttagtatgtccgtttcatgtttcctattaatatatatttttctttagttaagagaaacaaagacatacaaaaaaagtcatcattaactccccaccaactgtcacaaggagtagggggtagtcatcctcattagttctccatcacaatttagtttgatagagattaataataataataataataataataataataataaaaacatgtggcactttctttcaaataaaaaaaacttatctcattattataaaaatttaagtttcatatataatttataggctaattagcattttttttatccctgaactttaatatgtaccaaatcatgtctcttggacttttttggccgttaaaaattccccctgaattattgagattgttagatttaagaacttttatctaatttcattcaattttactgtttcagtgattgtttatg

SEQ ID NO: 242967 - DNA, 536 bp, Cannabis indica
ttgataatattgttgatggtgaaaccgtggttgatggagaaattgttgggtccgtaggtcgttgggtttgtggtggtcattgggtctgtaggttgttgggtctatggttgtggtggtcgtgagaagggaccaaggttgtgggtggtgggttgtagatcgagttcttggagtgagttcaaagagcaagagagataagggagaaagagagagaaataggtatttgaaatgagaggagtagaattgtgttttatgaaatgttagtatattctaccaatataagttaacttaggtttagaaaaatagttttaatccaataaatatataaaaaatcaaatttccctaaacaatttacatcctgggatcttttcttatgtgtagatatatactcaacacacgattacttatgtgtagatatgtatactcaacacacgattacatcccggcaaagcatgctcaacggttagatgatgagctatcctattcgaggaggttccaacaccggttgcgaaaacctgcaccgtaaattcatgagtgat

SEQ ID NO: 242968 - DNA, 2397 bp, Cannabis indica
tgcgagtactattggtaataataattgagactttcgccattccaagcccttcggatcgcagtgccatcgagttctgcaagccgataagtcgcatggccaattttcttagcgataaggtatgatccttcacaattgtcaccaaaaactccatgcactgagtttttcgtgtttggcatgacttttcgcagaaccaaatcccctactcgtagagttcgctctttgacctttgaattaaattagcgagcagttcactgctgataggccgcattcttcaaatcggcatgatcgcgtttttcttctaagagatcaagttggagcaattgtttatctgcattttcattaatgttgaaaacatctcttcgtagggaccctgccctgatttcgaccggtatcatggctttgcacccataggagagtgagaagggggtttcgccagtcgtggatcggggggttgtattatatgaccatagaacttgtggaagctcttctagccatacccctttacgttcttcaagctttcccttaatggtatgcttaattattttattgactgcctccgtttttccatttctttgtggataggcaactgctgaaaatgcttttttaattcccaattcatcccacaactgacgcatttccatacaatcaaactgttttctattatctgagatcaacttgtaaggtatgccaaatctgcagatgatggaattgtacataaattctcgcaatttaatagctgtagtggtaaaggcttttacctcaacccacttggtgaagtaatcggctgcgactacggcgtacttgactctgcccttccctttgggtatttctccaattaaatccgtgccccgtactgagaaaggccagggacttgttatggagttcaattgacttggtggttggttggcatacgtggccatccgtttacatttgtcgcactttttagcaaagtttgaggcgtctactcacagtgtcggccaataatacccttgtcacattatttttaaagcaagggaattacccccgacgtggttgccggagatgccaccattcacttcgcagagtatgtagtcgcactcagccccatcgatacatttgagcaacggttggctgaaacttctgcgataaagcctgccatcataaatgacatatcgagcagctcgataccacagttttctagcctctattttatcttcagggaggatttctttttccaagtaatccattattttagtcatccatgtgaattctctgaccgtatctacctccattacttcgttccgactgaccgttggatgagttagcacatcaataagaattacatcgagtaactctgcttcccttgttgaggccagacgggccaaagcatctgcatgagagttatgagcacgaggtactccaaaaataatcactcttttgaatttctgtagcaactcgcaacttagggcgagatatctagccaaatgtcctcctctagccagatattccctgtttacctggcatacaacgatctaggaatcgctaaaggcttgtaaatactcggtcttcatttcaagagcaagtttcaatcctgcaatcaaagcctcgtactcagcttcattgttagatgtagaaaattcaaatctaagttcagcatgtacgttaaaattattggggttgtaccaccccctgagccttcgctattggaggctccgtcaacatacaaagtccatatttcattgtttggtacgtcaggatcaattttttcttctataagtgccaccctagtacttggaaactcgagtatgaaatctacaagggcctgccccttgatcacagatttaggcttgtacttgatgtcgaactggctcaactctactaaccattttaacaatctacctgaggcttctggttttgctaaaacttgcctcagagggtagttcgttaaaacttcaatactatgggcttggaaataaggtcgcaattttcttgacactatcactagcgcaaatgcaaatttttccatccgaggataacgagattcagggtccaaaagatgcttactgacgtagtacactggatactgcttaccctagtcttcgcggattagtaccgaactaatcgcgtattcagacactgtgaggtaaatggataagatttctccaggcattggtttggaaaggattgggggttgccccaaatgtaatttgagggcctgaaaaggctcttcacacttctcagtccatgaaacttcttattgccttttaaaatttgaaaaaattctttgcagttgtcagaggaacgtgatataaagcgatttgaagcagcgactttacctaagcataacatgaagtaaataaaactaggatttttgaagcagtgattagtgtcataaaagttaaaacattaatgggaaaa

SEQ ID NO: 242969 - DNA, 544 bp, Cannabis indica
tatttttagcattttaaaaaaaaattagtttaaatataccattaagaaaatgacacgtatatataatgacttaacatttaacggttaggtacctacagaattctaaaattataatttagatattattaccgccaaaaattaaacttaggtatttatttgcaactggaagttaaacttaattatttatgccgcaaattactcaaaaatctattaaagaagaacttgatacttaaatatatacatatcaaagcaatataatctttcaaagtaagagaaaaaattatcccgtaattttgttgcaaaatatccttggagaataatttgtcaatgaatagtcttttccaagtaatctaaaaaatataaaacatcaaaaaaattacaaaaaaacataataaaaacttaaaaaaataagcatacattgttaagtagtgaaaataaattaaaatcaagaattaaaacaaaattaatataacaaaaatttcaaaactatgagtggattttgttaaaaaaaatctattggaaaaaacttaatacttaatttaaa

SEQ ID NO: 242970 - DNA, 847 bp, Cannabis indica
cctgtgatagttgtacttatgtatgaacattgcaattattaattttatatttttgaagtttttttaattatattatattctaataatgttatagtttattgagccttttttttacggcataatataagggaaaatcttatttgtttatttatttatctattttaataatatgtttggtacacagttattaagttgtagtgtgttgaactgtatatatcatattaggttatataattttatttgatctgacggtataagccattaattataaatatactgtatttggtaactaacatgtaatattttttgtataacatatagttaattacttttaacgtaaattaagattttttttgtttcatttatacatgaatgaaagcactattggctttggcagcccactggtcctaattacctccttcctgattgtgatcgtacgttttggtttgtcactgtttatggcattggtatgtatgtttccttttgaaacttatgctaagttgttcattgttgaaacagcacacaacctttggatattaggttatatccaaacaacctaaaaacaccaactatatatcctatttttctttttatttgtttggtagaggtgactgcgactcatcattaacaattctgctaccataagtttttttcttttcccctcttagttaatgggtatgggatattccaagttgagtaatatacatacaaatgtacatttatatatgtatatacataattatataaaaggaggagtgggttccatgtaggatggtaacatgtaaccatcaaaacacataatttaacaatccaaaatgataagaaaacaagtttggagtactcttca

SEQ ID NO: 242971 - DNA, 739 bp, Cannabis indica
aattttttaaatatttaataatttgattcacacaaaaacatatttcatagtgtacacaccaaaaactcatatatattaaaggttaagagtaggtacaaaaccaatgttgttaccatagaattattctataattatttatatatatatattagaaaaaaattacataatagattaaaattttggaaaaatttataaaaatacatcaacaggaacaaaattttacttttactctttgaactttttatttacaaatataactctccaataaaaataataaattattttttgattgttttacagtttatttatagttgttatgagataatttttttttaattgttttatagttgatttatagttatcgtgaggttgatttctcgctgtttttagttgttctttaacttgttgctgagcaaagttatattttttttttttttttgttaaatttaaaactttacaagaatatttttgtgattaaaaactttaagctgtaaaattgtaagtaaaatataagaaatagtatttttgaaaattttcctatattttaatctttgtattaattcttatttttctaaaaaaatccaataaatattaaaaaagaaaattaaaattctttctctgaaaaattaagttcacttaaataaatcaggttcaagtttcttcatatttaccaactcatatctatattctttacgatattttttcagttacaaatataaattgatattctcaaaacata

SEQ ID NO: 242972 - DNA, 658 bp, Cannabis indica
ttactaacacgtcactttaagagtatgagagttaaaaaaaagtttgccatgaatattttttcaaaatttcatctcgaacagggggtacagtcgataaactgatgagataaaagacaagtgagggtgctcaaaggagccataactcaaaaaattccacttaacaaaggcatcttgaatggcctacatttgagactttgacaagttggtctcgtgctaaattgagtaccaaaagtgtaaggtccatgctgacaactcgctcaataaactaacaaaaatgcaagccaccattggcaacaaaattaatgttttctttaaaatcccatgttacaaagataataatcatcggaataaaataagcgcaaaaaaattatgttcaacttcaattccaaagtcaccaagatatggaataaactaagttatatatgcttaaaaagttccaaagatttgaaaaggacttgttagtcttaactaacgagtactccacaccaagtggacataagtaaacccacccatgttggcccaagtgtcaatacacaatcaagaaaaatgtatatggcaaaaggagacataaacataaatatgttctcgcaaacaaaagaaaatgcataaaaacaaccatggagagcactacccacatgccacagctcttgcatgacac

SEQ ID NO: 242973 - DNA, 926 bp, Cannabis indica
catcgtcatgatcaatatggatactcaaacatttcttagatgggggcttaattactgggcgctcttcaagttggagatgagggtcatggctgcagtactccctctcccttatttcgaaattcatattatattctctgtagtctactcccgccattgccaaagcatcaatagacatagttaattagctactttgaatttagaagttagattctaataccgattgtagctacgtacgtactcttcttcaatagagataagtcttctcagttatgaatattataactaatggtatatatgataatatatgcttgcaaggaaataatggcctgtataatgtctatttatatgcaataagattattagatacaacacatagaaactagccattttgatttatctcttataattgcaatttttaaagataagattcacggatgttgcatgcatgcaaaataatagtttagagatataaatatatacaacatgttttcggtatggtcattcataacattcattgaagaccgtcaaatattggactggtcagcccttcaaaactctgaccatttatctatacaaagaaaacttgactagtcttgatcttaattaattggtatttctaaaatctattgttcaatatgtgtaattgtaattttatatgttgatcattattagctatcttctcatgaatctctgctttacttagacatttttaagataagtactcaaagaagcctattaattttatcatatactatctcatataatatatatactagtcggaggcacacgtgctccgcacgtgtattcaacacgactttttattttgaggggtactcatttattataaaaatatgaaaaattttatttgcattccacaaattaactcaaaaaatgttattttgtcaggacatttttgtgctggcaaa

SEQ ID NO: 242974 - DNA, 1832 bp, Cannabis indica
cttagtttttttttttattattaaaagtattatctttagcagcatgaaattcctcaaaaagacaagagaattactcaacaaaatgacattttagcgcttagacaaaaaacaaagttaagtgtccaccaagggtagaatggtcattaactaatcccactaatttcccgacactactaatatctaacaatgattccccgataataaaatattacaccaaataaaatgtgactctctagtggcccaacgtcaatttccaccgttaccaagcacaatcacaggtaaacgagaaattcacatataacataattagcatatatatatatatatacttacataaatctccacaacatgcatattataaataataattaaatctcatgaataaaccctatttatttgatagaccaatatattaacataggcggtctttacagccagtatgccaactcaggatgtgccctcgtggaaagtatacgttgacggggcgtccaatgaaaatgggactggtgccagaatagcaatgatctccccggacgggttacgactccaagctgccctgcggttcacgttctcaacctctaacaacaaagccgagtatgaagccttaatagcaggattgagattggccaaggctataggagccaacagagtaaaggcttatagtgattcacaactggtggtcaaccaggtgtcaggaaaataccagacccggggagaaaagatggtcgcttacgtatcaatttttagggagtagctctaagagtgtaaggaatataaggtggagcgaatcccacgagaaaagaatgctcatgtagactgcttagccaagctagcctcagatagctgagatagaaaggctggagatggtacctatcgaacaccttgcggaacctagcattaagaccaaagaaatagtggccaccaacgaacaaaggtgagattagacggaccccatcattaagtacataacagcaagagaactgcctcaagaaaggaccatgtccagaaagttacagtaccaagctcatcggtatttaatgatcgacgatgttctttatcgaagggggctcaacatgccatacttaaggtgtgtgttggatcctgaaggtagacgaattatacaagaggtccacgagggattctgtggagaccacaccggaggcccaagcctctcaaaaaagatattaagacaaggatatttttggcccacaatgaagaaaaattgtatagactacgtctttaagtgtgatccatgctagaggtttgcaaatatcccaagggccctacccaatattactttgatgaccagtctctggccctttgcggtatgggcaatagatctcattggctccctacctatgggaaatggtggggtaaaatatgccatagtggcggtgaattattacacaaagtggacggaggtcgaacccatgaagaccataactgcctagaaagccttggactttgtcataaaaaacattatatgtcgatacgggctgcctcacaaaatagtctcagataatggaaaacaattcgactgtgatgaattcacaaatttctgcaaccaacacggagtcatcataagtttctttgcagtcgcaaggccacaaataaatagacaagcagaggttgtcaataaaatactaaaggtcaccctaaagaaaaagttgttggcctacaaaaataattggcatgaggaactgccacgtgtgttatggacctaccagaccactacaagaaccacgattggaaactccccattctcaatggtgtacgaatgtgaagccatggtcccgattgaagctataatcccatcccacagaagagccacc

SEQ ID NO: 242975 - DNA, 1006 bp, Cannabis indica
agaatggtaggcacttattagtttatttggagatgagtttgttaagagctgccattcttcctgttaaggctatgacttccttcaattttgttggtgatggcatttctatcaaagccttaattttctcaggatttgcttcaatgccccttgccttgactatacatcctagaaattttcctgaggaattcaaaggaacacttcttcgggttaagtttcatattgtacttttttagaatccaaagcactctgcgaggtcctttgtgtgatctcgtttttttatcgacttcaccaacatattgtcgacgtaaacctccatgttccttcctatcggtctcgcgaacatttcatttactagtcgttgatacgttgccccagcattttttaaaccaaaaggcatgaccttataacaataaagacccatgttggttacaaaacttgtatgttcttaatcaaggacatgcattttaatctggttatatccagaatatgcatccatgaacgacaagaatagggttagatatccacgagggatagaatgcattgcgtaaaaagtcattaaccaagaacatatccacttcatgcttaagcgccccttgtcttttggagtctaggggtcgtcttttctgcctctttgctaggtaattcggttcgatatttaggtggtgataaataattttaggaacaatccctatcatatctgaatgggcccaagcgaactgatcctggtttgccctcaaaaaacttattagttgctattttagtttttcatccaggcaacaagaaattcgactggaggacacatgtcaagataaagataatgtgaatcggtgtcatatctttctaaggaataactcattaattgtgtgagtactagagtatattttcaacctgctgcttgtaaagtcttaggcgaggaattaatgtatgaactggtacttaaggtattaacgagaaatcaaatgttgctaaaaaagaatagcgaggcaccagagaagaataacacata

SEQ ID NO: 242976 - DNA, 741 bp, Cannabis indica
ttatagaattttgggttaactcttacttgtaggaattttatgcagcccaagataagcttattatcccatctcacaacagtaatgcagaagcttccaacatctcctcaaatccttcaaatgatggtttagctcaagacaatgttcctcctcattttggaacttataaattgagtgtggacgcttcagtcaaaaataaagattgtaaaattggctttggtgatcttgatcagaattataagggggaagttgttgcaagttgtttctcttcaatttctcgtgactctcccctcttttagcagaggcagaatctctcatcaaggctctcacatgtgttcattagtttgattccctatcaacattatatctttagattgtcaagtattaattaaggacatcaagcacaagtagagtgatagaccatcactgtcagacttaattcaaaagattgattcttctctatctcacctttctaatgcttcccttagttttgtaccaaaaagtttaaatgtttttgctcataatcttactcaaagggcattatgaactgatttagaggttgtttagagcggttgtgtttcaagctctaatctttgatctttgtaacttgctcttcattgtgttatcttaatgttacaattttttttttttgaaaaaaaaaatttataaaaacgttacataaaatcgttaaggcaataattgacgaattataaagatcgtgcacagggacggagctactttagc

SEQ ID NO: 242977 - DNA, 2320 bp, Cannabis indica
aatttaaaaagtctattttctttctaactttaattaagatccgagaaagatattgtatacatagaacaaagattaggagagacataggatctccttgtctaattttccttttagcctcaaaaaagccatgcatggttccattaaaaaaaaaagactaaattttggagttcgaatgcataccatcaccaattcaatgaacttgtgggtaaaattcatggcagccatcatctcctcaataaagtcccactctaacgtgtcataagccttcctcagatctatctttatcatacaacttggtcttgcgttcttcctcccataatattttaccaaatcttggaaagctattatattgtaagcaatataccttccttatataaaaccacattgattttgagcaaaaagttctggtagcacctctcgcaatctcatacaaatcatcttggttacaactttgtaaataacattacaacatgctatcagtcagaaattactaacactttcagggtatttcactttggggatgagtgttaagttgtagactttaattcttttagcaacttgcctgaatgaagaaatgagaggactgcatattagtaatatcttttccaacaatatcctagttatcctggaaaaaatagctactaaaatcgtttggacatggtgctttacatccaggaatgctgaacaaagcttctttaacattagcttgtgtgaattcttgcaataaaaaatctctcctttgttgaagtaatttcggcccttgattgataatctgatggtgtacatgcttcctttgatccatcttagaccccatcaaagtcttgtagaagttcaggaaagcttcaggaaagcttcactcacttgatctagttcttctacccatgtttcttccatagtgcaaatagagagaactctatttttcacccttctagttcttaggctagcatgaaatactgctgtgttatcgttaccttccttcaacaattgaattttagctttctggtgaaggaaagaatagatatgcgttgtgaatctccatgtattttttcctcgcttccatctctttctggcatagagattcatttaatggatgactttgtaaagcagcctggctgtctagcatattattaaaagcttgaacatcagcagccactatatcgccaactcgagttttgttccattctctaagtgccagcttcaaacccttcagtttgcaaactagctaatacatatatataagtaccttccacatgctccttccaattttcttttaacagctccacaaagccttccatttgctgccacagttagaaaaatcgaaaaaggccaccttcacattttaaactctggatataccgttaatagatgggcaatgatcaaagagaccttccgacttaaatacaacctcattatttatttattcagccactcttaatttgccaagaccctatcaattttcgagtgaatttgagtataaatttctttcttattgctccaattgaaaaaggatcataaaaacttaacatcttcaactttacaggcttctacacactccttaaaagccgttgatttactcactttgacaggtctccccaccctttcatcgagattcaatatatcattgaaatctcccataatgagccatagatctgtattattggttgtattagaaatttagtaaacatataaaattagaaattaaactaagaaaaaagttatgtttattaaaaaaatttatatttttgaagagaaaaaaatatactcaaacttgtttttcgtaaaatttaatttttaaaaatattgacttttaatattttttatttttaaatatattttttaataaaaaataaataatttttttaattgcttaattagttttaaaattttaatttcttttttgattttcttaatcattagaaatgacatttttttttaagatttaaattaatttgtcaagatttactaaaaaatattaaatttttttaatttttattttaagggagtacgatttgatagttgtcaaagtttagaaagaaggcaaagtcgttaatttacaaagacacatcaacaatttaagtagaataatggaataaaatctaacagaaagactaaatttctttaaatgtaaaagttcaagagtatttttaacaagccgtatattttaagggataaaattaatattgtcgaaattcaaaaggtaaaattactaattattctatgtattttaataaattttaattaaactcatagcattgatcgatctattacaaaaactctatcatggggttatgactagtaattatgaatgtaatataaatct

SEQ ID NO: 242978 - DNA, 1033 bp, Cannabis indica
agaaatctgaaatgtgtgtgggctgcaagattgaaacaagcatggcagagaatctaggtgcttacttgggtgtctctttggtcaaaaatcatactaaatatctgggtatgccttcctttgtgggaaggaataaaaagcaagtttttggtaaaattagagataaggtggaagctaaacttcaaggttggaagatggcccttttctcccaagtggggaaggaaattttgatcaaagctgtgattcaagctattccttgctatataatgagttgctttagaatttcaaaaggcatttttctcaaggatatagagagtatgattgctcggttttggtggggctctacttccaataaacacaagctccattggggtaattggaagaaattgtgtagacttaaggagcaaggaggcattggctttcaggatctagaagattttaaccaagcaatgttggctaagcaaggctggaagttgataaccgaaccagcttgtttaatgactagggtgattaaagctctatattttcctcatggtacctttacggaagctagtttaggtcattacgggtctacagtgtggcgaagcattgtttggggtagggagatcttacttaaaggctctcggtggtgtgttggaaacggttgtactattcgaatcaatgaagatgcttggcttccaagaggaatccctttctctctccgatcaaaaggtatgctccctgaaggtaccactttagacaagttgattaatgatgaaggaaattggaaagtcaatgaagtttatagttggtttcataaagatgacataccttgggtgcttggtataatccccataacttcaagacccgattggctatcatagagtttgaacaatcatggtcagtattcggtggccagtggttataaaataagatttcttcacctggatcttgctgaatgttcgaacaaatctcttttaaaagcttggtggaagtttatttggagctctaaactcaccccaaaaatgaaaaatttcatttggcgtgtgttcaatca

SEQ ID NO: 242979 - DNA, 971 bp, Cannabis indica
aaaataacaacaaaaaaacaacagaaaataacatacacataacaaaaaattaacaacaaatgaacaaaatttcaacataaaagaccgtattttaagtaaataaaatcaaaaaaatcgtaaaaatatttaaaattcagtaaaaccgtatttttgttgtttttgtgcatttgtaaaattaaccctaatatatatgtatattgtattattttttaaagataacttaatatattgatttaatgattagtatatgttaaaatcttattaaattgatttttaaatttttattataatattttataataataataatataaatcattcaaactgcactgctgtgtgatatttgtaatttgaagatctcgcagtgtatttgcgttttaaaaaattacaaaaaccaaatatgtaccggtttggttttgaaaaaaattaccgtaaacacttctaatatatatgcgtacctataaaatcaacaatgatgcggccatcgcagaatcgtccggttggggatttgaaaaatccgttttgaccgtatggctcgtaatttgcttggttctcagcgatggttttgatataattattgttgccgggatcgactgtggagtctccgaaaatgaacattggactacaaaacacaccgtttcctgacacagaaagtaaaagaagaacactgatgattaatttatctaagctaaaccaataactaagtataaactttgccatttcggatgaatgctactagatagataatactaaccaaattattattatatatacatataaatagagataatttcaaataaaaaaaaacaacatacaacaaatactgaactttgaaccaacggtttatacaatgtgacggcactctattttactatattatattgtagaactactattaatagaacatggaagaaaactatattatatttaatgagaaaaaggtacgatttcggtagtcaaaaaccgactct

SEQ ID NO: 242980 - DNA, 857 bp, Cannabis indica
gggcctctacaatggatcatatattagctatctagaaacacagattaacatttaccccaagccttgattggcttgagagtcacagaggctcgctaccttcatccaaatgtgagatcgtatcgtggggcctattaattgagtcggattcttaatattctatcgtggaacattgtggaaatattctaaactcttggtattatgttggtgtagtccacatgccaaatgatcgttggtgcgtgttcctcacatggtctattggagcatgtagcatcttggattgttctgatggctgatcatgtaagtgtgttacttgaggcgaatatcaccataaatacacgtcccctcggttctatggatttgcaactacttaaagtacctttggtattcacagaccaacggattgtaagattttgtgttttctcagatataatccaaggtccttggataagagacacacgaatcaccattctccttataaatgctccgaagatagacttcttggcattttagccatttccttaaattttctagcattcagggagaaaaccttgaaaaagaagaaacttctaaacccaaaaatcgcctgatggatgctcgatctcggttctgagcttatccaaggacctgttgaagattcttgaacgcctatacccatatgctagtccactattcatcatctcggggatcccatcattaggcttttgaagcaatcttgacaagcttacgaggtacggctaagcaagttttaggcaagaacctcgctggcaattcagaaattgacaccacaagctcttaatactataagtaagtaacctttctcgtagctttttctatttttacttgttggaatatgcttc

SEQ ID NO: 242981 - DNA, 1384 bp, Cannabis indica
taacttgatactttattttcttataaaatctttactaaaattaataagtaacttttctaggcattggctagtttgagcttggcccatgccgtcactaggtggaacaaaatttcaagtactaccccttccggtggcgccgtcagtagctccgcctcctgcggcaacggcgtcgcggtggtacgcccaacagttgtctgcccagtggcagcagtatggccatgctccatggccagcagtctgagcgatggtggttacactgctattccccagacgcgagggtcattctccattatttctggtgggattgcttgttgttggaacttgttgagcattatccatctcctcgtaaggtcgctcttgagatcttcgggttaacaccatttttttttttttgtgaaaaacttcaagattttggctaaagctctcaatgaaagcactaaaatatttattggatttttagccaactgacgcggagtcgtaataaatgatagtttaaactaaaatcacaataataaatgcagttaataacactgaaatttgtaataaatataaataaaagacaccagaatttaaagaggtttggccccagatgtcagtaatagcctactccccttgtgttttattgatctgagttacaaaagtcaagaatgggctcttgattgcaaagaatgataagtgtttatttttctaagtgttcaagaatgcggatcccccttccaggtcattcgcttcaggagacgtgacccacgcggagccacctcaatcgtcgccttgaatttcggtggtagtgtaagtctgatttttatgataatatcctgctattttagtgggttgaaaattatctttgagtctttcgtgggatttgaacgttggaaggagctactgacgatgagggtcccttatgggtgtaacatggtcgtcaccacctttggggatgaagcccatacttgggggcaacacccccgggaccctcgttgagggggcgacaaccatcatcgtcaggtcccctccgggacccaacttgacgagggtgacaaccgtcatcgtcgggtgacccctccgggacccaacttgaggagggtgacaaccgtcatcgtcgggtcacccctccaggacccaacttgaggagggtgacaaccgtcatcgtcgggtcaccccctccaggacccaacttgaggagggtgacaaccgtcatcgttgggtgacccccccgggacccaacttgaggcaggtgacaaccgtcatcgttgggtgatccctcaggtaccaacttgagggggtgtcaataccgtcatcattgggtgacccccgggacctaacttgagggggtgacaatcgtcatctcggagtgacccctcaagacccattgcctgttgtcagtaat

SEQ ID NO: 242982 - DNA, 777 bp, Cannabis indica
agtacatcgcgggacaaaatcgtgtccctatatatatacacatactacaaaaaatcttacaactcattataaattatcatttctgtgttgtgattaaaaagtatgtagctaaaaatattagtcacaaaaattacaatattattatgactaaatatatttttagttacaatacgtgactaaaattaaattagtgacaacttgtaattaaatattatgttttagtcacaaataactttttgttgtgactaaaatttatatttagtcaaaaaaaaaaattatattatgactttaaaattctcactaaaaataactatttttttatagtaacacacatctacactaatttctatttatgaaatattgctaagagtaatgttgttagacacatttgtaaatagttagttatatttcgaaattttaatgtagttattaaattaaattatatataaaatttaatatttaatcataaagtaataataatatcatttttaaatggtgtgttaagtattattgatgcattttaatattatttttctattgctaattattttagaagacgcgtcactttatagtagtactagagatttaatttattagagtataggggtggatatagagcagaattaagtaattaagattttttttttgttaaaaaattagtgtcttatacggtgttaaattgatttaagtttgacttgttaattaatttttttatttattcaaaaattaaatctttaattgagtcaattagcatatttaatataaattaagttagtt

SEQ ID NO: 242983 - DNA, 1067 bp, Cannabis indica
atttatccattaaaattaatttacagttatatttcgcaatcaaaaaaaaaaaaaaaatttacagttatatttgattaatatataataaaaaaaagaagataattctcgtcaaaaaaaaatttacatttttgtgtaaactttccattattaattttagcagaaaagataaataaagatttctcaaaaataaattggtaccaggccccgctgtgcatagggctcaccaaatctattgacttatttttgcaaaaatatacaattttgttagtgtactctgaaattatcatatttcctttgatgaatggtcacaaaagaaacaatttttttttcaatgagttggcacaacacagtttatatttttacagactttttaaaatacaagtcgagctagattgacaaaccataaacatcaagctttccattccattagaaaaaataattatactttattccaagactaaatatcgtatatatgcttaaattctaacaaaaaataaaaataaaaaaaaaatccctatgttaccaatataaatatgtacgataaaatattatatgagaaagttagacaaaatattatttattaatgatgagcacttatatgtgaaaattgtgttccattcattaaacaatttgattactatacttttttttttgaaagaactaaaagttcattgattaaggaaaatagatgggaatcactgggggattactctccccttgatacaaaaaagccgactcgctagcaattctagcatttttggctgcaccatccgctactacattaagactacggtttaatataaaagaaatgacaattcaggaattttcttgacaagtttataattgagtaaaaaacatttagcaaacttccaatcagggcatccccctgaattagaaagagctttgatagcagtgcttgaatcagagaggaggtgaacttcttgccatcccaattcagcagctcgggacagagcaagggagatggcctgaaattctgcttctaaagccgaaagtgccttaattttctgggattgaattgaccaacttccattgtgagaatcaacaca

SEQ ID NO: 242984 - DNA, 954 bp, Cannabis indica
taaattggatgaaaaaatggtgtaagtatattttgcatcatgcaaaatatgctagcatattttaagtggataaattaattttaagcatataatatcaaatttcccattagaaatagttaataaatattattaattaactattttaatagtcggtaatataacaagtaatggttcccatgtgcatcctatcgtatttttcagaatcctatatccccacatcaggaaaataaagcttcaaaggtttttgatgcaaattgaaagatcataccctttttacaaacgatttaatggactccaatacgcttccgctaatctatattctattatttgattctcttgaattaattagggctaaattcagatttacagtgttcttaacatgtagtatcagaacatccctaaattaattcttaaggatatatagtattcttggtcttccagtaaattattattgtatttaatatttgctgaatatatatattttattgattatcgttcatacatatatacatattgaaagagatttgtggtagtttatatgtatatgagattcaattaaagtttttatatatatttttctgcgactgaacatatataaatcagttattttttcaaaaaaaaaacgtctactatatgcgattctgtacatatatttataagcctatgccatttataatatataggttaatgattttatacatatataataacaaaatatcatcgaaggaaatcatcatttcacttctatttcttagatagaagttatagattccatatctatgtttagcgctcccactcaattgcactaccatcttcccaaaatgtacgtatcaccctgaccaaaaagtaggcttaactaacaaatcaaagaaaatgtataatacccttgagatctaacctaaccatatcaggattaagatcatttgatctaggattaactaggtgatattgaat

SEQ ID NO: 242985 - DNA, 812 bp, Cannabis indica
tccgttttgctctgcacacctccgtccaaatatcacagttaagtgccacagtggactgtccacgtgtacgcactttgtatacgtggaaaatttttagtggtccacgtaattttaattttaaaaaataattataaatatttaaaaaaaattataaaaattaaaaaatatatttttttttctctttctctttctctttcttgcttctgtcctggctcgcgttcttcctttttctcaagtttatgaagccgggcaataatggaaatagcctttggtttaagctcaaatggtgggttagcagattggatatttcctttgccaccaggcattggctggtaagttctcaacttcacctttcttctctcttttcttctgtgtatttgtatttgtattttttttttttttggtaatttttagaaacctttagaccagctacaaacaatcgactccactccggtgacaactacaaacggaaaaggaaacatcttgattcattaacgaaatctacttccgaccatggaaataaaacgggttattatacggaaaacaggacgacctcgacgccattaaagtctatacatggtcttgctggacgattaaaggtgaagagacatcggaagagactagctcagacagtgatggagacgagagaaacagagaaccagtaagcggtactgggcctagtcggaatgggggttgcttgttacaattgacgatgaccagtcgccggggcttgagctgttgaggattgtgcgtggagcctagtcggatggaggtaagttttggttgtgtgtggagcctggtggtgaagcttc

SEQ ID NO: 242986 - DNA, 952 bp, Cannabis indica
attgatttttaatatatatatatatatattatttttttattgtttggatgattattttttatttcatgtagttttcttattgttttgttgttatttttatgaatgtcgtaaaaatatatatataaaaattaatttataaaagtgtaaaaaatttgccaaaaataataatttatgtaaatttttaatcattttacattaaatagtaaaacgaaatgacttattccatgttagttgatcaatcgactaataattgtacatggattagttcgacaacataatatgcataaaaaaatttatgttgtaccaaaattttatttttactgaatttattcattgctacaaaataaaaaaaaaagtaaaaactgacgtttggtatcacttttgttgttttatttttaagtcataaaataaaagtaaaatttttgtttttaaaattttgtttttgaaaaataaaaatgtgttctgtaacaacttttgtttttcaatttaaaaaacaggaaacaaaagtgtgttctgtaaagttcattgttattttaatttttgattttatttaagccgggtccagatctgggattgtgctcgggtcagaggtcaggttcaacgccaggaccgtggggagggatttggggtcctggtctggtcggagtctaaatattgattaagaaaaaaaaaattattaaaaaaaatattgaaaatgattttttttattttcaaaattttgattctcaattaaaaaattaaaaaatgaaaatagttttatagaatatatttttgaaaaatatttttatttttttaatattaaaaacaaaaaattaattaaaaaagtattaccaaaggccacatatataggggtaagttgaaaaataccacttttattaattaattaatcaaatttacctctattttatatttaattgaaacatgcctctttttatatgtattgtacccaaaa

SEQ ID NO: 242987 - DNA, 572 bp, Cannabis indica
tatggtgatgaccatatgtctacagagcaaaaattatatatgttcttggtaaaatgctaaaagcttagattactctttaaggggggagtatgtggtgttagctctttaccacccctggcaccttggtgctaagtgagctactactagtcagtgacactagtaggtgggcatatgcggaccacgaggggactcctacatgcctccatgagttatggacactatcaggctaacctggtagtgcgtcaaaaatgctgctagaggttatagcaggtacgtttctattggcaaactgatatgtcgcttgcatggggcgtggcctaaacctctaagagatgttattgtgcaccttagccacgagtcttaacatgagatgacacgggtagtcattcatggactattttacatatatgcatgagactgatgtgcatactggaaagagatagaggtttaatggctactagtttggtagcttgtctcgagggcctgccaacatgcgtggaggcatagtgccttgaggattggaccatggatgtatgtgattccttgagcgatgaggaagatagttcgaacaa

SEQ ID NO: 242988 - DNA, 800 bp, Cannabis indica
  modified_base (763)..(763): a, c, t, g, unknown or other
taaattgtatatatatttttttcagatggacgactgccccacttcgattatatgtgggtcgcccctgtatatataactatatataatgtaaaatttctataagtgtgctagctttatatgattttccataactagtgataaattttactaataactagctttattgtacatataaattaacattcaacaacacatcaaactaaagtctaatcaaaattcagaagaaccattgaactatataaccagtagctacagctatgtttcacgttcatacacagtaaagacaaattatatcacatggaccgatggacgtgtttgcattaaagtgtggttgaaataaacttgttaactacctttggctttttactctcactacaatacataaattaaataaattacttaattttttattttttataatggttcctgatttgatgatggtatcgtagaagataatacaccgacatatggtgcggtcaccaatacacatgcactcttctcataccatataccaaatccctatatagctaatatatattgccatcacctttcctcatcatctcccatctctttctctccctttctctttcttttctctctaatcaaagtagtgactagtagcaatggccaattccattgttacactaaatctcactcctaatatttttccattattctacttcttctaagccattcaaacatgcacagatcaagccacgtccacaaccactactaccagaaaggcctcagttgtgtcaaaggngcaaagtgcatgcacgatgtgcgacgcgtgtgaaaaa

SEQ ID NO: 242989 - DNA, 1068 bp, Cannabis indica
caaaactgtgcgtgtcaaatatatagagtatttttttcctttggaaagatgcctttttaggaattagctaggaaagcagcctttttcagaagataatgctgtttttggtatgaagaaagcatctagacaagtttttaccaactatatttattttctgatactgttttgtttataaacttagatgcgttgaactcttttttgtttttttgttgatgaaagctgaactatatcaatattttcagataattgcaaattgaaaacatcaaacatatgtatagatatattataggcatcttttttaatcagaatatcacaaacaatgttaactgggaaacctgaaaaccaaacattgtagttgtatgaatgaaaaataataatatacagtatattactgaaaaccaatgatagattgttgaatgttaaattccacttggctgccaaaaattgttggaagagtaagtagctgcactggaggggactggaaactgtagacatgcttgaagatgatctccattataatatccaaaatcagagtaatgcaactgctgacaaaataattagtgttagttaattatgatatttgaataaaattaacaaataattaataaatgtaaattgacaaaccttagaagaatgtaccaaatcattattgatttcataacattgaccaaaaggaatttttgatctatcataaatttcttgaatttcttcatagttgagtggtacataagtttgaggcattggcggagggggcggcagtgttaataatggtggaagagaactgaaataatcatcttcaaactgatgatcatgattattctggattagggtttgtaaaattgcttggtcttttcctttaaccatgtcaatcttctcgtccaaaactttaatcttagccttcaaacattgtgccatatccatcaaagaattttttgacaaaaccgctaatttttcatcccaattcaaagatagtgatgaatccccattaagagtagaagtagtagtaatagtacaactaactttttcctcaagttttctcaactttttctccaacacattagagagaca

SEQ ID NO: 242990 - DNA, 973 bp, Cannabis indica
tatatatatatatattctttaatgatgcaaactttccatgcgcacacttataacacttcttcaaagtcatatatctttctcaaaatgtcgaaagtggcgcctcaaaacctcaaaaagtatgtttgcatcacaaataataaattgatttctttaaagttttttttttgaataatgaataatttttccctctaaactttcgataatactgttttgtccctttaaatatacttgttaaaaattatccttaaacttttacattttcagaaagagtaaattgtggcataaccctcagaagtgtagataatagtaactaaccaccaattctcaaattttgaaggtaaaaccacctaaaccccaaaattgttagcaaaaacactcctctgtctaacaaaccctgttttgtgcttatgtggctgggagcccaatcgccaggtagatttgcaaatgccaagtcacaaaaatgccaatcacgtggcattatgcatttaaagatttggaaaaataatttgaataaaaaattagaattaactaataatgtttttagaaatataacttatgaattaaaatttaaaacaaaagaattaaaatttagaacaaaagaattaaatggaaggttaatgaaatttaaaatagaagaagaaatgggtaagtgaaattagaaatcctttatgaaaagaaattcccaaaacgcaaaagctaaaacaaactaacctaaagacaaagacgcgataaggaaacccaaactagtaagacacgatcgaagagtaggcaaacctaaactagtgtaagaacccaaaatctattttcataaaatcgaaggaaatccgaaaacatccattggaaatcgaagaacaaaaaaaaggaaaccagatgtcgttgatgaaatggcctttcttcaccgaaatgagaaggatgctcctctagactacagtaagtgttggattttattgttctagtgttttttagggttttg

SEQ ID NO: 242991 - DNA, 1014 bp, Cannabis indica
accaccacctctagacattttaaaccagatagccaacccacgcttcggtataaattttgaccaaaccttagctaggtaagtacccctatcattgcccctcaatattaaataatgtgtgaatgaattcaaattccagttcacaacacgtccttgattaactcggaccacatatttaagttcaacctcattgtcctgaacatcatcaaacaatattaattacatcatatgtatcattcataaagtagccaaacatgtgtgtatacatcatatttacaacaaaaacttttccaatactatcaattgactcttgtaaattgaaatatatattacgaacgtaccattctcttgctatgctctttcattacaaatattgccattgctagaaatggacgaggtgcaaatggagttccatactccgcaggaaaaaatccctatatcatgaatttaaacaagaaaagatgacacataacattaaatatatatctattctatataaagtgtgcctatataactgaattcttggtttatgagaaatttatggggtgactttttatttatatttaataaaataataaaatattatttatatataataaaataataaaataaaaataaaacaaatctcatttaaactgatatttgatatttggactgctattatttatatatatacaatattatattatttaaaccataaatttattatcctattttgaatttaattaaaaccaacaaaatatatatacctactcttgtacgttctcattttttctaacttttttttattaaagttaattattttaaataaataaaaattcataataaaaatttaatttctaaattttttctattactatactattttaaatttaattaacaacaataaaatatatgtacgtatatttttcatttttttaatataaattttctatatacatatatatttatacaaaaaaaaaatagagataaaaaatagtagtgaagagatccaaaaaatttcacataagcttcaaa

SEQ ID NO: 242992 - DNA, 517 bp, Cannabis indica
ttttattttgtctaacatattatattttacatttttgctcacatactcggatcctagacccgaaccaaacccgaacccggacccaaatgggttcatatcatggtatggtgttaaagtgttgattttttttagtaagaaaaaaatctaaaaatagttttaaaaaacttgtgccaaacaccattaaatttttaaaatgacaaaaaactattttctattctcacttttgaagacataattttaaaaactaaaagtttaaaacacaaccaaacagacttaattttctcctttgttgtttgcctttgccttatatttacattctacaatttgaaaaccaattattacaacataaaagagtgaaagaaagtaccttcttccaaataatcaatcaggcaaaataacatttacaaatcttcattttttttccattcacaatggttaattgtggtcggtttattcagttaataaaattaagaaaaactataaatatatataagtctcactattaagaccaatcttt

SEQ ID NO: 242993 - DNA, 917 bp, Cannabis indica
agagagagagattgtcatgtaagggggtgtgactaagttaaatatgtatttttatatgaaggattttattatttgatgtgcgggcgttatattattgggatttttttttttgcttagcccgattttaaaccgatgctaattcttagcgtttgttataaatcgatgctaattcttagcgtttgttataaatcggtgctaattcttagcgtttgttataaatcgatgctaattcttaccgtttgttataaaccgacgccaatgaatgtttatcagcgccagttttacaccaaaactcaaatttaatagcatcgattcttaaaaaaattggcattttgactgacgagaacacttttttttttttatatagtagtagtgacatgatatccagagttatgaaaagggtatttttcatgttgagcaattctttcatgtttagcattgttggacgggtgaaaatgggacccacaataagaacttctttcatgtccaccaaaactaacattaaaccatttatttttattataaaatagtgtttcatatccctttttttaaaaaaaaaatttaaaataataatataaaataatttatttacatattatttatataaaaattacagccaaaatcaaattatatataaaaattaaatgaatgtaaaatagttataattttactaatactttattattattagcaaataatatacacattacagatagttaaaaaaaaaaaaaaaactaaaaataacaatctcaactcagccaatctaaaatcttaaacaataaatactcactcccaccttaaataccaacaagataataataattaattgcagtagtcatttaacaccaaacataagataaactatattatcctaaaactaaatactaaggtgccgtttggtaacacttttgttttct

SEQ ID NO: 242994 - DNA, 515 bp, Cannabis indica
cagtcatgactaagcccccatttggcaaggaaatgggcggctttgttagactctctaggtatccaataagaaacaacatcataagaggaatacaacctcatgacactaccaaacagagaccaaagcttccaatggggcgatgtagaagaagacatggccgacactagaacttgacaatctgaaagaatgtccgccgccgtagccccgagatgcggccccacctttaggccccaggacatcgccaagagctcaccgtggatcggagaagaagcatgaactttggaagcaaacagagcaagtatcgaaccactctcgtcacgagccaccactcccacagcatcgatgttatctttagtggcgaagtccacattaatccgtattcgtcccggccgaggaagagtccatctgggcacgacagtggctctttcctccccaccagcatcaggtctcaccagcactttccaaaaccccacaaagtgattctcaatccgcttcttcatctcagtcaatgtcca

SEQ ID NO: 242995 - DNA, 994 bp, Cannabis indica
gtctctggacaacctgggatcacagctccatggatacctctacctggaataatcatgtatatatttattgacattagtaatataattataatatgtatgataatatatatatatatgaatatgataatttgaatgattgggttgccttgaatgacgtagaacatcatgggtgcgtttaagaaagaaggcaacaaaaggcctctgcgctgaatggtgtggcgagcagtctcaacaccagcgcagtgaagctcatcgtcctctgtgttttggatgtcccaatactcactcacaccggcctcgcattccactcttcggttgggttggcgggcgttgaggcgttggaattggcactgagattgccacctgtgctgctgcctctgctgcccgcctcgctggcttcgttgcggcatttgctctatttgagcaaagcaagcgtgggagagaagaagggagaagagggtgaaacatagcaacgaagtagaagaccttgccattgctattattaatgccttttaattgattgatcttgttgtggtgagatgagagactgtggtagtgatgaatggggttttatagaataggaaatgggatttgggatattggacgtggcgatgtgttgatgagaaaattgatgacatttttgttgtgttttgtgcatggtttttttttgtagtatatgcatggccttaaggctctttattgcttaacacataatgctttttgttgttgtatgtgtctatgttgttctgatgagtgttgcataagtgtatttatttgttaggattgtgtttttgatgtgtcgaatgtgtatgcgttatgatgatgagttgccactatgagaatctagtttaagatcgaataaagggtgattgataaatacagctaaaaaaaaatattacataaattactatttttgataaatatatatatatttttacgttctaattagttttgttttctttttatttttattatatatattaaaagtgtctat

SEQ ID NO: 242996 - DNA, 1729 bp, Cannabis indica
aatgaatccaactcagaattagtttaggcgtaattgtattttttttttcttcttggcattgaaaagggcttcaataactaattgtgccattaaaaatgtgatacaaaatacacacagtcagtctgtaaaatatatatatatatatatacatatatatatgtacgagattgcagcaagtgtgcagtttgaacttgttactccaacactcaaaccgtaattttgcagtgagaagtggacagtatgagcctttttaaaaaatttagactaatgtatacttaaaatataaataaaatagttcaatctattaattaatcaaaagtactggctcacaaattcaaatctaatcacaatgaaaaactatattctatgataagatttagaaatattaactaaaacagaacaagccttttacttaaataacttgaaacaccactaaataaattcttacataaggcttaagagagaaaacaagagtttaaaggagtaaatgtaattaagcttcgagctcgagataaaattgaaaaactgtagagaataatgacataaatacatatatgtggggttcagtacagactacagtctagcgatctaatcaaaattgttgttgaaattttagaaatatggttcaaatacagaatagtacagcacaatttgacaaaaatacaatcaataccaacccgaaatagagtggttccgacaatttataggggttggaggtctttttgaacaatgctggtccaaacatttttatgaaatcaaaatagataaagattgccctaagttcagtcctaataccaaccattgataacatctaatatttcagtccatcagtattcagtagcactttaattttaaaagtaatcattttactttccccacatttctttcaattactcaaaattcagaaacttcaattcaattaatactaacaaaataaattattgctttgtcagagagatagagagagagaaagagagagactttacagatggaattggcaggaagtggcatcctggcaagtaagaaatgacggagaatttggttatgatgtaaaaccctagcttgcccaaatcatgcacttaattctacacctaaggctccattgatttcaattgcaatacccctgaagaggaaagatggtgttggaactcgtacaccattaccacctccaacggcctccattttcttcctctgatcgtaatcactacactgcactgtcgactgtccgggtagtgttcgtgtgttttacttcttaaaacggtgcgttttgactgaggaagaccatgtatcttgttgggcctaagttgggccgtatataaaattggacccactaaactgcgctcattagtaagacatattttcataaataccaaacaaaattacaaaaatatgttgtacagaaatttcaatattatttacagtttgtaagtttttatttaaaaaaatacggactattgatgtttttatgttatttttgtattgtaatcttttaattttttattttttttttgttatttatatgtagttttgatgctatttttcatgtggttttttttgttatttttataagatattaaaaaattataattaaaaaaataaaaaaaccacaaaattgatttttttttttgattgcttgtaaaaatttaaaaataaaataaattatttgatcgtaaaagtgataaaattttaccaaattattttttattttatttttgccctttaaattata

SEQ ID NO: 242997 - DNA, 921 bp, Cannabis indica
tgttaacaaaatactcagtttttaactttattttctattattatgaaaattttaagagttttttcaaaaatactcaataaaagcttataatttgactgttatacagaattttttacaaaatgctgtttttttttataaaacaaccgtaaaacaacaaaacagaacaattaaaacaacagtgaaataactaaaaaacaactgtagaataacagtaaaaacttaacacagtacacagtataaaaattcaaatactgtgtattttttgaaaaaaattcaacccacattgaaaaataaaaaagttagaaatttcagtatttatgtaaaaattcaaaattttataatatttattaaaaacctaattagatatactatttatttattttggtattctgaaaagttttttaatttattttattttttataattaggtaacaatatagttattttatgtatgtcgttggttgaaccgataggggctctggcaaaagataccccacggcctcgtaagccctcgaggcaaggcgaaaaggatctgttgagaacgaaatagtgtttgtgtccaaagggccgctggcggcctaaaatcaaaggcgcttttaaatatttactagtggcgtctcacgtgcttcgcacgtgtggggctcttaaaattatttaagtacaactattttgaaaaataattagtattgtatctccaaaacttataacactaccaaattgtatcctctaaaatgtacatcataatgataaagttttgtgaactattctatttacaaaaatatagtacttttgttagctttgattcttttttatcatttcacaattgatgtgtcgttgtaaattaattaattttcacatgaacatagacaattactaaattatgcattttttttttaaaaaaaagaaattaattaaatattt

SEQ ID NO: 242998 - DNA, 674 bp, Cannabis indica
attaaaaatatactaaacttaatctaaaattactactaaaaataacctaacacccatagctcagtttggtacttctatgacatacaagattgtgaatgaggtctttagtcctattttggaccaagataagaagaattccagaacaaaatttatgcctgagcagcagaacccatgtgaaccaggttgaatgtcaacatgggtgttggttctttgttttggcccccaaatgatcctatttgcttctcgagaatacttatatcgttattattaatgaaaatagaaaaaattcgcaggagacttcccgggaaaaattcttggaagtagcctaggttgaccaaatgtcaacgtgggcagtggaaccctagccctagttcatcatgggcactggatcttcaatctggccaccagatggttccatttgtttcttgaaagcacctgtatcttaattgttgatgaaaatagagaatattcctggaagacttcattagaattgttgttggaaatggccctcaaaaaaaaaaaggtcaacttggccactagaatcctagcccaggtcaacctaggtgttgggcattctttttggcgtccatgttgatctgtttgttccccaaaagaacttttttcctcattttggatgaagagaatgaaatctcccgagaaacatcttcagattc

SEQ ID NO: 242999 - DNA, 965 bp, Cannabis indica
gttaatttatataacaatcgaatcctaagaaaattaacactagtgaagatccaatgaacaactcaaaactccaagacacgcctctgaaaaaagaatatggagaagaaaagaaaacttaggcagaaggataacaacaaccccaccgaaatcgaaaaatagtatgagaaataacaagacccgaccaagccacgtcgtaaggttaagaaacagccaacgagccttgtcatgacaaaaaaaaaaaaaaaaaaactcaaacagctactaagaacttttaaagaaaaacccttgagagcgctaaaatcttttttaaggataatttgttaagtattcttaatttgccatagtcattcaataattaataataataataataataattatattacaatgtaccatatgtgtataaattttacacaaatctccattccacgagtcgatatataaaatagatcaaattcgattctcataatgttcaaagttcagaaatctataaaactatatatacttttgttaagaatgttttctgaaaaaattacgaatatgttacaaaggataaagagcattatgaagcatattatattgattgggttttttcatcaataaaattgaagtacatcaagaacaaattgcaaaacaaaatttatgcaaatatatattttatatatataatcgaatgatggtatatagcaccggcttccacatggagcagatttttagcatttcgaaaccttaaaaatgaaagtagtatacatattaattgttgaaaagaagccatatgcaagttagggaaaaagacaaattaattaaattggcatgatatgagccgaaagctcacatatatattttttaattaattaataatctacatatttatggataaatatggttacctaccaaacatatatatatatatatatatatatatattttgactaatctaccaacatatttagttatattaaatt

SEQ ID NO: 243000 - DNA, 996 bp, Cannabis indica
actctcaagtctcaacaccaacaatataatttatataagatgatacaattattatttatttgttatctcatgcacgtatgtagaaggtgaaaaaattcttatttaattattatatttttcttttagcttttcaacattattaatgaatgttgttgtgcattattaatgtatattattttagtaattgattacaacatataattgcttaacccaataatttattttctttctcattcaataatttcagttcgaatttattcctcccaacaaattttgatatgggtctatctaatacatattgccaaagagacttaatatgcccttatgaattaagcttattatgagattagagtatttgattatgggttcaatttcaaccattcagtcgtttcttataccattcatcttagtatgtattgattttatatttaatattttttaataagttaatcgattatattcatagaaatatgaaaattagttaaccaaaagaagaatttgaatgaattggctatttaaatatatatgttgatgctaattttcttattttactttaagcttttctgtttaaaaaaatttgtatgcagattgaataactattaccatctcatggaagaattaatatcttttcaaaatttgtatgcagattgaataactattttttatttttttttcttaatcagcctctttaattaattattaaaacaaaaaatatctacaattaacattttttcgagagttatcaaaattacggatattcatatatttttcttcacctttttaattaatttttaaaatcatatttttaaattaatttataaaaaaaaacatctatattaataaatatctataacaacaaaacataaaactactaatcccaccaaacattatttttctaatttttctatttagattagttttatataataattaataaactaatataaataataattagttaactaaccgtaactagaatccctcggtctatcaagt

SEQ ID NO: 243001 - DNA, 663 bp, Cannabis indica
taagacttatactattttgctttccccacatcattttgtcatctttttttctctgcattatcagtataaacaaccagcccacttaatggatgacttaacaaactccctttccattgcccttaatctcacagacactgagtgtaccatccaaacactccatgatccctcccctaccaatgttcctgagaatgaggtccagcccgttcccctctatctggttatcaaagttcatacggttaaatcctttaatcgtaggaattttattgagaaaatgactagggattggaaccacatctctcgaagtcccgtgaccattactgaccgttccaatggactctttttggttgagtttagttgtgatggagataggcgccgggttttgctgcaacaaccctggacttatcttattcaagctatcctaatggacattccaaactccttggatgttctcaatggtgatagtcttctcaaaatcccgctttgggttcaagtgttcaacaccccgttccttaaacgctccgaagagttagccgtcctggtctcttcctctctcgatcatctcttagagatctaccggccatcttttcgcgaaacttgggggccctattttcgacttagggtcatgtttgaggtcgctcggcctctccctcgaggtataccagt

SEQ ID NO: 243002 - DNA, 719 bp, Cannabis indica
ggtaattgttaagttcgatctgaattgtgaaccagaaaataataaaacatgtcttgaagttggtggaaatattcaaggcatctatgatcttggaccaaatagatttggttctgaggctgtatacgtacccaaagttaaaggactcgattctgatgaagaagaagatgatggctacttaatattctttgttcatgacgagaatttcgagtataatattaattcatctttttcacatgaaaggacattccgagctaggtgacactacatatgagtagtcagaggcttacaaaaggctgctgtaaggacttctgactactcctatggtgtcagattgatcggactgtcatttcgcatttttgtttttgtatagtaatttattacattatttatatatgaccctaatagagttgatgatttcttttgtagaaaatcaatggtgcatgttattgatgcaaaaacaatgtcaggagatccaattgctgtaattgatttgccttgtagagttccatatggtttccatgccttgtttatctctgaggtcagtaattaataactaatcttactatcattaattatgatcttttgttcttttcattaatttcaaagttaaactaatcttaaaattaatatattgtgttcttttgatcaggaacaactacaagaacaagcggagttctaagttctaaagttgtctttaaagtggggcgaatcgagttgta

SEQ ID NO: 243003 - DNA, 792 bp, Cannabis indica
tttacaaaattaatattttatgtaattattatccctatataattttgagacatgcgataagattaagctagacatatgttatttaggtttttttctttcaaaaacaaaaacactaatttttatgttaccaaacacactttcaatgcttatataaatatattttcacatcgacactttaataatattaattttactttcaaaagaaaatattaattttaaattaaggatatgctatttctttgcatgtttaattaatgtgaagaattagtatgtattgttgaatgattctgcacgcgataggcttaatatatgaatataattttctatatatgtatatatattatatagtatctaacatgatgaagttcatagtgttttacatttgcatgaacgtgtagatcattatagattttatgaacgtgtatatataaaagaaagagttcttcacctaatcttatcaaatgattctcatgaaagtttacactaaagattttatgaaaatcgtatatatgttttcctaatcacaattatttttttaatttataaatatatatcagtttaatttcaatgtttattatttagttatgtatattataatgcattattaacttattaaaaacgttatagattcttttgaactatatgtatatatatcatcgcatatgttatgttggtgtgttgcacaatttgttgtagcctattaaactatgtgtcttccactaaaacaattagttatatatgctttccatgacaccatttcacacaacaatcaagattttctgttaaaagatt

SEQ ID NO: 243004 - DNA, 571 bp, Cannabis indica
cagtgactggcctactgtcctgagaagcaacaaacaaattattagaggacagaaaacagtgatagtcattcaaataagatggcttggtgatgttcctaacaggtctgcggggaggaagagatgaagcagcagtgagaattggttcagacctatcttgatgaatggaatcagtagcagtaggaggagaagagtgagatggaaattcatgatcaatagaagactagggcaaggaaagaagctttgatactcaagaggcaaactgctagagtcaaacaaaagggaaaatagtctcatgaaaaacaacatccctagaatggaaaattctattggtatttagatctaaaagtttataagctttcataccaataggataccccaaaaatatgcaaggaacaaccctaggtgagaacttagacctagaagtaataagtgttaaagcataggcaagacaaccaaaagttctcaaatgatcatatgctggtttttttattttaaggacttcaaaaggggttttaaacttgagatttggtgcagggattcgattaattaggtaggcagcagtccctacaca

SEQ ID NO: 243005 - DNA, 890 bp, Cannabis indica
tatgtttcaaaaagttgagttttagtatactaaattgttattattaaaattaaaaaaatatttgtaaataaaataggaaggaatggaaggtgtgtaattttgattgtcatatgcattttttttttcaagtctacaagtagacaacaacactagcctatgtatactaaatgaaagaccccaaaaggaggggttatttcccaaatttcccattagaaatggggcataagaggatttgtgatgtgctgacatttaaagtaagtgtgatatgaacatttttttaaacaaaaataaaataaaaatgaagtgatggaaaccgatgtaacactaacttaacatgttagtcatgagtcataacttagtaacgtaagtagctagaattgaattaatgcttattaacctttgttattatcacttattagtagtagttgttgtggtctctaacgatttcaagagaatttgttatcgataagttttattcactaatagctaatacctagcttgtatggtcactagagcttacttcaaatcccaatctcatcaatgaaacatcaaatccaagaattgaaagtgtactattcttggtaagtgggacttagacaacgtgtaacatgtcccatgctgtaaacttaggtaattaactacttaagattagtagactctcttattagtgtattaaaatttgcaaccaaatttaatttttggaatttattaaaaaaaaattaaattaaaatttagatcttacacatgtctaatttagagcaatataattttattagtattaggtaatttactcactaaatctttacttttggcacttaaaatttaagaaatggtgtccttaattttagtagataatctatcaaattaaaaaaaaaaaaaaaaaaaagaat

SEQ ID NO: 243006 - DNA, 966 bp, Cannabis indica
aacattattttttatattgtaaattattccgaatcaaaattttataggatattgataaaggcttaaatttatacattttaagcttttaattatggagataaaatttatataaattaaatattttttaagttttaatgttaaatttattttaattgaaaatatttaatttattctaatttttatgttattttttcagatttagagtataaataataaaagtgtaagtagtttataagaagaagtgagcaagacaaatgaaagcccaaaagtaatggcctaattttcatctctttacaattcttaatcaatacattttgattaggaaaacttacaaaaatactggaattttggttaacttatacaaaaatgttgtcacatagaatcttttcaaaaatactgtatttttataaaacaccactaaaatacaaagcagaacaactcaaaacaacagtagaacaccagtaaaatatgacacttttataaaaaatccaagataaccctcaacataacacacaacccaactctctctcttcctctatctctctagcttctctctcaacccaaccgaaccctccaaccccctcaccacatcgtacgagccgaccccagcccccctcatccccactccgaccacgagacgaccccctcctccgaccgagacgactccgacggagacccacggctccgatccgatcgagacgactcccacggacacccactaaccgaacaacaatgtccaaggttattttttttttattttttttgtaagaaagtgttaaagattgagtttgtttgtgattgtgttagtgaaacttaagattttgttagattgtgtttgtgaaagtgttagattttgttaaattatctcggatctatgaaaatttttgcttgaggaagaagaatacccgatgggtccgatacatgtccgatttgggttcgatggtcccaaaaatcggttttgaaata

SEQ ID NO: 243007 - DNA, 561 bp, Cannabis indica
tttcaaataaaaaagattttgacaaaactaatatggatatagcataatctttaagcaatttgtttctgattctaaaaaaatatgaaaaagaaattacttatttttttatgtggcaaaagacaatataaataataaataatctaaaagggtcattttgctacaagttttgaaatgagaacatttaataatataatcctatgatttggagccatttactataatttcaattacttaattaataagaatatatttcccattttataaacgatactctaatatatattattttattaattaactctacaatcttaaattctaataatgtgttataaattgattcaccccttgaatggtattttaataatgatcatttcttaatgggtattacccatgaatatttactaaacaaatttaactaaaaacattaattttaaaaatattaaattattaaattttgatctaataacgaataataaaagagatttgaatttttatacttagtttaactacttaattaaaaaaaatatcaaaaaataactctttttatactatatcaaaaat

SEQ ID NO: 243008 - DNA, 1420 bp, Cannabis indica
ttgtaaatttatttatgtaaaattaataattttattttaaattatataatacgtgtatgaaattatatatactctaaaatatttctattataatatagcattaatgattatttattgttattattgttacattgatattttttggttttttaaatttttttctagtgtaactctatttagttataatttctcaattagaatataatttacttagtctcaaatgtattcttaaatagaaattctactctcaaatgtattcttaaatagaaattctactgtacttctaaattatttcttgatttaaaaatttattgaaattaaatgtacttaacggtgcaatagatcgagtcctattcctatataattaattatagcaggagctatggcaagggatacatttggttctgtagtagattgtctttgtaagccattaataggtagttatttttttgtcttattcgtgtgttcagttattgaacaagtcccactctattacttttttttttttttggtcaattctcgtttgagctatttaatgttatttttgttgtctattgcaagttgtttttcaagtattgttgaagcagaatttgtagctctacttatagcattgaagtaggttcttattattggtctttatttaaattttgttaaattaaattgtttagcggttgttaatgtttttttaagggttctttttttctcaataagcttatatctttgttaaaagatttattagcaagttaatttgatgtctagtttttcaagagtgttcttcaatgaacggtggttggccagtgaagctgcacatagagtttttcgccacgggctctttgcttttatagaaaactcaaaacttgatttggttagatgagatcccatcttttgttagggattcttgttctatgaagctcaatgacattattatttcttgatcatctatattaattttatgtaatactattcattaaaattattttattaaattgtttttggttaacttttatttttatatataattatggatatacattgatattatatatttgaaataaattaaatatactaaaaatttgaagaatataaaatttttgtgatttatttttatatataattatggatatacattgatattatatatttgaaataaattaaatatactaaaaatttgaagaatataaaatttttagtgaaatattttacataaattagtatatagtataatgtaaaatttaacgtaaaatattaaaaaaaaaaaaaatttagtgatgcattttaaataatatagtgcataaggtgttactagatgtttgttttgatctatgttaaattttggaaaaatctttaatataccctttataaaatttatttcggtgttcaaatataagttgttttcgttttttggtaaattttctttaat

SEQ ID NO: 243009 - DNA, 792 bp, Cannabis indica
aaccaacagttgcatatacagcaggcctgatccaccaactttggttcaccatgcaaatagtttcaaacacaagttatgtaaattacgacactatggtataagtatgtgtaaattccatagtagtatgttagattctctacctcttaaagattgcaagactcgtcaagagaaccaataaagagataggctgagaaaatctaaatggaagcaggggcaaagccactcacagtcaagtgagtgcagcagttccaccccaccttaagtttttattttctaaactaactatactcagactgaatttaaaatttgtcccacttgaatataatggatatatttaatagtatatgtttactccatcttacattagtctgtttataggcttgatttccttcacacgataaatcttttgtagcagtagcaagttgctccattgcttccatattttcatcaaccttcaaagcagataaacaaacttttcagtatagcaaagaataggtcaagtgatgactgctgaaatagtaaaatattatagaaaagacctcgtgtctaatccctttttttactttggtcttattgtcattatattagatattatacgaaatattatatatggggaaggggagaaggattgaacccataacttcctctatgatagcagaggtgtggaaccaactaggcatggttgaaccaccttaatattagaaaggtttgttcctgtcactcatggaatgtaacctgtctctttttcaaaaagtagagaggtttgtttcaaatctaacaggcttcagttat

SEQ ID NO: 243010 - DNA, 772 bp, Cannabis indica
tcccaccaacattggggttgaggagcgtagggatcatgacagcaacaaattggtgggaaggggtaaaatggaaaccaaaagtaacctagttagtaaagaatgaaggaaatctaatggttggccccagaggacccctgggaggaatattaaggtcaacaggaggaatatcaagcaaagttattgcaggtgggtgtggatattggaaagacacactcttatcagagactttctccttacccctaaataaaatggtaaaaggacagagaggttcagaaagagtttcatcgcatttctgcaagaaagcatgacaatacctcttagtgtgatcaaggcgaccacaatagaagcaaaaatcaagccacttgataaactccctccccattctgataaagcgaatattcataccgcttctaataggcagattgacatctaagaggatcctaagtctcaaataaggccctacaccctccctaactgtatccctgtcaacttcaattagatcccctacttcagaggcaataaacctagctaactcgtgggattttcacataaaatgaatgccatacacttgtatccagaaagggacataacaaagattattaggggtgataggaaaagagctctcaggggcagcaaagatagtaatactttgagcaaagtgccaaggttggccttctaggattctacccttattcccttcacacccaaatgtaaccatgaacaaaccatcaacatgttcagagagccaaacatgaaacctacactgcgatga

SEQ ID NO: 243011 - DNA, 898 bp, Cannabis indica
catgatttttaataacctcattgattagcaacgagctgcacaatacggtaaagatcacgctaacacgtctatactagttagggtgttacatctccactgtttggatacaacggaatccaccgattcttaaatttagatactacactttgtttgtccagagtgaggatttttccaggtaaggaagaacccattagccaatttgggtataatttcatagtagctaaaaaaggtttactactttactcacaagaactacattttttgaaataatgcattcttccttataagcaatggttgtttttatatattagacaaaaaaaaaaaaattgtgtcgttattcttacaactcaattgcccatttgaagtaaatattggtttttttaatgatgtatgattatttttcatagtagattaagaagggatttggctttctggttaatcgggtttttggcggctgtaatagctcgcctaagctggctgccgacgccacatagagagacaaagagagagacatggggatattttcgatgaaggaagaagcaaggaaaaagaagaaaaacagaaagaaaaaaaaagtaaaagaaaaaggaaaaaaattatctagatattgtttattattttattaatttttaaattattttttaacaatatttaattaattaaaattacgtaaatcactaaaaatttattacgtgtacacttagataatttccttgtctcttaatagaattttcggatggaaaacaaaaatgaaatagtagtttagagaattttactaaaaaaaatcctcttataagattaagtatcacaaatgatataaaagtagttttactaccaatatcactatcaattaattacttgagcttacactcaaaaaaaaaaaaaaaaaaactaaaac

SEQ ID NO: 243012 - DNA, 910 bp, Cannabis indica
tagtatattcctaaaaaaatccaaaaaataaccgatcaaaaataaccaatccaatccgcattattgcggattgaattgaattggatttaaactcttatgcggatcggattggatctaaaatatgaaatccgcacttagtgcgaattgaatgttgttggactaaaaaagtgcggattggatcggaagaacacccctagttgtacatcatggctacaaaacaattgacctcaattacctcaatttacacatataattattcatatgaattcaatatacaactatacatcattttaacagtctaaaaataaattaggaagaagagcataaagagacacattctaattacaatactccaatttgaaatacccatcaaaataaaatcaccacctaaaaaattcagaaagaaaccaattaatataaatgactaacatattaatgccttcaaaaacatttccttcaattaattatcaaaagatcaatagttacagaactacaagattctacaaccatctatatcattaaagaaaaaataattacatcaaaagacaaaaaccctaaccctaacttgttcaaacagttactcaagaacccactgaaacccaaacccaaaaacagaaagattacggcctcaagagctagtaaatttagtcactgccttggtcccctccgaaaccgcatgcttggccaattcaccgggaagaacgagcctgacagcggtctggatctcccgagatgtaatggtgggcttcttgttgtatcgagcgagccttgaagcttcctgtgccagcttctcaaagatatcgttgatgaagctattcatgatacccatggctttgctggagattcctacatctggatgaacctgcttcaagactttgaaaatgtatatcttataggtttcgacgctctt

SEQ ID NO: 243013 - DNA, 493 bp, Cannabis indica
agataactcatctttttttaaaacaaaaaaagataaagaatcgcatgcagaaatcgtctcctcgccgcggcgatagggtccttgccgcagcaagccatcttgtggctgcggcgacagggcctgacctatatcttttattttcttttttttctgctcgcttccaccctcgctgcagcgacaacccatgggttttttgcacctcatggacttccgaaactctagaaaatgttatttggcgcgtcaatccacctgtcacattccctagcataaaaaatcaagtctatcactttttactcataaaaatcaattttttttttctaaaacccgagttatttcaaaaatgatgaaaaatactcaaattactaagtaacaacatcttctaactatgaaggaatgatcaattttagagcctaaaaggctcttatcaaattcccccacacttagattttgcttgtcccttagcaaacacaaactaaactaaacacaagtaaat

SEQ ID NO: 243014 - DNA, 1149 bp, Cannabis indica
catatttagggcattaaacaacatacttgtgagtagatctaagatcctggtaaaataaattccaacaattcttgctatttctgttctcttgagtcttaagggtctcaagagtagagttggtgcactcaacaacaaagtttgtaaaagcttgacccttttattgctgttcttggcgggtatgtgatctcgaactagccaaactcaatggcccattggagtagtcgacctgtgctctaggattctgcaaaacctgccgcaatggttgttcggtgtacacctttatgggttgtgcctggaagtagggcctcagctttctggaagccaagagcaagatgtaggtcaacttctccatgagttggtaccatctttttgcgtcaatgatccttttgctgatgtagtatatggggtggtgtacaccgccttcttcccttgtgatgacaacactcacagcgtgctctgagactgcactcacaacgtgctctgaaattgcactcacaacgggctctgtgactgctagatcattttccaattcttccaactcttctacatgtctaaagcttcctgatggatcccgaaagtgaggatttatgtttgtgtccccgccttgggctagacttcattgccccttgtagggctcatcttctggacttctagcgagcatattctcctttttggccttaaataaggctaggttgtaatagtgacgggcagactattggtctcccctcacatatgccactccttgccttgtttggaatttaagacataaatggtagatagacgtcaccaccatcaggttattaagggctggtcgaccaatcatggcattgaaagtcgagggaactcaataataaagaactgtaccattactgttcttgtgattggattttctccaactattaggggtaatttgatataccctataggtgcaatgtcttggccaaaaaagccatacatcacttggctgcaaggcgctaggcaggtgagttggagccccatcttttcatatgttgatttaaaaagaatgttggaggaggctccatcatccaccatacatctagccaagatcatattcccaaatccacagtaatgaccataggatcattatgtgggatgctgaccggtgctgcatctgttggttttatgccc

SEQ ID NO: 243015 - DNA, 1045 bp, Cannabis indica
gcctcattatcatcattaaatttttaattgtcttattttagaatctcatcacgaattctattataaaaaataatacattattattattcagaatatcattattattccttttaatataatatatatgtttgtgttttcttttaattttcaaaaatctacaaaatttcttcatttaattttgaaaatgttattattatttttcaatagagataaatttgtttaaaagctttgagcatttgtatctatttatttatttcaaaaatatactagtatattttcttttatagagctttaaaataaatattttttactaaaattatattatttatttaattaaattatatataatatttctatttcaacctttaaaaatcaaaacacataaccttttacatctcatgtgatgtcaccatgtatatatgcatacacatgcatatataaaccaatattttcataaatattgttcacatattttgtcaaatgttttataactttagaatcgtgcttgttttcttattgactaacttccacgaaataattgtattgctatatatcttttgtttgtgattaattattgttttaattggttttattttagggaaattactctatatattattttttgattttttttttctaaatttacgttttgggtttctaaattggttgcagcgctagttgcaatagaggtttctatacgattttttattgcaatttagattgcagcgctagttgcaatagaatttttatgtaaaatttcgtaaaaatacaaaagaaattattttgaagtgtaaaaatgaaaaaactgcttctttattttattttaataataattattattattttaggttgttgtccctaatttagaagaagtgagtttaaagtggatgttcatgtcatcctctatgtccttccaaaatgtgagaaagattgtaatatcatatcatgatgcaatgataaatttaatgaattcctccaccgccagaagtctagtacaacttcaggaaatggccattgagaattgtaaagaaatgagacaagtaat

SEQ ID NO: 243016 - DNA, 842 bp, Cannabis indica
caaaataaatttaaaaaagtaatgggtatcaagtaataatgatacgtgcacatatctttttatactaaattttacaaaatttgagcatttaaggttattgtttttcttaaagcaaatttaagcaagattattatctacaaagaaaagacaaaacaagttcaaaaattcatagtaagcttagtgatttattcaaaataataaacttaaaaaaaaaatgagagatattttatattacctattaaaattgaaaacttattaattctttttttattatgcatgattttataatttttttatgtttcttcacatccttatagcataatcaattgagaataattgcatcttaatttaaccgtatactttttataatataaaaatgttgttagtgaatattgttttccaaatcaaatcgaaaaggtatattaattttcttaaaataatattgctttatattatttttttttttacaaattgcacttatatatttaattataaattgtagtcatttattattattggggtgcgtatcagatattttttgtaaattattattattaaaagatgataaataataaattaaaaatcaataaagaaagtagataaaatacttttaggctcaattagggaaaaatattaagatgccacctaaaattaaaagtacattgggatcctattaagatatttaagtgggtaatatataaaaaagtacatgaaataaaataaatagaatacatataattatgataatatttacaaaatcaatgtaaatgtgtgtggaccaagtaaaaaaataaatgatcacaagtcataccaacttgattaattaactaaaacataagata

SEQ ID NO: 243017 - DNA, 3199 bp, Cannabis indica
atatatcacaatttatttctacacattagcaatgtaggactaactctaatagtttgtgatacgtcgtgagcttaaagctaaaacactgtattatgtttcaacattaaggggtcttgcatagtattaagattgaaataagatggtttacaaaaagaaagatgccaaaaattcggtctaaaagcagcattactaaaaagaaaaaaacttaggaggaagggagattccgtgtaaatgaaaatgggtcacgtgggctccactctcacaaaagtaacatgcatttgcactgtgtaatcgcactgataagattctactgtcacgtaattctacctcatccaatggatattttcgtccattcctacccctaattacgcggcgaaactagttttcaacccaataattttgccaaattcagctaaaagtagctgttttccacatcatccatttcccattttacccctctccttttaccttttgaccatcctcgtactcctcactaatttgtctcctttccctcaaaggctctcactttctggccctatcatcatcttcttcttcaatcttcaccagcaaccagtaaccgaagctatttacaactctgctagccaattacaaaccctaactcatctcttcactcactgagtttctgttccaaaccaatcatgagtcgactcagaagaatcgagctcatcgagccttacacctacttccctgcttcttcccctgtcttcatccgcgaaaccacctccattttcactcctaaagccctagctttcccttcgtttcttgaagatttggaagcctgcgagctcgacttgattatccctagacctagccccttcgagctcttcgaaagcgttaccgatctgatccgggtcgagcgaaagccgtcgttgtcgttgcaaaagcgaattcagcgattggaaaagctagggggagacattgccgtacagagattgagtgaccgagttagtgagttggaagctcgtttcgatcggctggcgaagatcaaagacgccggtggtgatcggaagtacacgtggactgcggagacgaaaatccctgcgaagaacgttgatcgtaagtacaaattgacggcggagatcaaagacgggaagaagaagaaggagacggaagtgagtgggaaaacttacaaattgacggctgagattgaagggaacggagctgacggtccgatctcgcgtacgtacacgttcaaagcatccagcggtaatgcaagtgagtgtggagaatcaaaaaagaaggacaagaaaaagaagaaaaatggtgagaaggatgagcatgccacgcgtctggtgaggattgaagagacttctgatcatggggctgtagttttgagacaggtatgactgaaagtagcaatttaagccatggtagctttgtgttatcttttgttgttgggtttatttggatgatgatggccctcctctctttgtacattgctttatttaaaaatattttatttatatttttgtatgaattgaaaacgtcaattgaattgggtccactagttgaccaattataacttgaaattcagttagttgagcttcagctaaggctccattgattttgacattgaatgaaccttgaaacaaagttaaaatgtgttagaaatcaatcgtttcttgcaaaatttaatgtgacccacccactttctattatgacgaaagaattacttagtgtttcatcgaaatgcatgaatttatcttttattatatgttttgtaagaccctgtattgatttattcatttatttggtgggttgaggaaggcttttgccaagagaattggaggtaggagtgagaagggtaagaagaaagaactatcgcctcaagatgcagcaatgatgatccagatgaccttcagagcttacctaattcgaagatcacaggctcttcgtgcactcagagacctggcagttgccaagaccaagttgaaggagattcgaggattgttcaacaattactcttaccgcagccttgtggctcgtgatgctgcagagcgtcaaaggttctcagagaaaataattgtccttctccttactgttgatgctattgaggtaacttatctttctcagtatgaaatgaagctcacaaggatactcttgattttgaatgaagtatcaaaatatagcattaagaacttaacatgagtataattttaacaacctattatatgaaagcacaagccttgctcgttttagtttgaggtttcaaagggagggaaggatgaaaagtgattattggggtttttatggggctgcatgatcacaaatgattttgacttattggggagcaatgcttaaagaaaccaaatgtataagttctcatgttaaagtacttggatactagaacacgacacaatttcatttaaagaggagtatagcttctgtttaggtacatcatttccaacaatgtcaaaataggaatttatgtcattagttgcaaatctttctgcttcttgttgtggtattattgattgatgatctctttcctttgaagtaagacttcggccaattttgagattttgtttgctttcttatttcttcttgaatgtggttctgatactttgcattgcactagggagctgatttgatggtgcgttctgcaaagagatcaatggtggacgagctggaagcaatgcttgatgtggttgatccacagcctgggaaatcactttccatgagaaggagaaccttcgatatgcctgacagtgtcattcagaaggaaattgctgcaggtgtggccgaggttgtccaaatgcttaaccacggagagaatagttccagtacctttgaagcttgcttgtgaagagttcctggtaaattgggtatttgtggtgatcaaacctctaattgggtagtgttgttttttccagtagtttgattgttgtagttgagatatacaacccagttgaggagatttcgggggacttgttttcccccatgagtagattcttcttagagctgcttttgtctccttctcccgtttatctctggttgaattgaagtcagttgttccttgctttcagattccatttatatttataatgaagacctttcacttttgtattatgcatttatccattaatgttctgtgtaccttcttcattcttcattcaccactcaacgcaacccattccagcaaataacttcaggtgccctttttttttctttttctttt

SEQ ID NO: 243018 - DNA, 1081 bp, Cannabis indica
ctacccccgtacgctcgagatcggtcagtcggcataggcgcctgatgactctttcccatggcctttagctcatgcgactttctctgaagaaggccaatctgagatcaatggaccttctttctgacaaggactatactttcgattataagtttcccagtattgagcttggcagtaggttaccatcccagacgaggataaggcttgggatcacgtggctcccacagtacttaggactaaacgtaacacattagtcaccttctgagatactcgctttaatttttatatgacagctagtaccctagattccacgtttagattaactgtcatgagtcgtattatggtatagctgagcagtaggtactatggcagatttggcaactcatatagatgtgaactgggatttagaacccatcgagccctttgacatattcaagattacaggttgtggggattttagtggttattattttccttctaccccttcttctagtgatagcttgccctctagtgaccttcgtaaatcccttaggtaaaaaattgtagtcccccctttttcatctgcctttctaataattgtaactctttattttgttttggagacatgggtggttttgaagttatcatggaccgaaatgggaagaagaaggtatccaacacaggggtccctacaactgccaaggtggtaccccctaaaaggcacaggaaaaccactgcccaaaaaaagaagtccttgtcttaacctattgatctcgaggtctttgataccgagactcaagaacaagtccctgctccagttgtccctaacaccaatgctcccccccctgagacagctcgtgcttctgcctcctcgaggccgggtcattgagttccttatccggccgcaggtgggagggaggcttgatctgaattcgctcaagatctaaacttggatctctttctctccttcttgttgaatgtgtgtgtgggcactactctaatcactaagaggtttcgaaatttcaaggaagaagaaagagaagaaggtggcggctaggtatagagagagaaggctcaggtttttctctgaaggaaatcagaaagt

SEQ ID NO: 243019 - DNA, 2954 bp, Cannabis indica
ttttttttatttggccttacatttatttttattggttttaataaaatatgagttgattggatagttctttactatattatctcatattattagtagtaatcaatggttaatggacttagcatgtgcataatctagttgaagcagaagtgtagacttttttagttaattaaagcctttgatgagcagacccagtctaactagagttatgtaggtaagtccactctctaactctataaatagtaagtacatattgtctcatcacaaatgtatagtttggtatatgctttaggacctataatttgcgtaacaattaatatatgcataagttaattatgtctaattacatattaatttcgtaattattatatgttaaatctttcgttattgaatcttaaagctttaggagttttaatcattttgaaattctctctctctctctttttttctttctttattggtgattatatgtataaaatcattgagtaaattaagagaattttaatattaaaactttagggtttatacatgacataaggaaattaatcttctggagttcaaatttctccctgatctcattcatctcatctaaggactcaaccattaattgatgattgacattttgatcataggtgagtctcctatgcgagggttgagtaagtttcgttggaaacatagcctcatacccaagggataaggcaaatggggtgtgactcgtggctgtttactcagtggtgcaatatgaccacatcacttataaaaattcttgaggccaattttcctttgcctactctagacgatttttagggtatctttgagagtttggttgacagcctcgacctggacattggcttgagggtgcataactgctgaaaaactccttatgataccgtgtctagaacagaaatcagtgaacagatcgttgtcgaactgtgttccattgtctgacactattttttgaggtagtccgaagtagaaaatgatgttcttgacaacaaagtctagaaccttcttcgaagtgatggtagttaatagttctgcttctgcccacttagtgaaataatccactgctaccaccgcatatttgacacctccttttcccttacgcatagagactatgagatcaatgccccataccgcaaatggacatgggatttgcatgtttttgaccttgtttgaggcaactctagggatttttaaaaatctatgacacttttcacacttcctcacatactccattgaatcttagatcacaaccgcccagtaatatccctgtctcaaaatttttttagagaggctttgcctctagcgtggttgccacaaaaaccctcatgtacttcaatcatgagaagcttagcttcctcaggtatgacacacctcaaaagaggcatttctcacgtacattactctatctatgatgatgaagtaggttacttttctcatcaattttttggctacaatcctatctgttggaagagtaccttgctctagatattctactattagagttatccatgatggtgtatcgtctaccgtgaggatggtctctgggttttcatatatgttaggagtaaggtattctacaagaacgacactgagggtgttagaatccattgtgctagctaatttagctagagaatttgtattggcattttgttctcacgaacttttcgaatggagtactactttagctgggctaagagatccttagctttgcttaagtatgtaattaatttaagccctcgagcttggtactcacttaggacttgattgacaacaagctgaaaatcactgaaaatcttaagtgtttcagctttgatggctatactaatcgaagtcatgctaggagtgcctcgtactccgattcattatttgttgcaatgaattcaaaccgtaaagaatactgggtgaggtatccttctagagttaagaggataaatcttgtgcgagagctatgctcatttgatgagccaatcacataaagcttccagaaataaccaaagtctatttaagctgcagtctcacgcgtgaaactctagtcttcgcagactaaagatcgtcttttgcgagtgcaaatagaattttccaaaaatatataatccaaaagcaatttataaatgttctcaattaataatgctaactttttattgggtgttctgcttcttaaaatcattttcaaactgaaaggaataatgtaaaacaaattttggacttcagtgacacaaaataaaatttgatcatataagtgataattttgagaaagattggacctctattgctataaaaccaaaaataaaaataaaaaactatttagataaatttatatatttttaaaaatttttgctagcaatgtaatgtaaaagttctggagacgaagtcacgaagacatacgctgggaaggaccaatctccattgttgttcggatctgagaatttcgcaagaatttaacagtatgttcttttccaatttcttaactaattgcgtgttttcattttctgcttcatcttatattttgtatggagaaataattgtgttatgaactatgaagagtctgatggttcatccagatatttgtgatcatttctatttctttacattcttaagttgaaaattggctggatgatgaatgtagataactcgttttctttagtttctcttttctattagaacccttttgccctgatttttcactgtttgttttcatttttttagggttaggttttcgtgtatatatctttctttttttttttttggctcagtgattacctgcctggactgggctggccaagatacgctatttagatttatttaatgaggaaacaatttcaagatgaacaatgagagctgagactttccaattctttcatttttttttccttctctttaaattggttttttccagtctatagtgagcctcttggaagtgcctactgcccagcgtcgcctgctatagattc

SEQ ID NO: 243020 - DNA, 1078 bp, Cannabis indica
cgaaacaaggatcacatcttcctagatattcaaagcattgaaaatggtattacgatcattccctttcatgtcagaatggcttaaagctagcacatcctgattcctcctgaccgtatttatgacgacttcccatatggactgtagatttcttcccactctgatggttctcattgggtcttcctcatatatacttacttcttctgcctcctccatcggttctagatttctttcaatcccaactcttgggtccagctcatatagaaactcctaccgaacagtctcaatatccatcaagtcttttattctaggagcatcaaatgtctcttctcggaccataaacacagcatcgtcgaaatattataacaatttcttgcactttgctgatcgccctttatcgtgccaatgcatccattatcacatgggaatttcatgcacaaacgcccgatagaggtcaccgcccaaaaatccactagggttggtcatcctattatggtattatatgcagttggacagtctaccacaacaaaatttgactgcttaaaagcacttgcctcatttttccctttaagagtgacaagtagctggatcttacccattggcattaaggcatcaccattaaaccttgcagctgaatggggaaaggggctaaatctaccttggtgagtctgattgcctgaaatgcaaatttgaacagattgttggcagaacttttgttgtccacaagaaccttaaagtagggctgagcatgaaattcaaaaaaactaaaagaaccgctcaaaccgacctactgaacaccgttaaaacagacacaaaaaattcccaatggttaaaactgccactaggcagtcagtttttttttggtaccaagctgaccaagaaaaatgaaactgaccaaaatactatttagtatatatgtatatactattattactttatatgtatatattatttatgtaacctttttaatatatattattattttaataatataaatgtaaaataaagtaataattaataaactattatctctcttatctctttttgataaaaattttacttgactacccaacctctcttt

SEQ ID NO: 243021 - DNA, 777 bp, Cannabis indica
aaaaaaaaaaaccgtaataataataaaaaaaaatacaaaaatacaaaaatacaataaaatttaaatatttttgtaatttttaagatttcatttacataaaatgcggtctttttatgtatttttatattgtactcttgttaattttttcttatttgtatattatattcttattatatttttatattatttgaatgctattttcttgttaattttatgcaatttttttcgttatttttgtactatttttatgaacaacgtaaaaatataaaaaaaatctttaaatgtaaaagtataaaaatttaccaaaaattataatttacattacaaaaaaaaaaaggaaaaaactcttagagaaaaatgcaagttttttgtacttttattttgcaattgatttattttcattttttgatatgatgtacattaatctcttcagttaagttgtgtgatgtctaaaagaaaatttgtggggatgaacttgactttggtagagtctagattcataatgctaactagacagattaggattttatctgcacattttccatatctgttcaataaaattttgtcattaaaggagtttttgacaaaaaaaaaaaaaaaaactaattaatattttctctttgtattcataacttttgagcttggttttggatgtcatttatcactataaatatgacctaaaccagcaacaataggttgagctcttccactttttaatttcttatatttatagaagagaatgtttcttttgtaaaggatagttctgttattccttgg

SEQ ID NO: 243022 - DNA, 1012 bp, Cannabis indica
atagaaggtaaaatgactaatgtgcaattaaacttattacaaatggcgtgtgagtaaaaatataaaagcacaaaattacaaccggacctgccacgtgtcatcttctcattggttgcatgtggacacgtggcgaggggagagaaagccacgtggaaagggactgggctaaagttggagaaggcagaatggagaaccactcgcgcgcttggaaagtggcgcgcacacacggcccaggagaagccgtgacgtcatgcgcgcgtgggaagcaggaggggacaaagatgcaggtggtggcagctgcggggtaatgggagcctgccacgtggcgaggctttccctgaagatggaaattgggccagtgggttttgtccttttgtgctctcttttgggctacaaaatacctaattttatggctttgggtctttttttttggctattttttatttcttttcttttcttttaataatgctaatttttaattcaaacaaacaaaaaaaattaaatccacctgaaatataatacaataattttaaagaaaatatttatttaaaacataattaatttgtatttctttacataaaaataatgcattttcttaactttttatttccttttctctattatgccataaaatgttatttttcttacaaaattaactcagcactataatattttcaaataaaaatatgggtcaagatgcaaaatgaccctaaatctaacaattaagttaataaatgtctcttttcatcaaaaattaacaaaatgtccattctattaaaagtttgatgatgaaattacaattataaccttgaataattaagtctttggtatagttattttatacactagtatatcgtttttatgtgcaatagtatattaaaaaaaactgaaaggtagtatattagtttaagactgtggtatattattttaatgtgatatgtatataatgaacgaaagatggaaattaaaaaatatggaatattcgtttaagtttgaggtatagttatatttc

SEQ ID NO: 243023 - DNA, 749 bp, Cannabis indica
caacaatcaatatttatctcaaaataaatgtgtatttcaacgaaaatctactccataagcttaattatcaaatcattcttcactaatgtaattacacacaatttaaagatcaataagactttataggcttataatgtaaggctagggtgaaaggtagataaagaaggttaatttaggctcaaatcacaccataacatacatctacaacattgtctcaaataattttcatatgtattccccaatcactctccccagcaattaaatcttgtatctttttttttttttccatgaaacttactatttccccacacttaaattgttgcaagtattcatttaattttcattgattttttttaatgaaatacttacaacttacaaacattcattccaagggaatagtaattattttcttcatcatcacttccacataaccatcaatatttttccatcaacaaaactctcacacctttacaaatacataaaacatcaatatactatggtgtgaaaaatgatgaataaggattttttaggctcaaaggttactctacatgattaaaagaaaacaagatgtcaacatttaggttcaaattggtaaaagtaagactaggggtgttcatccaatccaatccgcactattttgctcatagtgcatccgatccgcactaagtgcggatttcattttttggatccaatccaatccaatccacaaaagtgcagattggattggtttactttttaatattaaatta

SEQ ID NO: 243024 - DNA, 551 bp, Cannabis indica
catgccttgaaatcttgtaatatacatttaagtaataaaactgagattggatgttcagatttgtgtcttgcttgttgtttagggaacactacaagaaatgtaacttttaccagcacatttcgcaaactgcactggcaaaaaggtcaaagttttaccagcgtacatttgtagtggctaaaatttaatttttaccagtgcatttacgcgctgggaaaagtcatttttgccagtgcttttcattttatgctggcaaaagttctaataccaacattgatttcccaaccctcttttgctaacacatcacaagtaaattctattttaccaccgcaataccaacttttgcaaaagtggcacttcttgtagtgttatcacgtgtaaatccctaattggtacaggttattaaattttttatttaaaaactaatctaaatataccaacaagaaaatgatatgtggtcgataatgacttgatatttgatggctacataaacttaagtatttatttgcaactcaatttatctacaaacataagtcactacaaaaaatcttact

SEQ ID NO: 243025 - DNA, 742 bp, Cannabis indica
tatatagtaataaattgcaaaaaattaattaataattataattaaattaattttaaaatataattaatcttaattaaagttttataaggaaataaatgattaggttactttcaggttacaagttatttattatttatttttatttaattttcaaattaatcacaaccatttaatagtaatccaatggcttaaaaaaatgtaaccatgatggttacaataaaaatgtaaccattgaaacctcttccaataataataatacccgaagtattctgtgtctatatatttatataaaagaatgcacaaagagtgttaagcggcattaatattacataggtgacattagttgttttatttttaatgaatacaacacatattattgcatttttcaatctttgtaaaacttaaaatttttaattatttttaacaaataaaaatattttattaaattttgataattttagttttttaaattatacttctacatttaaaaaatatttaaaattcttaactatatataataatttaaagttgatttattcacaataatttataaatatctatttatatttttatcaaagagatgtgtgacatttgaaagaactccagtatctagtgtacttttttatgtgggaatgtggtaggtcccacaaactttaagcgtgtaatatgaatacctttatattttaattttttttccttcaattcatattcttaaaaattatacttatcaaacaaaaataaa

SEQ ID NO: 243026 - DNA, 1118 bp, Cannabis indica
atctcaatagttcatgagcattttcaatgatcttaaaagttcaggaaaatcctaattagctttttttgaacaaaggaaactgagcattatactacaattgacaaattaaaatataatatacagtgatgaaattatccacttaaactatattacttaatacattttcaaaaaaaaaaataaactatattaattaataaataaaaagtgaaaactacaaggtttagggagtgatatttgtgaaattaaagatgaaaagtggtttaataaataaagatacaaaatttagatgaaaaataactataaacaataagcaataatatctacatacaaatatatactaaaatattctctcaaatatatatatatatatatgctaaaatactatattttttcagttaacaaaatattgcaagtatcactacaaaatacataattttttaattataatataaaatttttatgattaaatgtgacttttaatcacaataaaaaaattacctataattaaacatagtattaaatacaagttatcactaatttacttttaatcacaataaatattgtaactaaaattacatttagtcataacaaattgtgatttttgtgaccaatacatttaactataggtcttttagtcacaacatagaaataatgatttataattagtcaatttttttttactttttgtcactgtaactaaaagtataactttttgtagtgtataatattttttaattaataatcacaactttattttcttaaaaaaatattattatatcaattagtatactaatttggtatatatttttgttgtacatattatcacctttaaaaaatattaaaaaaattactaatactatatcattatcattataatttaatatcatgtgtcatgtattttaattaaataattataataaaaaattgatattacaaatagctaaggggtcatttagtaataatatttttgttttttaattttttaattataaaaataaaaataaaatttgtgtttttaatttttgcaaaaaataaaaataatcttctataactatttttattttttaattttaaaaatataaaataaatgtgttccataactttcatttttattttta

SEQ ID NO: 243027 - DNA, 801 bp, Cannabis indica
gggccttataaatcgacaaagcccaaatattgataaagcattagggggctgggcctaaactgaatctaaagcccaaccaatattgaagggatcccgggataattgtttcatctatacgtaaaaattaccaaaaaattacatttttacaaattttactagaattcgttgtttttttttgttttgtttctttaaaaaacattgtttttgatgttgtggaaacgtagtaaatataatgttgttttcactatacaaaaaacaactgtctataaaaaatgaaaaagaaaaaaaaatcagtaacaatgtgaatagaattataattggaagtgttttatataaattttcctaaaataaatgcttgtgaagctggcaaattagtctgacataaaaaatacaaaacacttccaatatatttttattataggtaattataaacaatgggcgcctttggaagactggcagaatttaatttggtgtaattataggtaattatttgttttttttttttggaaaatatagtatttattggaccatattcaactagatctatttagatttaatctaattatatattaaatattatattttatcatataatccgatctaattaatttcaatcatccaatatattaggttggatcggttctatgtattatatatattagtatatttattgaattagtttaaatttatcaaatattttaagcatataatttttttttgatcgaatgagatatatctaatgtattgaatttaatattaattggattggttggtgagtgtcttgtcctctgacatgttcgt

SEQ ID NO: 243028 - DNA, 1100 bp, Cannabis indica
tcccttcctattttggcgggtcgtgtcctatgtttgtctttttcataaatatacatttttttttttgttcttttgagaaaatgttattgcataattgatctatgtgcctacacaatttttcagatttttgtatattatcattattaatatttttgttgcaattcacataaccatagtcgacgatcataacaacatgaagattagaacttgtcaacatggtgcaatagttcaaacctttccatctcaaaaatcctcaccgcgcagagccctaagaaccctagaatgaggagcatcagggtcaccacgcatagcattctgcctccatatctccgccgccctcctcaacgcttcctcagccgtatcaagctgctcccgcctccacaagatcacgtccccactcgtaccgtgataagccgtcccatcagtggcctgagtgatcggcttccgtgtatcggccatctccatctccgacaacggcgatgccttgtggtgcttaaagtactcaacgtcgtccttctcttgttcggctctatcactccacctctctccctcgtcattcggccacggagacccatccagacccgcgcaattcgtgtcttcaagagaaatcgtcgtcgtttggttccgtttttgctgtgaagtaggatccagtggctggttcactccagtgctctctagccttggggaactaccatgtgtggcggccggtttaggtggcctaaggggttcagttgtaccttccactttatactctgttttttctggcggctcagctggtttaggctccgcaacatttctcgtttcctgatcagtacagagtaagtacagattgaattcataataatatataacataaaaaatgacactattttagtaaggaacgcacatctgggtttccatgaggagaagcaggttggtgagcttcgtaatcctcggcatgaccagcagggtcagcggtgcgatacggcgtcgtaatggaggccaatccacgctggcaagctctagaggagaagacccagtgagttgactttgctgctacggttgcaaatcttgattgcatttttaattttttcggagaaatctaatgatttgagtattgt

SEQ ID NO: 243029 - DNA, 1689 bp, Cannabis indica
tttggcgacgatactctcaatggtggtctaaatttctccttgtaacttctccataccctgtgtaaccttctacacatcttgacgaaggtcagagacctcagcccaacattttctttgataatcttgagcatagcatccttcttgggtcccatggaattaagggctctgataccaattgataggtcaactctatcgattcagatcaaagaagaaaacagataaaaagaaagaatgaagaaaaggatattcaatccccaagaaattgagagcatagtctctccttacaagccttagctaagaaaaatactccttgcattcccactacaatactctattatttatatttaatacccatgtggctcccatgagcctagctacacccaaacaaaacccccaaacagaattacacagccacattattccctgtggcagacaccttgttaaacttcttactcctttgagcgtacacatacgtcacgggaggtctatcaaatgcagaactagattcactggagcattacaaggttttgctccaaatttttctaagtgttatactcaaaattcgataagcacatcagaagaagacacatgtcgaactgggaagaacgaaggacttaaacacacaatcgtaagtacacttagcatgggataactcgttaaaaatacaatttgcagggtatgtttagaactcggctggctgaacagtctcgtgcaagacaaaaatgtactaagtgttaacttgtgtatcgacgagaaaccatgccaacgcaagtgtgcgtgacgaggcattaacctcgtcgtgtggaggagatataataacaataaaaatacttagcgtatatgatacagtatacaaactaagtataaatagtttggtgggttaagatgacagacagcgaggtgtttaactcgctggaagatggcatgcacgcgagaacaatcatctcgacaccaaaaactatagttattagaattaaagcaatatcaatcttatgaagttatatgacgagcaccggctcgccatcaaagttaactcggctccactcctagcgaggcatccccatgagataaggcttaccgtatatttttaatatgcgttcatcttggccgaataaaagcgggatactcacacctgtatgaattctaaataaaaaccacatttacttagcgtgatttgtaatccaatctcatgatttgaggaaataattgctgtaaagatcatagtcaacttttgtaattaattgcccactatgtaattataaatagtggcagactagatcaaaaaggggggaagaaagaactcatacaagagaggctctgaaaaaaaaaaatcagaaatctgaataagaatgactcgtagactatgcagaattttaactgcaaaaccacgtaaaaaaccccatgttcaaatttttatttctacaactcttattttttctatgtgaaatcactactgtgtggctcaaatttggttaacgaaaatcagcgttaacactaacttagttaataaatcaagtacatacttcatttgagatagaaaaatacattatttactctgagtaacttcaactcccaagaaatacttatgtacccctaaatccttcgtgtgaaactaggtatgaatgaaagtcttaagagatgaaatgccttcagtatcatttctagtaataacgatgtcatcaacataca

SEQ ID NO: 243030 - DNA, 706 bp, Cannabis indica
gggggaaaactttgaattggagagttggaattgcatacctaaaggaaaagtataaagaaaatggtaaagttttgctaatatatagttaatatatgcactcttgagaatcttttctaaaatcttaattgcccctttctagtaatttcagatcatggctaaaatcatttaattcttttctggctttgatattacacccagttctaatttgttatactccatattatacatttataaaaacagtataaaataaaatatactaaactcaaaatctaatcaagtaaactttaattaataatttacaatcaaaatcaataagaatttcacataatactgaaccccaaaaatttagtttagggcttcggtaagccaaagaaaacaccattatatacttgtaaaagaaattacaaataaattatcaaaatcaaaatagaatgatacaaaaatacctcaagcagagtcccagcttggagaagagaatgcttagataaatggaggagcaccgatgggtcacaatctctaaaggtggagagcactatctctccattaattactggaaatagagaattagggtttttcgattcttacttctttgtctgagacatataaaatagaaaatgaaaatacacataaatatatacctatatatgtgtcgctgcaaaataaattattgcattttcaaaaacaataaataaataaatgagttatt

SEQ ID NO: 243031 - DNA, 550 bp, Cannabis indica
ttatttggacttatgacatttctattaatcgcctcactgccaagaacatcctcaaaattttctttcatgcatgttggccagattctaaatttagttttcttgagtcacctactcaaataattatgcaaggcttccttcgatttaaagttaacattgctatttgcaaagctctctatcttgatatacacattcatgttgatgattataattagtgagtatttttttatagagaattgtggttttatcatctctcatatttaaatatttattcatctttattttgtcttattttttctttctcctatttgttgtaataagtttgtttacctgattatttccatggcctataagcatgacttatttcagtgttggtttaaaaaatttctttcttgacttgttgttgtagttgaagtttcctttgtgtaattttctttgatgggttgaataaattctttcctattaagaaaaattataataattttgtaattttataaagatttgcatgattttaagtattatcttataaatatttatataattttaagttttt

SEQ ID NO: 243032 - DNA, 2008 bp, Cannabis indica
ttgtattttgagtattttgattgtaatcctcctattctctcttgtaatgataatttttccaacaaagataagctgggcatgcaagaactttttgaatgaagataggtttttctctctagttgtatatttcaaatgaggtaaaagagaagacaatggtaaaaaactctttttatgttgaaaaatggagaaccattgatcaggtttcaaatttagatcaagcagctagggtgcaatcctggtaatgtgaaaggatagttgaaaatcccattagttgaaaagatgcatagtttaatgatggaataaactttctcgagatgatgaaaccgccaaagaaagtactcattgctgaaaaagaaatgaccaaaatatccattgtaacctttgtaaaaaaactcttttggtttcagaaagagtttttttgggagcaattgttatgctcatatttcgaactataaatatggacatgacacgtgggtaatcgaatacaaaaattaggagaaattcgttgcgtaataaataaattgtcttggatagataattaataacgagcaatattagtcttgcattacgcattgtcagtaagacaacgagataagcaacacatgacgagatgataaagataaaaatcttttcaggtgtaacatatcaaaactgtattgctggaaaggttaaataatgagttctttaagagcttgaaactcattgacacacatactcgtgagtatattgaaaggttaagagaaataagcaaagtgcaacttatttcaaaatctcaaaagactaagtctaagagttgctgtgaaaggctatagcaagaataaacattttaactagcgtctcgcaaaatgctactatagctattcttgaagattgttgagagatgcaagcaatacttggaacatgttacctcaacaacattttcttagattggagcatgtgtcatctagagaaaacactaagtactagtatgggtataaaattctacatatttgtacttaattaaaaagggtttggctgatgttttgtgaaagttataacaaagggtgcagcttaattagttataataactattgattgtaaacctaatttgggaagttgggcttgaggttgaggggctcttggagatgctgatttaggggaaataaattgcactgagcatattgtgccattaattgatccaccagcactatagctaccattgcctccaccactggcacagctgcacaaatttaataattacagcctttagttaggtcacatttatgaaccatataattaaaaaacaaagaacttttggatcatactttaattattttcatgatggaaaaagaagaaaaagaagttaatggccaccagtgggccttatactcttgtactaggtgtggtttaatatcaagaaattcaaagcaatatttgcatgcttttatctctcacgtggtgacatgtggttcgagatttatatttttacttaaatagcatatttctttagtatttggagacttatatatatgatttaatttaataagttttgagaaaatattaatttgacacttactacaaaatatttgcttggttgttgtattttgttaaatgacaatttaaataaataatgtgtaatatttaaaacaaatatatgttataatggattaaattaatactgtgagcttaattttgctcaaataatttttcaatacgactaaatatgaaatctttcactactacaaaaataatttttcccgatatttttaaacagtcgtttaaaatattcccgtcggtttttataactgtcgcctatacgactgtcgtaacacgagcaaaataggcgacggttaaaaactatcgctaatgtggacttcccgacggttttaaaccgtgtcatactataggcgacaattttaaaccgtcgcctatagtatgcgcatggtttaaaaccatcgcctataccctgttataggtgacagttttaaatcgtcgggaatgtaaaaaaaatacaaatttttctgccatt

SEQ ID NO: 243033 - DNA, 1943 bp, Cannabis indica
tcatgctcaaagctgtttggcttaacaattctctaattgttagcccctacaaaaggaatttacgtctgactatttttaatgccttgtttgcctgtctacacaggttgagagaactccatacactgaaaggccatgtagagtcagttgtgagattaaagggactcgatatcgacacaattcaacaagcatatacagtctgagggagatgtttcgttggccggttctactagtgctgagagtacgtaatcagcgcattgttgtttgttgtcctctaaacagccaattaaatttttatgctactctaccttctgttctgtgatcacctttcattagttcttaatcttaaatcattctatatttctttttttgcttttctttcttttttgtccttttaagagccttttgcatacaattttcctacactcccatgctggagaagtccttatactgtattttcctataaagttagttgtgattttcaaatgaatttttagttgaaaacaaaggatggcatgtaaatactaccatggcattttttatttgagtcttaagaaaatgagaagaaaaggctaagtcaatacaagtacaacaagctagcaaatgagctgcaaatgaaccttattctatctataatatgactcggaaaatgttggcaaatcacgtacaataaatctatctataatgatacaatggcatgttgttttatttgagtccttaagaaaatgagaaaaaaaggctaagtcaacacaattacaaccagctagcaaatgagagctgcaacactgcttgagatgaaccttattcttgatattctgtagccaattcaccatagcttccacacaccatcttcaaaaagactcggaaagtgttaacaaatcacatacaatgaatctatctataacatcattgattcatggccttaaccattaaactacaggtttctgagtcatatccacttcaattgcgattcctccggaacctttgtacttgtaccacttagcacacactaaaaagtaggccaaagttatagttcctaaaccagctaccatgtaataaaagtaatccaatctgcccttgttaagatcttcagccaaccaattccctttagctgaaccctcagtagtacggtgaactatggttatcaagaagctgctcaagtaatttgagcctgccaagccacaaaagaagagagacccggcaatgcttctcatgttctcagggaactgtttgtagtagaattcgacttggccgatagcagcaaatgcctcagccaaaccagccaacaagagttgagggattaacaaagaggccgacatagatgaaatggcacctcttcttgtattgaatccaatagctggcttagtcagagctatggttcttcgtcgattttcaaccacgccagatacgagagacgtgaggatcgacagaaagatgcctatgcctatcctttcaagtagagttaccccaccttcttttcttctaaccttttggaagtaagggacaatgattctatcgtacaaaggtatccacaatgtcatgctgagcatggtgaagacagtgtaggatgcagctggaatctcaaacttgacatttcctatgtgtctgttggattgaagagcttggaaaacaacataagtttgctgttggacaatggcaacatggtaaaccatagatgtaacccatattggtaaaactctcattagacacttaacttcttccacttgttgtaggctgcaaagtctccatggatgagatggtgatccatctgggttcacttggtcttctggagtcaatattgctgctttgtttagaaatctggtgacacaccaatatccatgttattgaagattgtgtactagacaagttttttgagaccagattttttttgggggaaatgatcaaatttgtactttgcatatggatttgtttatataaatatattt

SEQ ID NO: 243034 - DNA, 4502 bp, Cannabis indica
tttagtttttacaaaaattttaatatatttcttatatcaaaattttttaataaaaaataaataattttttaaatcgtttaattagttttaatttttttttctaagtttcttaatcatttaaaaaggttttttttaagatttattaaaaaaatttaaatttttctaatttttattttgatgttacgatttaaaagagaataaagttgttaatttacaaagagatatcaatatttaaatgtaaaaattcaaggagaattcatattttagtattgtggaaaaattaggggtaaaattgttaataataaaaaaaaataggcaaataaagttaaacgacgataaaataaaattgaaaaaaaaacgacagtaaaattatgtcaaaggatgagcacctgtggttttgatgaaagtgaaggaagcagaagtacaattgcaagcgaatttgaagttgaaagacgaaactgatccgtgacattacgtcggcatgattcgatcgcagtaattttaattaaattttctttttttgaaaaagtaattctttcacctcaaaaaccccaaaaatttccaagtctgaatcttcctatccgtacacaaatcattttcctgcatttgccattcctcttcgatgttcaacaacaatagcgtatccatctccgtctccgacgacgaatcagatgaactcagccgggccagagcccgagtccgtaaaaagcgcaagaaactggggattcgcaacaatggcaacggactctctcgctggcttattagaaagctcttgaaatactggatgttcctgatcttactcccagctgctgcgttgcttctatttgaggtctccagttttgtggtttcaccacacgctggtaaatcgcagaatagctccggctccgaacacagttcgatcacgaaacccagtcaggagaagaaatccgaggggaatttgaatcgactcgatcccactacccgggttgttggcggcgtcagagaacgtaagtaggcatttttatttttttccaaagaactttaatttctgcattggttgacactgtattgtattatattgattttgtttttttttttcggcaatatatttagaattctttgttaattgtatgagatcctaatttgtgaatcatataaggttgcttgaagcttctaccacccgaagaacttgatcatctagatataccttcgagcaaagagtcaactagtcctgttagagaattggtatacatatcggagaataatacaccatttatggaaaggaacattgtgttatccggacagagtacaaacgccacaaggttcaatttgtttacggggaatcaaagtctagatcagagagataatagtttcaaggttataagctgcgttgctcatatactgaccaggttttggttaatttatggtcattatgatgttaaagcttaaaaaggaacaatgtttgttggagatatttctgtagaatcttttgtgtgtgtttaaagcatgccattttctttgaacaatcaggtaaatgccacagctgctgtacactgtggattctacaaccaaaatggtgggtttaagatttctgatgaagatcgagattacatgctaagttgtaaagctgttgtatctacatgtgcatttggtggtggagatgatctttaccaacccattggaatgtcggcggcatcaattagaaaggtatcatctcttgcgtttatgctatcattagtcagctataagagagtaaatttttcttacccttgttgaggatttcattactgcaggtttgttatgttgcattttgggatgaagtcactctagctacgcaggaatcagctggacataaagttggtgaggatggacttattgggaaatggcggattattgttgttagaaatcttcctttctcggatcaaaggttaaatggtaaaatccccaaggtataaatttctgaaccaaaaatagtgaactaaacttttgttagaacctctttgatatttggtgtgtattgtcatcagatgttaggacatcgtctttttcctcacgcaaagtattctatatgggtggattccaagtcccaatttaggagggatcccttaggagttttcgaagcccttctttggcgttcaaattctgtgcttgcaatctcggaacatggagctcgcagcagtgtatatgatgaggcaaaggctgttgtcaagaaaacaaggccaaaccggatgaagtggaggttcaattgacgcaataccgcaaggatggactaccagaggacaagagatttaatgggaagaaaggtatgttctattttcttttcctgtactatttaaataaatgaggatggttcagttggagcatgttaaattctcctgcttttctttcatttttgtatagaattgtttaattctttctgttttctcaaaacgtttatttattttatttttcgacgaaataaagtgaacgattatactcattttgtccatccaagaatcatcttatgttcatgttgtgttgcctatgtacttgcccctttttaaaatgtcttatcgttatatgcaatgtcccaacaatttgaactataatcatgttattgatctgtgcagctctttctgaagcatccgtcatagtgagggagcatacgccaatgaccaatctgcttatgtgtttgtggttcaacgaggtggtgcgtttcacttctcgcgatcagctgagcttcccatacgtattatggcggctaaaagtgcttaagaatataaatatgttcccagtttgcacacgtaaggatcttgttaatagcatgggccatttgcgcaaggctaagcctttgattcattgagtcttagttctgcattagtgttctaagggagaaattttgagggagttagtcattatttgttagtatttgttttggtaaatttcatttatcattgatttctttcatttattggaatttctcataattgattaagaggggttcatattggccttttggaagacacgaaaaaaaaattcctgtacaatggtaaatgactgtgaatcaaattacaaaagacattagctataggaaaaacgacagaatattgtagtgggatatcaaattcaaaatctgaccaaaaaatagaatattcaatttataataaaatcggaaaaggacagtcaacaagtaaacgaagtgatggtgattgtggaattatacgttgaagtagttggctcgtcatgacacttcctaacaactctgtactgattcgatgagtggagttgttatgatatgctatggcattcgacaaaagcgggtttaggaacagcctagtgaaatcattctggggtggttatagagatcttaaagtggattagttgtcccaaaacactaaatggtagctctaaatctaataaagaaaccaaaaaccaaaactcaggtaacatctctcggcaaagatctttccaattcatattcatgatgtggcctaggatcattttctgcacttcagtcttattggccgtattggttgtcattctcttagccttgttttcaccaataccagacaatactctatcaaaaaaccacacaaagccgccttggctagccttgtccttgtacattcagcagccaaaagtcggtggaatcgacacgccacctgttgtgcaatccgacgctcaaggagctttcatttttcaccgaatactgactgaagggcctgaaaacacgtctcgcgtggtaggaaaagcgcagggcatcataattccaacagagcagtttgcacactcaaatttcaacatattgtatcttagctttgatacggctgagtactctggtagtcttagtgttgaggccaaacatgtggcacacaaagacgttgaagagctcactgttcttgggggaacgggctcttttgcttttgcgcgtggactcgctgtttttggtcagagcacttccagacaagataaaacatcatcatcttcagatgatcttgatgccactacttatcatgtgaagcttcagcttaggcttcctaatcaatctagaagttttactattccaggtccaggatgaagccactcattagatttatatatttattcttcaaagtcttattgcgtactataatttttgcttcattgaggattatgatcgaaagccagttgttttctcttcttcttctcagtattacaacgtttgagatcaaatgatgtaattacaattatatattaacatgagtagtcttcgacgtatcgttatataatttataaactaacactgaagattctaaaatatctatcctttgaatccaaggatatatctcagccaatataccaagaaacaaaatgaaaagtaaaacttcaaacgagaaaaattactaaaactatggcacttggatttgcgtattcaagtatgcctgttgaatttggaaggagtttgaaaaataagagaaaaaaatgaccatgccagtcagtatagcatgtggaatctacttttgcttaatcttcatattaaccgtatatattcgtacatttatgga

SEQ ID NO: 243035 - DNA, 1699 bp, Cannabis indica
tatacatagaaagtaacaacaaaaaaaactaaaaaaaaaaagaattaaaaagtacaatagagtaaaagtgtttagaaataaaaattttaaaaaatacttatttgtttaatataatgaagtcccttcatatattttccgaatacaaatattgtgtaactttcagatatttccattattaatctattaaaagattcttagagttttttttttttttttttatttaagcgtttatatattacaacatgttttacctggactcgaattcaggacctccaagactcacacacccacctatgaccactcgagctagcctcaagtagttttaaaaagattcttagattgtagttgtagatttaactttatttctaccaaccctttaaccctatgataagattttagtaatttaataaatacaatatttaatgtgattttattaaaaaatctcaaatttaaatttttcttcataaatatagaaaaatcttaggctgcaagttaccatctcttttctgttttatattttttatttaaaagaagaaaaaaaatgtgctagtgtaaaactttcataacactttcataaataaataaaaaagatgttaaagagaattttaaatgagaaatgttaaaggacaatagttcttaggatatttttatgtgtcaatatttaaaggcagactcacatataagtaaggcgggccaatcgccccctttaaaaaaaaataagaaaaaaatatatatgcattttagttagttttaatatatatttgtaataaaagatgatgtttataatcataatattaattttagtgtaatagttaagcgacttagcatatagattagaggacaaaattttaatcccaccaaaaacaattttttttctttttaagtttacttttgcccctttcccttctcacttaccaaaaaatattacgctctccttattttaaattttaggtctattactattaatattattattagttcaattaagtattgggtctcatataatttataataactgttagaaaataatactatataattaatggaaaaataacatgtctagagatacttaaatagacactattagtgttgagtagcaattctgattttaaatagtgtaatgaaagagttattagatgctgacattgcatcaaccaatagcatgatagaaagttaatccaccgtggaattgagctgtatatggccgccctttcgtttctttagtcgcttacaactttttatatgtagtatagaatagtatagtggaaccttaatggctctggaaaccaataaatttttaatttattcaaataaaataaattagcccattaaagaaattagtcaataaataaagaaaggaaaaaaaataaagtatatataaaagatgaagcgtgcaaaatagctttttgaaacctccatgtgaattgtgattgctaaaagtaatgatcccaattatacaagctaacaaatatttatatataaacagaaaaccataacactctacgaggatcataccaaatgtgcctttttcatagatagtatatatatatatatattacttactcaaaatcaatgtgcatagtagtacaatacctaatttcttatatattaactattgttcaattataatttaaaagctagatcttacctatcaataatattggcgaaacatatttatttatttatttattaatattat

SEQ ID NO: 243036 - DNA, 884 bp, Cannabis indica
aatattaagttatttcgcatattattaatttgattcaattacaatgcgatacattagtaggggccggagccatgtgccctaacagaggctgtgccccccacaattttgaaaatttatgagtccatatataattatattatatatatactatatactagtgaaatttaatttttttaaaaaaattacaagtataaattgaattcctaatacaagatgtgtatgagataataattatttatgaatttttaatattttttgataaaataacgtatgcacctgttgacattggcctttgttgcccttaatttcgcccaaaatacgtggaccaatgcgactacgacacatggatctgagaaacataactctgataaatcaactaaatcttttttggatcaggagtatcaacgaaaaaatacctctcggagaagatatgaaggctccacatactcccggaggtcagagccatggtaaggcacctccgggagataccagactccatttgaacagtcacctcgcatttaatgccgcatgggagaaaacatattgaaactgccataagcaataagtctgacggcgtaacccctctgttgcagctattacgctatgattaataagcctagtgacgactactttatgagggatcacatcaatcaagaagggataaaggattatatccacctaacccctaagatacctatagtataggtcatgtatttcccattttgtatctgctaggaatatgtgcccctactgaaactacacagacagacaagtagttcggttctagggatcaacccaaaaaaacaactataaatactccccgaacacactaagacaggggtcgagaattctgggtttataagaattaaagagagaaaactacc

SEQ ID NO: 243037 - DNA, 1208 bp, Cannabis indica
atactccctcaaagtaaaacccactagctacatcgaggaaagatgcctagtcaaaaagtgatcgcaagatatggtcaaccagcaacgcaataaaaaaaaaacaagtccaaagtagacgattcacttaccaaagtaaggagaaccactcagccaaagagccagagccactcgaccaatggtgattcccaatctcagacatgtataaaataacggcagaagttctacagtcatccaaaaatataaaagaataaaaaatagcaaagtccctagagtttccatgaatatggccacaagaagaaaatcctaatggttacaattgctagacgggcctacatcacgtcgacggttgcctcggtgtgccacgattgcatcaccgcattcagccttaaaggattcaaccatttgtgcagcaaaggaaccaagaatgctatagtcgacgtcagggttttgtatctagaccgcgtatagcaagcatttaatcttgtcctctgaatcttccttgttccttgctttaatggagcagaggcagtgttgcagcttgtcaatcctagctcaaaccctctttgttcgaacgtgtgagtgtgacaaatacctctggcaaatggagagggaatcctcaagttgctgggtaaggctggccactgatatttactcattagttattaaagcttgaagacgattcacttcctcttaaagagctttgaatttacggttggactcctctaagttacttagagcttgttggaggcgcaaaaggtctccctcctcaagaggattagagctaggagtatattacagatgcctgcaaataaaagtcatagttaagaaaaaaaaacatcagcaagtgatgaaaataaagacaatggtaatatgtgctaacccatatgttgcatttgagagcagtctcttggtgtccctccaccgaggagttgtgcagccaagtctagtcaaaaggggtaaactcacccaagtgccggttatacccactaaagcattggttcatctgggattgtgaccacgacagctcatcagagccatagggcaggtgggaaggacctttaggcgagccaaatgggttctggaaaagctgttgaatattgaaggcatcaaatgatacgttagaggcataatccgagcctcccacattcacctccttctgtacctgactgtcgaggccaatgcccgatgaaggaaggtacttgttaggc

SEQ ID NO: 243038 - DNA, 2406 bp, Cannabis indica
acaaaagtccttaaaattaacaatctcaatagtttgggcggaatttttaacggccaaaaaagttcaaggggcacaatttagtacatgtcaaagtttggggggaaaaattactaattagccaagtattaatcacaataatcacaatttgttctgattaaatgctcagcagctccaacaaacccaagaaagcgctgctttaagtttgcattattagtcacaatgactaaaactaaattagtgacaacttttatctaaataatatattttagttacaagtaatttttttttttgtgacgagtcacaaaaaaattatgctgtgactaaaaaattatcactaaaagtagtttttctagtgtaattttgaaacagttattcttttaagtaagtaaataatatttcagtattttattcatattatcttattgttaaattatcttttatattcaattaaaaaattaagcagtatatagtgtgtgctattaactttttggaattgaaaataaaaaaataataagattataaatttttttaacttgaaaatacaattgaattatgttaattatggttacaagttttgtgatccggaagggaagctgtgaatacggagagtagatacaagaagcttagtgtgaatctgaaaagtcttgtgcggaagactttctagaaatcggagggtgtttctaaataactttgtaacacgtatatactgtcacttcagatggattatcattagtccagagatgtacttctggatagctcattgtcagtcttggttattcgtctgagaataagtgcttgtatgaattcaaaagtcttatgagtgttatagctcactaatggtttgtactgaaagcacgttcttcaagctgtcgagaagtattattgctggagatgagttggatcatttaaggcggtgtaaatgagctacaatattctcagagctcttttaggcaacaatgtaaatctatataaatagctatcaaatctttgtaatttgataggatcaaaccattattgcttgagtgaagatcatgatagtgtaagattgaaagagagaaatattttctcgtaatctatgagagtttgtgtaagattgatgtaactttataaacattgagatcaataaagatatatggttactattgttctgaccgagatgtagagcattgcacatggctcaaactcattgaatttggtgttattctttctgttttaatgcttacttcattatttgaattctgagatctcttgttttaatgtttcttgattgtcttgcgtgtttgttagtttggatattgaaccgtaagtcattgattgttttcatttcacacaacaaactggtatcaaagaaaggtttgtaatcatggctgccgcaaaataaaatgttaaaaagtttactagtacgaataactttagattatggaggatgaagataaaagctttgttagttcaccaagggttatatttgaaataagaccatttattcattcaagatgatggaatgttgcaagagagtcgatcacactcgatgatgtgcaagcatccttgaattcgaaagagctaaatcagaagagcgagtcaaagaattctagatatggtgatagattgtttacaaggggaagaagtgagaaaagagaaagtcacaaaggttcaaaagtaaagttaagatctaaatcccaatctggtagctagaagaatctcagatgctagatttgcaagaaatagggcatctgagaatagcatgtctggagaagcataagacgggtgattcaagatcagaaggggatgcaatagtgagtagtgacggctatgactcagctggtgctttgctttcgtcggtctgagggtggaacaggtcgaggttcaacgactctgcttctagaaaatgggctgaataatagtttaggaaaatttaaatcaagcagtcaaagacctcttgcattcacttttggagatgacagtgagaagggagtttaatggaaaatgggaaattgtggcttgaaaattcaaaaatgggggatttgaaaatttgaagtgatgaaaaagaagaaatgagttgggcaaatcaatttatacctcggtcaggatccttgtgatttgaaatggatggcccaaacttcttctttcaaaaagcacattttgatctgatggaaaggaagttaaaaaggtggcatttaagacttgcccctcgcatttattattcatcattgcacgcctcgagtattgtacgcattaaaggaagggtcatttcaatcatactgtcatcattgcaactccacatgcgttgtcaatattacattaaaggtgccacatacgtgccacgcccgtggtaccttcatttatggtcatttacttgatgacggctcgcagatgcatccacaactctagcgatttccacgtgtcaag

SEQ ID NO: 243039 - DNA, 776 bp, Cannabis indica
aagtctataaaccagtaatgaacgagttacaagaaccagaaatgagaccaaaatcaataagcaatcaagtgcaagatatttaggagaaaagaaatcaaacacaagcaattaacaaggttcgaacaagtgattaagaatcacttgcctactcctcggccagaatagccccagtggctttgtctttattgatgctagatgagagaattacaagttgttttacaaggtgttcaattaacacatacactcatgaagcaaagcttcaataacaactcatctcaccaaaactctctctaagatacacactaaactagctctcaaaatctccttaagcccttactccttgaatgctgcaacagatggctatttatagctttagccttcaagactcgatcctaactgtcataactgacagttaggtaaaaccgttaggatcagttgtaaaagtcttagccaactttgtgtagtcctctattagtggccaaacataacaattatccaccttggtcattaatagagggaatgattgatgatgattagggactgaactggtcttgaatcctcacttagcaattgaggatgtttagcaagtctaggcaaagcctaaacttggctaaacttacatactttgtcatcatatcagcagggttctcttttgttccaattttcttcacattaacctccttttcagcaatgatatctctgatgaaatgcagcttgatatctatgtgcttcgatctctcgtgaaacatgggatttttcatcaaatgcagtgcact

SEQ ID NO: 243040 - DNA, 1146 bp, Cannabis indica
ttttttcccattatgtgtcataattagggaaaagccaaatcctgttgatttcaacagactggatctgcttcccacaacattgtaaccttaacatctaaggcacattttgttaaataatgagcaacctattacaatttctagaaatataggacatccccaaacaattactagaggtcagtccgtttttaatatccaaaattagaaatttatggtcacctctacttgtagtagaagaattcactagattaattacattgggagtcagaatgaatatgaaactcacaaatcttcaaattctcagtaatagtagcgatttctttaacgacatgtagcttagccactagtagagtcatgggaattggccaaaacttgtggaaagattccacactcctacttgtatggtcgcagatgattcctccaatactgctgctctcctggttgacgtctatagccacattgacattgatcaccatcgtgtctatctcaggaggggaccagcgctggttgcttgggggattgcttcctagtctctagatcagccttctcgttctagctttgatactcccgtagaatttttgtacctacctcgaaaatatccttacttttggtagaaaaattattgtgtagcgacaaatttctactataccaaagctaccaggacaccatcacaaagagatcaaaattggatccatagatgttttcttttaaattccataagaaaccagacaggtttgggttttattaggttctaatctccttgtgaaggccacaatgtttccaaatttatttgaccaaatggaattcccaaagtgcacgactaattaattcttctctcttcgctcccttgcatctccaacagtttcttattgacattcattctcttgtaaaaaagaaactattagttgggagccacaaatggctcaatttccataaaaattgttgtttgattggtttgtgattcaaaagttgcgttttttaaaaatgtgttttgaaaacaaaaattttaattttataagtgaaaaattatttctaaagatgtgattggttgtagtgtgatttaatgtttttgagttttaaaaaattgaatatgtgattggttgagaatctcaaaataaaaaagtaagagaataattggagagtttttgg

SEQ ID NO: 243041 - DNA, 2435 bp, Cannabis indica
ggctccatttgaacctcccttgagagaggggattcctcatcaaactcctcatcaccatccaagtctctccgcgtggtgatggccattctccgatgtaggtcttgcatttctgcctccaactcctttatccttttgttcgtcctcctttgtgtcttgtgtgtggtttgcattaggccttgcccttggggggccctcatgtgaggtgccccctagtatgaggcctcttgagtgaagtctctttctttggctatagggtgtttccctcaacgtaatctccttataatgggtaggttcgagttgtctcaactggctcattgggctcctgtcttacgacaagccccttccgtgctcatctcttggggtgctattagtggatgatagggaatcacctttgttggcccatgtagttgagatctcgttctctacttggtggcttttatgacgtaaatgtgaggcttgggttttgcctttgagtattctattcaacactttttgcataccagccacagtagtttttagctttttgttcttttggtggaggtcacttattttcgcttcatagtagcgagcccaagagcttcaacccacttgctcttccttcctaggtccatgcctggatgtgtcagggtttgatgacgtaggtgatggaaggctccgcaccagaaatggctttctcggtagttgaatgctcttattgacggggttaaccattggagttgttatcgggtcacgcagtgctgggggctctcttcgagcgtttgcttggcagcacacactttggttgttcatccttttcccttctccagcgacagtaggttggtgttctctaaatattgtggctgattggttttcatctgagtgactcccattttctttgagataatgggaatgttttgacatttcgaaagtgatggtgaatgatttgagaaccaacgtagccagagtttgtcgttcccacagacggcgccaaaatgttaacggtcaaaactcgttaacgatataaataactttttcaactaataatattgataaattttaatggaactttgactttaatgccaagaagaaagaacttcagaatctttaaagtgtttaaaagttatatctcataaattttctttcaatgatacaagttttgtcctccagaaaattcctctttacaatggatgggagagtctaatttgtagtcagccccttctccttacaacttcagctttcccatgcaccctatgactagtcgctttcacctatcattatactgttccctaagcaacttaccatgtttaaaatcctaagttgcactaaaaaaaagttcctttcattttgtacctcggatgaactaaaatttgttcatgttatataagcaggttgagccatcgttgtcctccctgacaccttctcagtaattctgctgatgtatatgagtaaaggcagatgggcggagtcttgaggctgcgtacacgggtgcggggctagctgggcgcgcggcaggctgggtgcgcgggctggctgggcgcgcgacaggttgggcgcgagggatggttgggcgcacaggcgatgtggagctttccttgtcgacgggcataacactaatgactccaaatattacacttagtaatctttgggggtcaataccacatataataaaatctcacaaaaagaccactttacaacactattaataattgtaggactatatttttaacaaactaaaaatttcaagaaatacaattatacatagttcatagtttaaaaaaagatcttaaatagtttatattatatatatggtggtatagtaatattgtgaagggcactatatactttttacatagcatttgattccttctctatttgtttatcctttagattcttgaagcttttgaatcacattcattgggataattccatcaagtatatccaatttcacacgtgcaaataatagtgatcatgattatgtcacatgtgaaattggagaaggataaggttgcagtgcataattattccaaaaaatagaaaatatagtaaatattatttatctataacaactatttatatagccattaatactttattgtaaacatactaaatttattttcttttattttttattatcaaaattaaaataatatgataaataaagaatataaattttataatagttaatgaattagattaattaatagtggtaatataataaataaaaagtataacttatttttttaattggttaaattttttttacgtaaaaagtatactgagtttatgtaaaatattttttttggtaaaattttaaattttttacgattaaataatttttttttttactttttactttatttgtttaaaaaaattaacgatttttattctttatttacatttatgtgtctataaaataatatgaaaataataagaaaatacacatataaaataaataa

SEQ ID NO: 243042 - DNA, 1472 bp, Cannabis indica
gaaatatttctaacttgaagaggctgcctcgcagctataagtactagccacaagatcctaaaactatcgacatcacccttctcaaacgaatatctaccaaaacttgttttggggcaacataacacacggttcctctcatactaggagtactactatagcccccactctctgggatttctccactactagagttatgactaccacttcgccaacctcgccacagttcaccactaagcccatctaaccaccaatctaaactacccttactcctaccattgaatctcttttcccctttacgtacaatttatcatcatgtaatcaccaactgtcgccattatctaccaaactcgctgttcccttctgttgttgcttcattcttttcttctttttcttagctagctcttcatagtctcttccttccaccaatccatcacataccttcttttttcctttttcttcaacattttggcactcttttcttcatccatttgtatcaccaatccaattgcttcttattactcttccttttcttcttctcagttttccgagaagataaagctagaaaatgcagttccaaaatcttaggcctctagttattgatctcagtaccgatccactccagcacagagtccataaccttgagagaaatctcttggttggtcttaggaagccaaccgtaaaaaattgggtcaaagccccttgactaaggtggcgagagaggcaacaaaagagtcggtggtgtggcgtaagacggagtaagggaggctgtgaggtggtttggagactgagtcagcttctagggcagttctcttgcaagtgatcttatggaagtacacgatgagaaagaagagaaaagagaaagcagcgcttgtggcggtagtggctgtcaggggcggaagtagaggaataagtgtataattgcaaaagaaatatatttgtgaattatatttcatatgaccgtataaatgaataaaaagtgagtaggctcaaaaaattaatatcatattaattaacaaaattcgccacaattgtcatatttaactaataatttaggttagagacaataataccctaaaatcggtgaaacttaataaattgaaatatcatattgcaataacacaattgttataaattataaggtgtttttataatgcacatctctaactaaaagagtcacgcggcagaaagtttgaattttattttcggcgtgttaacattttttaattttttttaaaaattttgcaggatgtcttaaataactataatgtacacgaccataaaaaaatagactaaaaaagtctctcgaaggccgaaacatgtaggagtatatcagtgcgccatttttaaaaatgtgtattaaaaatgtgtattgttttcggcgtaaattttttaaatttatcaaaatgttgtaaaatgtcttaaataactataatatacacattatataaaaaaatagactaaaaaagtttgtc

SEQ ID NO: 243043 - DNA, 1220 bp, Cannabis indica
acatagcacttctccaaatgcaagtaaactctgttgtagattatcatatcaataaaaccctatgtctgataaatctaggaaactttattcacatagtcatgtttactttccaatgtgttgacggcacaataaacaggatcaagtatgtgaaaaggatttcagatgaatttatacattatgtacatataatcatgaaagaaatcatgtgaaccatgcaacattaaatgttatttctgatctatattaataagtaaatctgattatattgaaatgcgttttatttagggcataaaacccaacaagatcaagaaagaagtgcaagagagagaaattgagacaagggtgggcaaagctcatggtggttgtgacgtggagcttttgaccgaagcaattacatctacaatttcatgatttgattgagatgtttacataaagaaaaaaattattatttaaaaaaaaattaagataaaaaaaaagtttgtgttttaaagtttaaatttattttataatttaaaatttattaaaatcttaactcatatataaaattttaggtgcttttacaatacacccctataaaaataggtgtctctctatctgttttgggatctataaattttttttaatttaatcttttcatagtcgcgaatattatagttatttaagacgtcttaaaaaatttcaaaaaatgtaaaataatttacaatatagaaagtattatttcaacaatcaagccaggagttatgaaacttggtcctcttgtctctaaatctcaggcagaattcttgatgaaggagttcccaacgaagatgtcaagaaggctgttttttaattcatggagtgaaagctcccggtccagatggctttaattagggatgacatttcagaggctgtcctctcttttttgcatccaggttagatctttaaagaaattaacactactgttttaacacttatccccaaatgtaagtgtcttaattcagttagtgatttcagaactattgcatgttttaatgttatctacaaagttgctactaagctaatttgttcccaattgaaagtctcttgcctgagcttgtagcacagaaccagggggtttgtttctggcaaatttattgctcataacattatgatctgccaggatttcatgaggcattatggaaggaaaaactcaaaggcaagatgtatgattaatgtaacgccctaatgctaaggcacgctac

SEQ ID NO: 243044 - DNA, 1169 bp, Cannabis indica
tcagttggaaccacctcctcatctaccacaacttttttccccttagtcaccttctgaaacccatctccatcaatttcctcttcttccttactttgtttttattttggaacccaaatctgcttccccttctcctccattgtctctttctttctgcagttatttgtctcatgaccaataccagcacaatgatagcatacaaggggaatccattcatacttaacctccaagtcaatatcttgattaaattcatcagtaaaagaagtcgagctagagaattcctgtgataggctaacatgtataagaatcctgggatattgtagtcgttctctattttttgtgatattgtccacttgcaacgggtctccaatttggctgacaatcttaaagagagatgtttcccccaatacttgatatccagtcctttcagctgaatctatgtagggacattagtaacttcttccttagtaaagtcgtcaatgggattctatggcttcatcaccataagcttcctatcaaagaatacatatccttgctgcatcaccttgtccctttgttccatgttttgaaatcgtatgatgaaaatccctttagccaacaacctaactttcaccacagattctttccatatgcgtctcgcgtatccatcgagaatgttaacaggaggatttgcaccaattacatagcaaacaagagatggctgccagtaattgacttcatcctcaatattagcaaactcgatcttcactttactcttcgaactctacagtttctcctcacttttcaaatttgagcccttaaacgcactttcaagatttcgaacaatgttagatctaagtattggaggagaaggattcttcccaatacttacatcctgagagaccttatttcctacatccagccaagccgaaaaatcctgctaaaactcacttcgttgaaacgcatcaatcgcagcaggtgaagagaaatgttcttggtactgttccattgaatctgttgcctctggtacttctaattcctaaactccaagtattgcatccatagatctggtcttgatgaccctatccgaggatgaaggccctgtcttcttgccctcagctttaactttcctggctagtttcgtcatttttgccatagctccggtggatcaccgaaagagagagagagagaga

SEQ ID NO: 243045 - DNA, 1035 bp, Cannabis indica
gcttttatgagcggaatggactctttttcttgtttagatgtttcaccttacattctataacaaactaaatcaatatctatgactaaaggcaagtgtagaattagaaatcaaatatattacaatattaactgtgaaaattatatctactataacaaaagatactatttaatataaatagtatataactgaagcgagcatttttttattaatatgtacacagaggtagagtttgaaaaatccttaacccaaaaaaataaaaataaataaataaaaaattaaaaaaaacaaaaggaaagaaaaaattagaattaaattgactatagaataagagggaataagattaaattgactcgtgtatagatttttttttttgttatgaaagacttttataaatattaacgggtaatttaaatatgtaattagataccatattttaaatttaatccgataacttcacaaatttaactaccatatctactacaacatttttacatatgcgtttagaaaaccaaagtgcaacaagaagtaattatataatttaatatttttgtttggtccctaaaaaaaaaatatgattgtttgaccatataattgtataattaaaggtaattgataaattccaattacactctccaatttttatagttccattaaatttgagtataattatactatgtaattactaaaaactttcatttttaaatattaactgtggggtttattcactggtgcaagtgattttttttggacacttttgatagttgaatttgttagttaattcagttaagttggttggttcttgtacactttgtaatggtctagaccactttggtattcttttggtgctgagagtgtttattgttgtaaagagcatgagagtttataactcatgattatcaagtgaacctattttcagtaggagactccatttagtgttgttcttgtccatacttgtactccatctgagcttcatcttcaagcaataaagacaaagcctggaattcctcccaaagagtaaatccaagtgttacagct

SEQ ID NO: 243046 - DNA, 818 bp, Cannabis indica
aaaacaaaacagaataattaaaacaacagcaaaactagtaacaaacaacggtgaaaacttaacacagtataaaatttacacaataattttttaagaacaaaatatagtattttttaaaaaaattccctatcataaaagtaaaataattaaaattttcaatatggtgtaaatattctttattttcaacataatcagaatattgcgtgtcacaaattgtgtgacaaaatcttgtggatcactttaattgggacgatttttttttttctgaatgaatggacaaatgaattgggacgaatttctggtcctattgttaattaatatccccttatataatatttttgaagctcatattccctatatgatcattactgtatattccctatagatcattactcttaacatccatttattgttaggtatactaagttttctcctaaataaaattcaagttatgtttatattcagaattttaatgtcaaaagtaattataaaataatcacgaccaaatggtgtgattatcttcaggaagaaaattaagaagtataaatttttttccatagccaaagttaactaatgacaaagttcaaaacataatcttaaaaaggggaaaaacgaataccggcatggaataatagttcatagttggacggtgattgcaaggactttgtaaaaaagaaattaagaaatattattatataaagcttaagtcattacaatatacacgtgacaaatctattttctaatagtaaaaaaatttgaagactaaaccaaattggtggtggttacccgaaagagaatcagaggctagagttctctct

SEQ ID NO: 243047 - DNA, 659 bp, Cannabis indica
tagtcgaaatacaatacaaagggtgtgagtgagtgtgtaatgaaacaattttggagcttctatttatacctcgtctagcgttaaacttcgagcaacttctccatactcgattcttctagatttcgacacgtggatttacctcgggatttgtttacagatatttaagacacagattcctttcatctaattttattttatttttattttttgtctagatcgaattaggtctattttcattttttcctcactaatgtaatataaggtgatattattatcataaaattgtggccggggacttatactaaaaaaaggaaaaggaatatttgtagcaaaaatgttataaatttttaattttatatacttaaatattatatattttttttcgagaattaaatactttaagttataatttctattacttctgtcattacttttctattaaaattatattcaaacataaaaatatttactgatataaatgtctaatcatttaaattttatacatttatatatcacatgtttttttttttacttttatcattaccagtttattaaattctattaaaataaactaaattaacacgtgtcaacatattaatagttcactcatatatattctcaataaaaaaaattattaaataattttaaaatttattaaa

SEQ ID NO: 243048 - DNA, 736 bp, Cannabis indica
attttcttttcaaaaaaaaaaaagagtaatcattttgcgaaaagaacgataatcacttttctttttatagaaagaaaaatgataatataaacaaattaaaagtaaatccagattacaatataaacaaattattaggtagcaaaatcacgaaagatttatttattatacatttaaggaaagattgcaatataaatatcccacgttttattataaataaataggtgtttagggtgatgatgaaaatgggcggaggtaaatcctctattttattatttttctatataatataattgaattgaatgatttgattgattagttttctgaatctatactcaggtagcaatatggatcaacaatttgaagggcagagttttagtgggcaacaaaacgttggattctctccaagcaatttaagtattggggttcattttttgaacaatgatcaccacacttttcaacccaatcatttgtttcctactaaccacaccaattggagttggagtactagtccttgcctcaatttgaatccctattctcattcgcattcttattcttataattcgaatccccctcccatatcgcttttcattactataccgtattggtcatttactccaaattctctcccgcacccacaaactgcttattctcccttttcgccaatatactattactgtgctggaacactaattagtcatttcccaaatgagcctgcaggaccaatgggtctgtcgcg

SEQ ID NO: 243049 - DNA, 674 bp, Cannabis indica
gtgtaattattattattattttaaaagagaaaggtttataaataattattcatatttgagtaagtaaatttttataagcttcataaatcaaatgtttttgatattttatttgtacgtattagcaaataatgataacacacgtgtattgtctaaaatattactttaactttatattataatcaccatgcgaaaaaaaaaaactgtatattataatctgtgctgtaaatttattgtcttgatttaataaaattaaaacaactgataaagtagaatcattatgctcgattaactaaattttggatatataattataggaatattatgtggaaaataattaattttaatatatttgtgcacttaaatatatgtatatttttgacaataaaagagtcttttgtttatattttggttcgttaagcgacaccaaatattttctgtatatttttaacttgaaaaatgctaaaagataccagtggtgtttagtattcgtttacatgttaatatcattattggtcaagtatcgggttccatataatctaatataataatttttagaaagtatcgctagctaatcacaaaaaggatataggtgctagacaccactggtgcccaataacattgctcttttaccataaatatttacatagggaaatttgattttctatacttagaaa

SEQ ID NO: 243050 - DNA, 513 bp, Cannabis indica
gtgttaaatatatatatatatatcattactcatatatatatttgtctagcttgaaaaatattgtaagcatttatattatagtaatcataattaaataattaaacataccataattgttgactgtgtcaaggacaaaagggaaaatccgtggaacgacatcgtctgagagattgatggatttggaccttgcctctttgatcatcttaaagctctctctcaagtccccaaacagaaatctgtaaggggtgcccttaagaccttgctttctaaggcacttttcaagccttttaggtctaaaccatacccagttcgcagctctcaaaatccatgtcacagttatgactatgccaagtaatttagtacatagtgaaaaaacagaggagacctccatttcttttctgctttttttactttttttggtgagactacttattattgatgaagatatgtgggtatttatttattcgtaagagagagagagagagagagagagagagagagagagaaagaact

SEQ ID NO: 243051 - DNA, 733 bp, Cannabis indica
tttttcgttgattattctaattcaaaatacaatttaataaacatgttaccaaggataaagaaagtagggagttatggattgacatagaaccatgttgtggattttaataaatattatgaattttataatttatattttaatatagaggagtgctacttacaaccttttattacaatctctcagtcaacatctacgtctgaaatcacatatcaaaatatttttattttttttttcacagcgatattcgttataattacagtatcatctctgtaaatttttgaaaattttgaatagtttacagtacttaaatagagtttatgataatccaatttactacgcgtattcaaaaacttcaaatgtatttttggcactataaaatatttgaatttttttaaaatttacaaaaactaccataaaaagttttaaaaaaatattttagcatgtgtttttagacacataaattaactaaaaaattgtaataaaaaattgacgatagtactcatttttaaaataaaaattgtacaaaataaattttagttggtttttattataaatttagtattatcatgggcatttgtaatggagattatatatgtataagggtataattggcatttgcacaatactatctaaataatattcaatgaaaataatataacaagttaagttgataactgttcccaaccaattgattgtcaattagacgtattaatgttcattttttttttttttt

SEQ ID NO: 243052 - DNA, 746 bp, Cannabis indica
caaactttttaactagtagtttatttttatttaaaggataacaaacaagttttttaagaagttatgggtggggtgcacttattattaagaaataaaataataaataaaaaaattaaaaatatctattttggtcattttacaataggttaaatatgtaattaaatatttggggtcatgtaattttaattggggagttttatttgcaccccataaaattataaatacatcctattattaaaaaaaatataaatttaaataatttttaaaaattactcttaatatttttttaaaattttttcctcacattattttatgttaatttcaatacttattttaattttatttttataattttttctaactcatgtatatattttttttattttttttctaaaaaaatttcatataatttttatttaattttttatcataatatttaaaatataatttatttttatttgataggtacaatttttaagaatgtgaattgaaagaaaaaaattgaaaaaaaaattaatacaattaaatatataaattttatatagaataaaatattattaaaatagggtgtctttataaatttttggagtgtaaataaaatttatctttttaactaatgtaatgatattacatatcaaccaataacttagagaggccttaaattcaaacatatgatctttccttttttcctaccttttcaataccaattaattattagaacaatgtgatatctaaaagaaaacaat

SEQ ID NO: 243053 - DNA, 789 bp, Cannabis indica
catgatctttggaaggaagtgtgtcattggttggtggggagtggtgaaacaatttgtatacggaaggactcgggtccctaaagactatataggtcggtcttactcgtttaggggtggggttggtgtgaataaggtgggtggtcttatgcttgatgtgagttggtggaatattcctctcatttaggatatttttgatgtcacagaggctaattccattttttttatttctttttctagctttgatagaaatgatagattaatttataatttttctaacaatggctagtttacgaataaaagttgttattggagctcagttgctcgacttgggtggggtcaaaattcgtccttttctggccttctaaatggtggaaatttctttggaagctctctcttcccctaaagataaagaatatttttttggaaagatagcttgaatttcgtaccatcttatgataatctgactagacacggaatgtatgattctaaagtatgtcctatctgtttatagaataatgaagcaactcttcatggcttgtggttgtgtccttcccataaatccattcaatatgggtggggttttgatagtttgagatggcatctaacttctatgaactgttggctggggttatggatatcttgtccaaagcagaagttaaaaattttctcatcctttgttggcaatacctttttgcatgcccaaaataatcttgatccgtcgacccttttgagttctaaaggctaacgcttgtcatatagggggagaaggtcctgagttgaattaaggga

SEQ ID NO: 243054 - DNA, 2740 bp, Cannabis indica
tagtaattatgtgtattcaaatcctagcctacatatattatcaattaattacacataaaatcaagtcctgacataagtaaacaacaacatgacgatcatgaccattttataatactgattctggcaataagtattgtaggcttttgatatttttataatatttatatataatcgtattttccaaaagcttgaggggcctatagttggttacctgtctaactaaatctaagcagagatgatacttgatgtccctcctaagaccctcaggaaggttcctaatcatctcacattcatcgacgccgcgcatggcggcccaacgctggcgctcatagttccgaacacgttgcctgaagcccggaggcaaatgcctcttcctcatccaccactctatgttcctcatcttgagttgcattgcttgttttttggacgtggttgcatgcagaaacacctatatattataataataagtacgtacatgcattaattaataacataatatatagataatgtaatatattatgtattaataatcgtttgaattagtaagatagatctattagtgacttaatttcaataccttgatgtttccaatcaacatggtaactaaaaggagtccactagtcaagacaatgatattgaacacaacttctaaccattcggttgtgctctctaagttcccaaatgtgctgcaataatagtatatatttacagtaattaattataactaaagagcacattaaagataaaaacatgtcaaggtgtagaacaagtggaatgatttatactaattacgaagtctagtactgctattcaatgtttatcatcaaacatgtgttactgttattattattaatttattattatgaatgtatactctagtaatctgttttcatttgttccttcttctctttttattttaactaagaattatgggggatttattactacattagatttcaaccaaaccaccatttcttaggattatttcattattcttaataatttctaaattatatgtacttttaacttttgagtttgaaaatttctttattatattacggccaaaactgaaaaatattatttagcttaaacatgaaaatgatggtgcacaactgtttattgttcccttggttcaaaagaaagtgacacatcaatatcagaccaaacctcattccactatgagtctatgactagtctaaaatcataaaaatagaaagaaaaataaaataaaaaaaattattacccccacattaccctacagttctaaaccaattaaagaacaaaaagtttaaaccaccaaatttcttttacctaccccaatagataaaaaaacaaaaaacatttcactaaaattagtgatatgaatttgaatttgacaataagtgaaaaatcaaatcacgaaaagaaatggtgtaatattagcttcctacacaattcacccatgatatattaaaatgtagaaaagaaaagtagtaaaaagttcacctgataccaaactaatatatatatatatatacatatacatatacatatggatataattttgtcatgttattgtactttcacggattataatccgtgatatacggcaaccgtcagatgagtgagttatttgatctgacggctgagattaatctaggagtaattagggttaaaaaatagaaacgtaccctggtactcatttaatgtaacctgagacccatgtcatgtaccacggaatacattccgtgaaagtacatcacgagacaaaatcatattcctatatatatatataaatatttattacaatatatcactacaaaaaatatctattgatatatttttagacacaacataatttttttgtgactaaatgtgacttttagtcacaataaaaagttacttataactaaaatatagaatttagatacaagttattactaatttacttttagtcacaacaagtattgtgattaattaaaagaacctttagtcacaataaattgtgatttttgtgattaatacatttagccactgactttatagtcacaacatataaattatgatttataattagtcacaattctttttacttttagtcacaaattttgttgtgactaaaagtaagattttttatagtgtgtaatttgagaaaatgttagactataaaaatactaaaagggcttatttagaagggcttattagtaaattgtaaagggtactattgtgcaatatggattgagaaaataaattttggttcaattggaagattgacaatgtctcgaagagtgcatttcaaagatttgttctgtcttgaagaggaccagttacctattattggtactttcattaagagtaattactgtgagagactcaatgtaaaaactctcagccattaaaggtgaagaaatcgttcaactctttaaatctatagagttgagttttgatgctcaaatgaaggcaatgaaaccgcatcttctcaatgctcaattggagaaactagatgccaagtttcaaagctatctcacatcaatggagacactttcggttctgacgtcttaggtgtcacctacttcgccaaaagtgaaggactacatagatggccctattgaaccattgatcaacacgaatccattaaagaagcctcttgacctcgtcggcagcaacatttctaatggatccaatcaaggtagatcaaaatcaattctagttcgatctacgttgatgacagtagctcaaagattactgaagtcggaaaaga

SEQ ID NO: 243055 - DNA, 1895 bp, Cannabis indica
gttataagataggataccactactaattaattaagtataataatatatatttatttatatatataggactagtcttttggtctaggtttgttaggcctaattcatagtaagaaaaaatagttatacccctttaaataaatacttttattttattaattacaaaaaataactataaatttttttaagttaatagttacaaaaatattttttaataatttattgtatatatatttatgtcgaccactaaaaaacaaataatgtatatatatatatatatatatatatatgtcaatttgaggtggaaatgaaaaatgacattcatgcaatgcaatggatgaccaaatttgtggtttacattaattgatcgattgttctaaccaaactatatatccattactattcccctttttgttgaatttgatttaatttaatttatttttatgtatatatatatttacatattttatatatacaatacaatataattgagaatcatcatatagatcaataaataaagtagtattgaaaatgactagtcttgttttggttgcatcctctcattactataatattattattactccatttttgcttctctatataatagacctttattacactctattcttctcatcaaacaagcttatattattattcttcttattatataagctataataacttcgaggtatctttctctctatatatattgttgtagttttatttttctttgaattaattttttcaatattaattagtcagattagttagtagtgtcatctactttttatatataattaaaatagaaattttttcaataatatctatagtattacactattttttttaatgattttgttagctgtgattgtaaaaaaaaatttacttttagttacaacaaaattcgtaactaaaagtaaaaaaaaaattataactaattataaaatatcattcttatattgtgactaaaaattattactactaaaagtaactatttttcgcatgaacttattatttaattttttacatatgtataaaatgcagaagaaatcttcatatataactaaacaaggtatggagtcaggccatattgtcaatgaggttgtgctaaagaataaggttagtaataatactatatatatatatatatatagtactataaaattaaataaatatatagttatatatagaattattaaataaatttaattataaacattaattttgaactattagattttaatttaataataaataataaaaaagaaatttgattttttctatgtttaatttaactacttaattaaaaaaagatattaaaaaaaaatatctatttttacactatatgaaaaatatatttatatataaatatttaaatctaaatttaatttttttttttggcttaattttttttaagccgataaaatatcctcagtttatataatataaaaataagaaatttttataattagataaaaaaaattaagtataaaaactctaattttttaatactactaatttataagtaatattcagtccctatatataataatatttatatgattaaatgtatagtacaaaatgatgagcattatccaagaagtagttagtagtacaaaaaatctttagtttctcttgctctattctaactatattctcaacaatattgttttattattattattattattattattatttggaaattactaatatataaggacaattatatatcttaggccctagtacttccaatgccagctttaatatattttcattttgtacttttttttttcacaaataatatagggtaaataacacttggaccttctgttttacaaaagttattaattggaccctgtgttttgttaaatgataaaatggaccctgtattt

SEQ ID NO: 243056 - DNA, 1001 bp, Cannabis indica
tcattcattaaaaaccctatagaaataagtaccgtgatcatatttttgtttgtataacaagtcttgtccatatataaaataattcacatccaacgacaattaattatataataattaaaatgatgagtcatattagattaatcaggtagatatgcagaatcaaatgtcggttactattaaacaaaggtttagaaaaaagaaattaaataataattagtatataaaaatcaatgcagtgattgtcaactagaaataattaagaagaagaagaaggtgtgcgtgtggcttagtgttttccatgattggtaagtgattagagtacgtggatgtataatttttttatactaaagaatcttatttatttctaattacaattttgttggtacatgattttatttaatttaataagttgaaagcttttggggattggatatgtcattgaaagagtttggaggtgtttagtaatgggcctaccatgttaggagcacatgcaaagtcccggccttagcggtccatgatattcatgcatcaatatcaaaaagaaaaaaaatatggttattttcatctctatttatattacaaatttatatgtgaatacttaattatatatagatatactatagttgcttttatactacaccccatcaaaaagatgtatcgatggaactcctaactgtttcagtatctataagaatataagatattttgcaaaattttaagaaatttgaaaaaaatttgtaatataaaaaattaatatttaaactgtctatttcacacgcgtataaaataaaaagttactcgtgtaaaaaactctttgaacactgtttttgacgtgttaaattttttcgaaatttctcaaaattttgtgaaatgtcttacataactataatgtatacgaccataaaaaaaaaaatcagactacgtaattttttgaataccgaaataaattagggtgcatcaatacacttattttaaaggagtgtattgtaaaattttacatt

SEQ ID NO: 243057 - DNA, 1154 bp, Cannabis indica
ataatttttttaaaatttttttggtattcaaaacttactataaaattgtatcaataataatcacttcaatgattctttagtcatattcatataattaaatacaatattttattagaactatgtgagtcatattgaaaactaatagtaattacaattttttttttgaaggaaatagtaattacaattaatggaaaagattttggtgatttgaatatccatataaataatattttataacagtgttaatatttttatttatttttctttcacattattttgtgttaattttaatatttaattttattttatttttataagtttttttttaaaatcatgtatattttttaagaatgtaaattggaagaaataaattaaaaaaaaatagtataataaaagatatatattttatgtaaaaaaaaattattgatttagggtgcttgtacaaatttttggatacataccgtataataaatcataattttttttgactgttgattcaaatttaattataaaaaaaagattataaatgcttattttgtggggctgccgatatgattttgtttgaattaggaaaaataaaaatatatccaaaattttcttaaaaaaaaaccaatatatttacgttttaatttatgatattatatataggctacaacaattcattgttttgatttgacttgatttcataataatggcgatggtgttatataattcgaaattaccagatgaaatcattgaaaatataattttaagattagatgcaaaatctgtgctacgttccaagtgtgtttgcaaatgttggttgtccctaataagtgatccgttcttcatgaatgcccaccacaaaagacaagtagctcataccatccaaatcagtgaatacgctagaggagggttggaaacaatggagtgctcaattcatacctctcaaaactttgatcagatttcatatttcaacatattatttcccaatgaaaagtataagaagatggaattggcctttgtaggttgtcattatggtttagtttgtttgctagatgcaaaccataattctatttacctttggaacccggcaaccaaaaaacataaaaaactccctccatccccatatgcgtttttataagatcaatagtttgtatggatttggatacgaa

SEQ ID NO: 243058 - DNA, 537 bp, Cannabis indica
aaatttaacacaaaaataataagaaattaataaattataaatagtactatcaacaatactaaatatttttacgcagctttgcagttaaatctgcatgttctacgagtctatcttattcaagataatttttttagtacaatatacaattgaacgtatttctgtttttctctctaaaattctgcatccctttttttgtgggatttgcccctatttataagaatataggttggaagttatttatatttaaattcaattataatcatttaatgaaacgtgagaattgatcacgtttcatttaaatcgtatgttggataatactagataatcgcttaactgcatattattcttatccttaaagatggtcaatgttgatttggacaatagcatctcgcttaactcgtcgatgattaatgttgatttggacaatcatctcttgcctatttccaagttattatccttagctattataatgtagaaaatacgctaaagtgttaacaaatgatccgcctagtccagtttcttatgaatagcgaggtg

SEQ ID NO: 243059 - DNA, 748 bp, Cannabis indica
gttttgcatccaattaattaaatttatatatatagagaaattttttataataggaacacctaatttgtttctatagtataaagacatttataaatcagtgattaagttgaattttggaagtttatactatttattatgaaattgtatgcacgttattttaatagctttaattttgttaaaaaaaattcctaaataattataatatataccattataaattttgaaagatggttttagaaatcaaataggcaaaaattcaattttctttctcataaaaaaaaagtcttgtctttttacatggtaatggtttgttcctatattgtattttgaagtgttgagtcatcacactgttgttgtttttgttaccaattttcataacttgtgttcggtttatcatggttcctatgaatcggtttaatcctacattagaagaatagtatgatgtgttaaatatagaggatgatgaggatgaggggatactatatgatgagaggaagatttatcagataccgatgataggtggcgccttgttggtctcttccttacgaaaagatcaattgattttcaagcaatgcagaataagatggcagtgttatggcagccaggtcaaggtgtctacataaaagaactggagaataatctatacctatttcaattctaccatgagatggagttatggaagggagtccgtagacatttgatcatgtttcactgatttttgaacgccttaaacaaggagacaatccgc

SEQ ID NO: 243060 - DNA, 666 bp, Cannabis indica
aaaaacagtatttttgtaaaattcccttaatttattactcggtcgacttgcaaaattgatagctatttctaatcaagataaaagtgcgtggtttggcacttacaacatactaagtatttgttagtacagttttttaattattttttgctatagcaagtataaccttagctatatccattaatagtaagaactaattgtagttattatacttaccgtttactaatttatatattatgaattttattagataatattgtactgcaacttttctttatatatcgtcaatacatacatataatcaaatgcgtgtagggaaaattttaaagattttttttttccgtagttcacttatctcggcagttccaaatgtagagattgcatgcgagacagttctaggtgttgaaattgcccaaatctataagaagatggtatgcctatctcaacggttcaagataaaaactactgagattgcttatcctatctcggcgtttctcaactgccgtgattggtcttgaccctatttcgtcggtcaaatcatctacaatcgataacctctgaaataggtctattacgggagttcttaattattgagatacagtaattttctgatagtgtagaataaacaaataaatcataaaaaacattctaaagctcataatggcaata

SEQ ID NO: 243061 - DNA, 824 bp, Cannabis indica
ctgtggaaagaggcctgattccgatctcaaagttgtaatcgcccaagacatcactctcagctattcggctaatacttatagatgacctcactgtctcgagcctcagaatacaaaggtaggagcaacacgcagacgaaaagttgtgttctccacggatgaaacctcatggaagccaagagaagaagagccgcaacacgaagtctggaactgctgcaattctcatcattcgataggagagaccactaatgtttgtgttactcatgctgacattctcgcttctgcttcgtctaccactgctcgcgtaggtgcttccctctaggcggaacgctcccttccagatcgtgacaaggcttttttgatcatatctcttggtcttccttgttgttgttatattcatttcctttttccttccccgtggcattagctttgattgcccctacttatgacgagagacagaagaagtaggtgcaaagccttgactttcaaagtccaaacaagctttctttgtttgcacctttgagtctctgttacagaagtggaaggcccagttgggttggtagttttgctctagagggctagtctttcttcattctcaggtttgttattgcctgccaagagtggatggattggttgccgtggggccactaaatactaatggttgtgaatgttttcaatgatttaccaataaaaataggggaaggagaaaactaacctaaaagagggcataaaagactgtctgaatcttcctaaagtagcagaagacatgaaagtcactaaacagccttcagggcagtgaaactttagtaaacctgatatggtttaat

SEQ ID NO: 243062 - DNA, 567 bp, Cannabis indica
ttttttgaagaactactagaggtcagttggttacgacttttgtgaagtagtgagtgatttcttttggtcaggaacaatgcacaagggtataaatgcaactaatgtggtgctcattttaaaagttgccaatccaaagaaagcctcccatatcaggtctatctccccgtgtaatgtggtttacaaagttatctcgaaaatcattgctaatagaattagacctattctccctagattgatcttctccactcaagcagtgttcgttcctggtaggaacatgttggaattctatgccctaaataaaatccatttcaatataattttatttgttatcaattaaagattagaagtcatttatgtttacatgtatttttcatgtttatggtttaatatacaatttgtgttaaatctagaacatatagttattcacaattacagtgatgtcaacacagtggaaggtaattgtgattatatgtttcaaaagactatgtcccatgattcatcagtgcactggatttacactgatgtgatagacaactataaagtttacttacacctttgataagtatt

SEQ ID NO: 243063 - DNA, 1426 bp, Cannabis indica
tttttaaaattttcacatttttctaaatttcaggaccgaccctgttcttcgaataagttaacaacttgtttactatcatattttttgtggtcatccatccatacacacaacacacaaatcaacaaaacaatttcaaacaacaaaatacctggttttgtggtcatccaaggaaagcccaatcttaatcatatgagatagtctaacaacctcagcatgagagagcaaatcttcagacacaacacccttaacataacccttaaacctataatgattttgaagattaaaagcagcagaggtaatggaacttgttgtggttttaaaagctttcttcctagatgtaatcctcctctgacgagcagaaacaccagaacaagtaattggaagctgttctttgttgtttttcctttgaaaagaaagtgtccattgtttttcaagcatggatttttgtaacaaaagaagtgcctctaaatcacttgaatcatgaaaccattgaggttgaggaggaagtgataagcttgaagaaacaacatcaacattctctttaagagctctaatgggttgagactgagaggagtggttgtgattttgggggctctttgaagatgggaaatttgaagcagcattaattatggttttaggtaagtaagaagaatgattatcattgttattagtaacaaaagaaagcttatctgagatatctgagtatgaagatgatgaagaacacagaagcctttttccacttgcagcagcagtgttgagaccaattacagcagctgtagccattggtagagacaatagattcaactaatcatcacaacccagtttcaaagattgaatctttagcaataataattaaatcccagattggaatctaatctaatctgggcaaaccatgaccgaaactagtggctttaataaatggttaagagtagtagttgttgttgttgttcaacaaaacaaggttgcatagtcataggcggtgaaatccaagtaaataatattatatttaatttattttattttatttatccatttgtatgaacagaaataaaataaaaataaaaaataaaaaagagggaaattagaagaagatatagaatgatgagatatgattggttgaaacagatattggggttctgatttatgtggtttgtgctttgccatatattacattacatgtatccaaaatcttcaatacctctatctctctctctctttatgatgaatgatgatgatcattctagccaattttatttatttatttattttgataaataatatttggcatttcttgaaccacaaacaaaccaaattagtaatattattttaaattttttattttacaaaatttacccataataaattaaatttatatttttgtacattttttatattgagataaaaagtactattttaaaaaatataa

SEQ ID NO: 243064 - DNA, 2992 bp, Cannabis indica
atattaaaacaaataaaatttataatttccttaggtttttactcctaaaaaacatatgatcattattactaaggaaaagttaatacgaaagtccaaacccacaagcttaatatttttatatgtattaaaaatcatgaacttcatccatagtaggatttttttttttttttcttttttttgcaaagtcaattctttataagtaggataacaaatcttttcacattttcaataaggaaactcaagcaccaaattaaacaaacaatccctcaaccaatggtgatttcttaataatgatcatcaatccaaaacagatatttagagagcaaaagactggtaaatcacatataatagatgagttagaagaaaatggcaacaattatcattcaacattttaaacatggacattcaataacccacttttgatctatttttgttgggaaacaaaacctttaaatgaaatattgttgacataagaataatatttcatatatagtttgtttgctactaattttaacttctttttctttttcaaatgttccatggtaaaacttaattataagtaaccctaaatatgtggtgtcaatgaagaggagaaacttgtttgtgttcaaacccaaagagaggcacaagtaacataacaatatgtaatattgcaatatatgatataccactcacttagagaaattatccaagaatggaagttgcccaataaaattaacttcactgttttgactaatgacttttgagaaaaagatttgaaatacaataattgtaagtaatgatatactaaactagttactgggggatctacaactcatcatttacctagtcctcaccaaaaacattcatcagtagagagatttgagtctggttttctccgaaaatgtcctcatagcctttgctaccacttcttctctgacaaggaaataagctgtgcaatgcaatatgtagaaatatgttagaaatggatcagtgttttaatttcatcaccgtggcatagctgcttttcagttgaatttcaacataaagacagataattcacgagttcacaatccatactaacacggatgtaactacagtaaacaagcagataatgctccctaaaaaaactaatgctacaagttccaatcagagaagatttatccctttcatccaccgaaacatgtgataagtatgccaaaaagacaacctacagttcccagtccacgcctctgaatttttgcatggtttccatagattcagtccaatattatcatattcatcaaacatcacagttttcacaagataaaagtagtagtgtagcatgtagacagatgaatttgagtacaaatgataactagtttaggaattaagaaagaaataaatccttgttgtgccccaggataatatcaaaatatcaaacaaatgcacatgcattggaccaggaatctaacgtccaagacatatttaaggcacacaaaaagatatgaatttgagtgaaaactgtagagctaattaggtagaaaaaatttcaagaaagccttttcagaatctgtctgcagatgcctgactaccaaatatgtcaaagttctaaaattggtttctttcttatactgaattacaacctcaagagagcccaaacacatacttttttcttctttggtaggtagctatatatcattttgcttaataactttttcattaaccaagtttaacagaatatttcagcttggtctacatagcttacaaagcaatcataacagttacatgttaagcaccactcaagttttcaatgtcaatgcaaaatacagtttttccagaatcaactcagtaacaataattgactgatgttgatctgaagttcaaatttttctccaaattgatatgatagatagtgttagtagcatccaaaagttcaggataaccaacaaaattattaaaaacagcagcatagtgcactaaaatataaaaagtttctgcagactattcaacaattataagcactacagactttcctagctgtagatgaaacttatcatataaaaccacaggtgacattaaaactaacattcaactaaaaaattagaaaaagattgaccaacctgacgagcaacttgtgccagtcgtcgactgtcccgaggtgattcagttaacaagctagagctttctggctctgaagaaccattctgtttctcggctgtgctttctttcaaagaactattttgttcaggactgctcaaagcatctctcttccgctttctttgaaatgtatacttaaaaagcctactgcttgcaggtggacttgccacaacatcttctaaatcagatactttagcattcaatttactttctgattcgtcatccttcttaaaatctattttgcaggctggaacctcaaatttcgctaataaactttcctgactaatcaaatttgatttattaattgccaccttatcctccttagttaccttctgaagactacagggtttaacaaactcagcaagattttctgtagcttttgcacatcctgactctctactcaattcaattcctaatttttgggatggagctgaaggtgtctctttaagaacttctcctggcattttctcacaagaatggaccagttgattttcatcattaagtgtaggacacactttctgaaaattttccctaccttcattatgatgaagatttttgcattgaagaactttagttttctcatatctagctgctcttttcctcttattccgaaatgacttcaggggtatttttaggacatgactataatctatttgggccactctgggttcatattggttttcctgtgcctgatcagtttcattctttgaggtagacattagatgtatccttttgccatcgttatctcttccaatgaatgatccattttctgcatcatcatttagtttggaaatagataaatatccatccaacatatttctttcagatgcacgaattctctgagtacacccgttcttgtacagctcaggctctt

SEQ ID NO: 243065 - DNA, 959 bp, Cannabis indica
tattcatagctctctttttcttgtttattgtctacttctgttctctcattaattggtatacattccttaatgttttcttcaatttgatttcatacttagttaatcacttttgggagacctgatacattttacttagcaatgcacacacaccccacttgatgaaatgaatctacacacatgcatattgattctcataggctctgcatcagcacaattgaagcaactctgaaattttaccatgctataaagattaaagaacttaaaattgtagttgtgtaagctaaagaaacacaattgatttcccttttggaagtatagaatcatagtaaaacagagtagtagaacattctacagtctctggcttcgagttccttaagctttatgtgaatgtgtcgtttcttttccattcaatttcaggtttaccaataccttaattcatgcaacaagtcctcttcctcagagacagtgcaagaagatctagaaaacattcctattcgtttatgcagcgtctacaacataacaaagggggagccgaagttcaccaactgcacacccgactttacagatacattagattacattttcttttctccttctgatagcataaaaccagtgagtttgcttgagcttccggaatcagatgcttctgatgttgttggtggactaccgaactcaagtcatccaagtgatcatttaccaataggtgctgagtttgagatttccagtgaggtatagttttgtttgatagatcaacaattatttgcattgagattattttcttttattttttttaccgtaggtgattcaataataagaaatattgctgtagtgcctttctctttgttttggaaacttagtcttgtttttttggacaataagcattgtggttgctaaattaataatcattcattatctttcttgtttggattgatttatttttttatttaaactataaccta

SEQ ID NO: 243066 - DNA, 526 bp, Cannabis indica
tatcctctatttttcataccattattatttatgatttggtaatcgtatatttgttaattatttatatgtgaaagtttcactaatttttgtttttgagaaagtgatttgaatcacaatatgacaaacgtcgacgcggaggaacttctagtcaacaagctaattttctagccaaagatatacaaagtcagaatatgagtcgctacaagcaaagcaacttatacaagaccaaattatctccaaaattaaaaactggagaccaccttcaagaggcatctgatataaacaatgaattggagcaaaactacctacaaaatgaatagatatagaaaagtagattagcacactgtacaacgataatactgtaaatttttaaattaaggacaaaaaataaatattgttttgacgagataacttatctttgaggtcttttttcactcagcatgtcactattatatagaaactaatttattatgtccaactattatagcaaagccttccaatggtagaaatatactagtcaattaaa

SEQ ID NO: 243067 - DNA, 709 bp, Cannabis indica
aagtgtataaaaattaaaatataaaggggttccgccgcaaattactcttcttgttttatagaaaataaataaatatatcttgaaaacatataggaattagttactcaaaataagaaatttacacttttcaaactgaccaattcttttttttttcttttattactaatgtgatatatgttcaaaatgtactaattttttttttttttgattaattatgcctcaaagcaagcaaaagaaacagacagagaacaaggcagcatgccaaaagcagctgccaggttacactaaactaggaaggaaataacaaaacaaccaagagcaaactaacaaaaggaactaaaagagtcaaaaactaaaaaaaactactttagagtcagtcattagaacagccatctgctgtggaaacatgcaggaaactgtgaaaattggacggctcaatctccccaacgtgagaagaccggttcgcccatttggccacggcatgggccacaccgttcgcagtccttgggatccagcaagcctcccaaagctcgaacttcttagccgaatcaaggaaacgattcactagatcagtaatgttgaaatgcatatctgagtttttggagagagcaccattgatggcctccaccgcgcccttcgagtcactttggaagataacatttttgaggcctagtttgactgcctgctcagccccccaagtgagagtgta

SEQ ID NO: 243068 - DNA, 508 bp, Cannabis indica
cttgactataaatacttaaagaacacaatataggattatataaatttacgattagataaatagaaaaatatataaatctcatatatatatatgtatgatttttctaagagttcacgattgtgggctacctaaattacaaggatctcatatatatatatatatatatatatatatatatgaattctactgaataattacacaaaaatatgaattacaataattaatcaaatgcctcatttcaataaacatatttgaaaactacctgaattttttgaaacctatatatattatatataatatctttatatattaacaaaaatatggagaattgatttagcctctccactacagagaatacactgacattaatcgaattaaatttatatatacattgtaacatcccgattttccgagatgtcacataggatagtccgtataaaacaatttaataagacaaagacaaacaaatacttctttattgaaaaatatccaagcatgagatctcatt

SEQ ID NO: 243069 - DNA, 1943 bp, Cannabis indica
gactggaggggacaccaaaggcctctgcccctccaatcattgaatagatagagagagatgattagggtccaagtagggttcccaagttcgatgttgtggctaagattcaggtcagggtgtaaagtgtagggtccgagttgagattggggtcaaagtcgagatctaagttcggaccagaacccgaattataggtataattgataatcatgagtcaagataggggttagaatcgcttataatatagttgaatatatattttattttaacataatactattgtgcatcgaacataacttaactcaacctaaatataatattttataaaaatattattatacaatataatctaaggtaatgctatacaatatacaatatacagcattctatcaaacgcttttttcgagatcttattattaatgcacaatcgattaatcaggctctgactattgaatagtaagatagagaagaattaggaatactacatttggcccacaagaaattagtaatctccttcatattgtagagttttatttcttatgtattactactcgaatatatgggctggctgtcatttttctcattgatactatatgcagttatctatatctgtgtacatatctaggaatttgtaatcttctttatattatataattttatttcttttgcatttatatgaatatatgggttgcatttatgtgaattatctatatctctatctttctatctatatctctgtctatccatatcatctatttatctatttatataattatgatgttagaggatttgaggagacttcctatcctttacaataaagattgaatgaaaaattaatgcaaaatattaaatgaaaaaaatataataatacaaaaattataatgaacgatagggagttcgggaatcaaagtttggaaaatacatatgtggtacaccttcttaaagaggtattttaatagattatcctatctgtttccatctctaggatatgtttttattctttttttatcgtgtacattgcaattatttaagacgacttataaatttttaattttttttttaaataatttacaatactgaagataaagtttaagcaattacttactaatcgtataagaaaaataattatgcatgtaacaaaatatttgaatctatatttcgggattgtaaactattcgaatttataagtgagactaaataactacaatatacgcgttgttgtgaaaatttattttgcgcaagtatacgcagccacacaggtaatataatgataagtaagatcgtctccacataaattgcaagtcaaatttgatgtaaaaccaactcttcttaacaacttgatattttaagaaaattatcttggttgagtaatgaaactataataaactggtagaaatgagagtatgattaaaaaatatgattacaatcgattgctgaaaaattatgtgcaagaaaaagtatcaatggaaaaacaaatttgaataactaaattctgtatgtttcaaattgcccagattgttacaacatcgcttcaacaaaacgcacagagtttactagaattttcaatatgctcatgagatttttccaaatctcaagaataaagttctcccacctaattaaataaatttttatattaaagcagatctaagaacacaattcaagcataaattctcacaagatatgcaagatagtaaaatatttctattttacttactaagaacaacctaaaaatgagtatatcttgcatcatatccaagtataaattactagatctaatcttttcaatactagatctagcttaataaactgtcattgagggccaaacaacaacaattaagggtaaatggcagcaaaatccccaaaatttttatttggtttcactaaacccccaaaacctaaatttaggcggtaaaacccccaatactcgcgttctgttagcaatttaa

SEQ ID NO: 243070 - DNA, 1006 bp, Cannabis indica
gagttaagtaccctgagtcatagcaattgacctaggaaggctccctagtcctacaccaaggtttactttggaaacttcagaatgggtgtttggatcctgccaaattgttcccaacacaccatccttcatcagtattctgaactagaaagtcaagaaaaatccaagtccaaagcctgagaactgaaaagagtcaaaacgacctcccgaaagtcaaccctggcgcacaatgctcaagttgacatctcgagctagggttttagttttcgagctcgtcttagtgaaaatgactcaaattttgaacatagacacaaataagacctgtcacaaacatgttagaggcactggaataagaatcgaaacacttcctgtttgaggcacttgggcacccgaaacctaggtcaacttggtgatggacccaacgctcaggttgacatggttttaaccttgggcacttccaaccacttttttgaaggcatttcccgagaattttcctcatcttcatcgaaaattaggaaataagttctttcgggaaagaaacagatcgaattggaggccaaaactaggacccagcgcccaggttgacatggtgttcgatcctaacgcccaggttgtcaacttgggccatttttgtaataccctacttgcttaggcacgctacaatggttttctaaatactctggacgccttagctaatcaaagggtttctaaaaagtcgtgacaaattaaattttttgaattaaactttatctttaaataaatacataaccttacataatatctaggatctcgtttaaaagtttacaactatatacacaatacatttttcatagaagtgtctcccaacgactaaaaaataaaagcccatgtcttctcgagattgaacactctaggcctaaccattccgatatgtacaatcactcgcaagctctggagtcagtactgctcaaccttcgcctttcccttacctagacatgtaaccaaatctgtgagtcgacaaccttagtaa

SEQ ID NO: 243071 - DNA, 578 bp, Cannabis indica
tttggacatccacatgattaatatttataactgtgtgtattttgttacacattattactatgagtaatttatgagtataatttaagatttatattgtactcgtcaatatcaagtcatgatgttatagtaaaattttagtaattaaataaaggaatttttacaaaaatattagattttaagtaaaaaattataattttactgtcacacgatttttttacgaaatattttttttttttataaaacaaccgtaaaataacgaaatagaacaattaaaacaatagtagaacaactaaaaaataattgtagaacaacagtgaaaacataacacggtacacagtattttttaaaacaaattctaccctacaataaaaaagaaaaaaaattaaaaatttaaatatatggtgtaaaaatcccttaaataaatactaaaagtatgattgaaatttatcctcctatagaggagtgctaccgtcaacctcctattacaatctcttagtcaaccttcacgcccgaaaacatatgtcggtatatttttttttaaaaaacttttttcacggcggtgttcgttatgcttacaa

SEQ ID NO: 243072 - DNA, 776 bp, Cannabis indica
ggcaaaatagtcttttcactaggttaaggttttgtcttttatggatcaatttataagatgaaatagaattaataataggtttacattcttttaatttaagtatttatgtaggaaataagagataaatcctaaactaagaaaaatacaaacattgctctcgctctctctctcccccttccttcggctcaagggaaacccaaaagaaactaggtgttctcctcaattcttgtagattgcactcttaagctctatctagaaccttgaggtaagctctctccatgtgttttcagtgaattttttaagttttaggttaggttctgttagttttttttttgtgaatttggggctatgatgtgaaattgagtttagaatatgtttctaggtttgatataagatttttttttgtgtgtgaatggattatcttcttggctgctaggtcttgaattgggtgaattgagtttgagaactcaaagttcactcaattatggttatttagttattttgataaattactgagttttgattgcttgtatatattgtttttatgctatagaactgttcaaggaagtttgagaaagtttgaagaaggtttgattggttcaaggtgaaaactagaaattttccattcctacaagaaccagtcgaccagttttacaggccactggtgaaaagatcaaccagttggccagcaggggaaaatcccaattttctttgaatttggttttggtcggggtattttaccagaacctagtttagggtatttaagtgatgtttag

SEQ ID NO: 243073 - DNA, 990 bp, Cannabis indica
aatgttgttgaatgttgtagtgacaccagtaacaatttatccaacaaaatagtacaaaccatgtttgtattctcccttaatgacaattaaggatccttttaaaaccttgggataattctcattaattttgattgtgcaacctttagcagcaagagaaccaataaaattaattttctcttcaagtcaggaacatacctgacattagttaatgttctttgaacattgtcatgcattttcatgatgatagtttcaattccctttaccaaacatggtttgttgtctccaagaagtatgtttccaccaatcttttcttcaagagagctgaataaagttttatctggacaaacatgtaaggtgcatccagagtctaagatccaatcttttcttgattatgtatctataacagcaagcacatctacaaaattataaccattagcagtgagaccaacctcattgttgttacctttgtcattcttttctttactcttgtccttgttgttcttgttgctcaaattgtagcattcatccttgagatgaccttccttcttacagtaattgcagaactttccaaccttgaatttggattttgattggctagaaccattgcccttattgctgtgatttctttgtttatttcctcttgaattgttgctcttgtgtcctctattttttattagacctacctcgagccatcaaaccttcccaatttgatccactcttatcatcaaacttcttctgagtctctttggaattcaatgcaactttaacctcaaacattgtcaaagtctcctttccagacaacatagtatcaacgaaatattcatgacaccttggcaatgaactcaataagacaattccttgatcctcttcttcaatcttgacacaaatattgttgaatttaagaatgatcttgttgaacttatcaaggtgcttcctgagctcagcagattcatccattctcaaggtgtacaaccttttctttagatacaa

SEQ ID NO: 243074 - DNA, 857 bp, Cannabis indica
cttaaaaaaatgtaaccatgatggttacaataaaaatgtaaccattaaaacctcttccatatatatgttattttttctttcaattactgatcttctgcatgtggtttgccttttgtcaacttttttttcttgtttttggtaatatacgcttgtacatatccagttttgcataggaaaatttgattttttatgcttacatttagttaaaaaatttctcctaaacacataataactaatatttgtagaatatgacaacttttataatatccctaaaataccccccaattaaaatcacccccatttacacaatcggaccccctcatcgaacacaatcgaacacatcaaacccccatcggaccccttagcgggccctatatcgaactcatcggatccccccatccggatctacgtctcctacctcgcaaactcacagtttcattcaaccctatcggaccccatcagacctacatcggaccccttcagaccttgcttaaaatcacaaatctgaaattctaaaacctaaaatctatccctaaatctaacaaaatctatctttaacacaaaaatcacaaacaaaattaataaaaaaaaataaaaaaacggtggtggtgcttaggtgatggtgcgtcgtgggccggtggatctccgtccgtgcgtgtgtggccggcgtttgggacgattagggtttcgactggggttgggactaacaaagagaatggagggaaggagagagaatgggcgtgtagattttgagaggggtagttttgggatttaggtaaagtagacctattctaacaattacttatagtttaagctttcctaaccaattaaccattaaatcatgcataaaaaatcaa

SEQ ID NO: 243075 - DNA, 999 bp, Cannabis indica
aaatttgttgaataaagagaaaattacttttatgttctacttttatttttcctataagcttgataaatactgcattttcaattttacatatttttatgattttatgcatacttcttacgaattaattattttaaaaattgatatgatagtaattgattacttcggtcaaaatagtaattttattttttcaattgtaaaattaatagaagtactacatcacaaaagaaagaaaaaccattgtaatactactagctagttacttttaaattattgtttattttagaaaaaaaaaattatatttttcggtggcattaatttattttctatatttatgaaatttaaatttaaatttaccatattttaataaatttctcttaaataaatactactactatttcttcaacatttttcaagtaatcgtcatcctatttctacacattttaggtcatttgtctgttatttatgtgctcaacttgtcaaataggcctattggattgcattttatttttattattattattattattgtttaattttctttttgatagtctttttcttctcttgcttgagaggttatcataattctttttcacttgcgacgccatgggcaaaaatgtagagcaatagaaaggacaaacaacaaatgtcgaaatttcaatgtatatttatctttttgaactaaaaaatttaaataaatataaaagataaatagatatatatatatattaaaaaaaaaaaaaaaacaattcaaaacattatagtgttttcgaaaaacttgtttattgttggtccatttttggagaatgctgcgatttttgtttcactattttggctttacctaataaaatgaaataattattgttacacttaacacaattagtgttgctggatggtccttgttgaaaaaaagtctttgtagggttcttgttatgtaaatgtttttgaagaaaaatactaccaaaaattgaatatggaaaaggacaattcatcttggtagga

SEQ ID NO: 243076 - DNA, 624 bp, Cannabis indica
tcgtcctcgagtaaaacactaaaacaaaaaataaaagttgaagaagtcaatctccagaaaatgagtaattttcaagtaaactcaataacttgattatgaaaaatttcacgtatgcataacaatccaaaatttcagttcatttacactattgacacacttcaattttgatttcatttagctcatgaaaccatagaacgcaattaactaataattgaaccactttatgcatgccaattacaaccatcactctactaacccaaaattctatatgcttgcaatacttactattctccactaatataaaccaatgcacaactaagaatcaaaaggtctttctaggcttgtagtgttaggcttaggtaagggtagttgaaatggtcatttaggcttgcctataccataagcttttccaatcatgtcacccaaaagaaatttttcacacacaaggttattgctttcgcaatgaatttgttatcaaggtttagttcatcacctactaagaggcattggaatggaataaaacatatatttcgttatttacggggaactactaatttaggtctatttttccctaaaagctcaaaccaagaattagttgggtttgcagatgcaggttatttatca

SEQ ID NO: 243077 - DNA, 630 bp, Cannabis indica
acctgaaatcatcactgagatatgaggcattgcagattgcaatgtgcctcaggaaccaggaatcactctgcagaatgttgtaacagacagaaataatgctgatgcacaaactgtagtagatcagacatcagatgtgccaccttctcacctggttccctcacatcctatgattacaagagcaaaagcaggaatctacaattcaaaaacctacatcagtcaagccaagtggaatcccatctgcacggaacccagtactgttgctgaagctcttcagcacaaaggctggaatatggccatgaatgatgaagttattgctttgaaaagaaacaaaacttggactctagttccctggtccaaggattataatctaatgtgttgcaagtgggtctacagagagaagatgaatgctgatggaacacatcaaagattcaaggctcgtttggttgccaagggttttcatcaaagggcaggtctggactatggtgaaacatttagtccagttgttaaagcttcaacagtcagagtcattctgaccattgctgtcacaaaaggctggaaaatcaagcaactggatatcaataatgcctttttaaatggcaagctagaagaggatgtgtatatgtgtcaacc

SEQ ID NO: 243078 - DNA, 855 bp, Cannabis indica
atataaaattagagacaaatttggttaattgattaataaaagaggcatttttcaacttactcctacaacattcccaccttttatttagtgaaaattgtaccctatacccttttttttaacccatttcacttttacccttcttttctacatatttaatttatggggagctctatttacactccatacaatagaatgataaatacaccccataattaaaaaaatataaacttaaataatttttaaaaattattcttaatatatattttaaaattttttcttcaaattattttatgttaatttcaatacttattttgagttcattttcataatttttttctaactcatgtatatacatttttaattttatttaaaaaaaaaatcatataattttttattttaattttttgtcataatatttaaaatataatttatttttgtttgattggtatatttttttaagaatataaattgaaagaaaaaaagttaaaaaatacttagtataattaaagatataaattttatataaaataaaaattataaaaatggggtgtgtttaaaaatttttggggtgcaaataaaatttctcttaatttataccctcttttatttgttatatcccgattatacccttatgtaatgaaaaaaactttctcacctgcctaaacagtacccttatgtaaaggtataatcggtaattgacttataaaagagagtacatttcaattaaatttaaaataagattattttggttaactgatgaaaaaaagaagtatatttaacttaccccctttactttactacatttttctctataattgcttcttcttcttcttttacttcttttttttattaact

SEQ ID NO: 243079 - DNA, 563 bp, Cannabis indica
tgttgatcttagctagaaaagtttctacacactcaaaaaagtcatggtgagaaaatacatgaataaaaacgatacatatcaaaatcaaatggctgcccactttttaagacttggcaatattttcacttggtcccacaccttatatcctctaccaacttttccaaattacaataagatgacccaccttcattcacacacattttggctaatctagccatctcagccgttgatttaacaaactcttccctcctctccaccataagatcattcaccatcatctctacaactttcctatcagaaacatccttcatatccaatccaagcttccacacttcacttacaaatctactattgatttgttgatcagcaaaataaggccaacaaatcatcggtactccagcaactatactctccaatgtcgagttccaaccactgtgggttagaaaaccacccacagcggagtgagaaagaacctgctcttgtggagcataacttacaatgaaccctctttctgttgttgcatcctctaactctgccgggaccgaacggtcgccatcttctgc

SEQ ID NO: 243080 - DNA, 1144 bp, Cannabis indica
tactctaagcaataatatcaactcactaacaacaaaaataaatgaattaattatcctcgcacaattaatatccaaacgaaaaattaaatattattttaaactggatattacatcaaccacctcaaataagcatttcgtccagttttctccacgactcccactccctttaatgcgattctattgatatataacgactaattccttctcagattcatttattccacctgagccttattgcattagaatttttttgaatcaaaaaagagatgggatcatatttcattcaactgaaaaacataactgctttggacccatggggtaataaaatcttaaaccgatcgataatcatcttggtgatgatgaaagaacaagaatgaacagttttggttgcaaaaagtgatgacaatgcctacaattgtgaaatgtgttaagtttgatttcttattattttacgaaagaaattgaagaaacaaaaattataataagttgatgtaaagtcaaaacatatgtataaaatcttaaaaaatcaggcctatatgaggttgtgttagggtgtataaaaattttgtggtttagcacagttttatgattcatacaaaaaaaaaatgaaaaatatatataacttaagtatatattttcgaaaatggccactcactatcataaaatttgaaaattggtaaccaaaagtaccaaagatatttgaatagtacctttttctgatttatttacatgaacacaatttatatatatactaaaaaaaaataaaaaattaaaaaagttgttaatcttatccgaattatgcaaatgactatttttattaaatgtgaagatggaagcaaacatagagagaaatttagtgaaactgtccttcgtcctcaaactcatttatgttaaaaatatatataaaaaaattaattacataaatagaaaaaatattacaatatatttataatttaaaatactaaatactttctccaaaaaaaatctttttactattatctttatatattaaaagtgtctatctaacggcatttcttggtttaacagaatatacttaaaaataaaaagaatattctgttaaatttaacgattagctttgatatcccgttaacaaataaacccaataattaaacccaaaaaatta

SEQ ID NO: 243081 - DNA, 7022 bp, Cannabis indica
ttttttttgtcgtaaaaacagccttactgaaaagagatttgtcaaatgaaactcaggctaaatatctgttttactctctaatttgatcaatagttgaaaggtgtagaattgttttcttattttggtgtcactctctaatcatgaagctattctctagttagtggctttgatcagttgctcagtgtctacaaccatgaccttgtttttattggttttatttagaaaacaagatgctggaaatgacagaagaagtatgtccaatggaggacgctcttcttgcacttttagataacttagttggcccagtgctgccagctagatttactagagataatcctcctttatctcatcagcaagttgttgcaaaacaggtactttatcttctattttgttatatccttaaatctgatatgttaatgtttttttctatgtttacatagacattattaaatggatttcttgcattcttcagattaactttgatacagtaatggagatagttagaagaaatgtgtgtttatttaaatatgaaatctttatttaaataagaaatgtgtgtctttatagtgtcacaggtgcagataacatttcttctcggtcacggtctttgatagttttcaaataaataggggttttatattgttatcatctggtggcatggcatggttatgaagagaacgcatgtaatttgtgtatcaatttcttatgaaattaactttacattatcagtgataatctttaatttttttggtgctcacaaactcccatttgtaaggtgtgtttttttgactatccatttctaaaacacggaaatcctttaaatatgacattgtttgtcctgcactcctgtagtgtctgttcctagaagcacttaataaacaattatatacagatctttgctcaggcaatagtaaattcagtgcacaacctaaagcaatttgagtcatgttatgtctgatattattctgctttgatgactaattttatctctaattcaactatgatgatccttaagttttagagtgttcaagttatgcaatcaattctaaccactgaaccagctttatattaagtttgagatattatatataaccattttcacatctagaattctgtatattaacaatttcgtaagtgtgaatatgtctgatctgtaaacaaaatttcaatgtatccactggcaaggaaaatttcatccatttactcacatgcacaagcataatgcattgaatgttagtcatgtaattgcttgttttgtcttgatttatgttaggtacatgctgtagtgttattgtacaactactaccatcgaaaaaaatgcccaaagctagattttcttggtttcgaatcattttgcaagttggctgtggttttaaaaccagcattattggtgcatttcaaactgacacaaatgaaaaactatatgaagttagatgatctggagaatcatctatcaccaacagagaagtcaattatgcaagcctgtgatatatctacagcattagatgcatcaagaaaagaccccattattgaaggatggccaattactaaagttgcagtatttttgattgacttgaagaaagagaattgtttgttactagatagtgtgactcaaggggtttattcagtgattgaaaaagatgtagaggcctcaaaccaaagtttaaggagtacaatggggaaatctcaatcatgtaaaaggaacaaagtaattcaaaaaattccaaaagttgaacccgggactaattcaactgattttcagcaacttgcttatttagctgtcttggaagctacaggtatgtagctttattatataccatattattcaagtttgcactagctacaagtatgctctcttttataaaaatgacaactttggttcttttgttgattaagtagtatttgtacaacaagaagagttgtattgtattttgtagcaaaacagtggcctccttatctaaagcttacactgataattgagaattaagctggtttttctagaagataattaatgagataaatctcaagtcttgaccatcacagacacagatacatttattctaagatatgatctactgaatgcttttgctcttccaatatttctgtatctttaaatcttctaaaaaataagttagattgctcatgcgtaaatgattctcatacatgctataggtgttaatcagacagatctgacaattttggaagaccatgttgtgtattctgatagtaaagaaaaggcagcggtgcagttttacatcatgcaagccaaatcagtcacagaaaatattattcaatttcccatcaaagatgtcattgacaggtttttatgtcaaacaaccatttctgttcttttattttctgcgtaccaacctattaaactgcttttgctagccacttcagtaacacacctttgataatgtgtatgtgactaatcacttgattgtttaactttttatattaccttttctgaattccctttaacgctttgttgatgatgaggttctaccgttatctaaggatggtaagcatgtctgctttgctgatgctctttatcctttgctatttgagtagtctgcagggtcctttggttagaaagatctctggaaattggacagttaccccagttgttgaatatttccatcttcttccttatggtgggattttattaaattggatgaaaaggtgagctcatctaggctgtcctgaatatgcttttcgcggttctaaaagtaggtttcactagagttaacattaattttctctttaatatttcatatttgctgttaccaaggcccttaataacaaaaatttggcttagcatcataataaatgtctaaagatacaacacatttatagaattttaaacatctcctatatgtttatgcttccctgaaataacttaaaccatcccataaacaaggaaaactgcaatttgattgcttcatttttttcaaaagttatgatgtggtgatgtcattggtcatttgtgtaaagtgtaaactaatagctatgaatcatctatcaaattgtcaacatctaggattgtattttcttttttacttgccgtgattttttcttctttacaaacatgatacaaaaggagctacttgatctaaaccatgatgtgcaaacatgctgtatcgtctacgattacattgggggattgaacattttgaatcacatgtccccccttttaagaaatcgactcgtacaatggcttaaatgttatttctcatgcttgttattttctttattgagatattttgtttgggtttacgctctatcttattcatttatggtagtagtaagatatttctgtatagaacagtctacgaacttcctaaaagtcgagctgtacaatcaaacattcccacaagtcttgatttagatcagacaagaaattaggctgattagttttgttacatttaagccacaagtcttgcaaattttactttaaatatttttgttcccaattttatcccttgtgtatgtgcttaacggagatatgtttgaatagtttacatgattccaggcagggaaaaagccctgaaaggacgacaattccaaggacattggcagaaaataaaattcaagttaattttcatgctggtggcataagagaagttaatagccacaagacaactgcaactgatctcaaatcaccaaaggatgaagatgctattggcttttccaatgcttctaacgagcctggtatcaaggtaagcttcttttggctacctattacatttatttatttattctttatgtacatatgactcatccagttcttaagttcaccaagtctgggttacaaagctaccgtctttggccattgtttggacttagaatttttctgattgaaggaagaaaatgtgaggaaatacattgaacttttgagaatcaaagttaaggtaaggaaaattagttgacaagcaagattttattgatggtagatcaacatgacaatgagagtcactgagataacatttatattttctttattttaaaaagcaaaaaataattatgttctacaatcaatcttcttgggactttgcatctcatttagatctggttacagtttcattttctgttgtatgttgctttaacactacagtttttatacacttatttatctttccctctttcatgatttccccctttaaattcattttgacttcttgggctggcagtttgagatggacttaacaacaaagtcaaacagttctgactgtgcaattgagaaggcttcttttggaaatagaatcagtgacatctcaagcggtcaaaatggatttggttgccgtgcaatggttgcttatcattccaacggcatatcagataaaggaggaaattgttatcatacattggccacttatcaatcttcttctcagcatcttgagaagatacaaagtgtcatggcttcgaaacacaacttaatgaccgagactgccttaaaacttctcagaagtagaagaaataagctggtatgtttttgtttatgacatgtgagtatgctggacaagtaactataacgtttttagagatataatgtatattaggctgcctttgttttctacttggtatttggaactggcagtacttcttatttcaatctcaagcctcagattatccttctttcaacatgaacccttgtagttttttggtttatattggtgatttcataaggtgctaattaatctatttggtagtcttttttatatgtgcttttagctttttccctgctgtgtgtcagattctctctctccctccatttttgcatgtgttatagaattcattttcttgtttatgcagtctttgaagttgcgggatatagaggatgagattgctgagtatgatagaaagatggagacaattataaatggtacactttttcaagtttgatttcgcgcccttcactaaaaccattttgtaggttttaatggtgcctaaatttgctttatggttggatattctcacccatcaagtttgtctattctgctctactgtttaatgcttaaagtatggaacacagtatataatggtgtgataaaatagaaaaacaaataaaattgagtaaggattgctgagattttctcttagaagaatcgaataatccttgaaaatgctttcattgtttttcatacatcggtagtattatctcatctggaagacataataacaaataaatagatatatagagttattccaatgtcaaataaacaaataaaataagaaaacaagtaagcataaaagagagcttgtccatccttctgctagtcacagggtgttagaaatatcatgtgcttattatatacttgttcttgctctacaagcaggtggtgaagatgaccttcagctggtgttagaatccctcattgaaggtggtaatgaggaaagccaacgaagtgctgctgaccatgtaaggactaatcaacgggttgaagacacgttagacaacaagagaaagaggttgtcagaagccattcttagcacacgaaatgctcgccaggtaaatatttgttcactatccaattaacgaagcttttcttaggaaacaaaatacttgaagctttaaatggatattttaatgctctctgtggcagttgaaatgttttcttagtgtgactgggtttcattttagataagcatcatggtttttcccaatcattgaatttaaagcctctcctcgatccattttattcaacttttctggtgtttgttaccaatcccagtttctttttttttttcccttttatttatgttttgttgattattctaatcagaatagaattgacaggaattggatgatatttgtgatgcaaacaattggatattacccatctaccacataaacccagcccaaggtatgattctgcaccctttttatgtattgaccaaacagatacgttggccataattgcttctgacgtttactgctatttgatcatttattacccagttctcattttcacacgtacaatttttgaaataagcataaaaaactactattagaacttaatctaactatacagtgtatttcccaaatccctgcataaaatgacttaagtcctcaaaatatgagaaaaagttgatgaaatattttattttgtgaattcagaacatcttccacacataaaaacatgtgatttgatagtgtttagcttcagagtttttatggatatcatttgaacttggaatagttcttagtaggcaataactttttgcacttgcttacacttgaatggaacatggcaggacaagaatataatggaaaaatgaaaccaaattattagttgtaatttcaaattcaaaatcttgacgaagatcaatatgttctgattatttgtgtaatgggcatggacacgtataattatccaaaatatgtttttttaaaagattatcatacattgttggtaagcttaattttggtaattgttttttcaatgaaggtggatacatagccaatgtaagcatacaaggagcaggtttcgaatgctcaagtgagggagaggtgcattcaagtcgcggggaagcacgagaatcggctgctgcactcatcttggtgaagttgcgcatgatagcaactcggtctctagataattagtaggttacagttggtgggggatgctacaatcaaatgcaaactggattttgtgcaaatgaaaagttcatgaaaatattttaacgtggccctgcagctactgctacagctacagatacttttttttaccaaggaaaagagaagtattaatacaatctcaagggaacacagacttttagttttttttacagatgtctttatctatgtgtcatgatgatcttaatattccatcatgcttttacctcagatttacaattcttgaattcacatcacaattttggaagttgaagttgaaggagaatctaatttgtacaagacgaataaaccgctaaaaccaaactgaatataagctcacattaacccgtcaatttggaatctgatttgggattttccttgggaggtatcgggaaggaattggaat

SEQ ID NO: 243082 - DNA, 721 bp, Cannabis indica
aataaatataaaattagaggtaaatttgattaattgatgaataaaagaggcattttccaacttaccccaatataaaatctacacttagtgctaatcaaattgtatataaattattataaaccgctcaacccgaataacccgcctaatttgaataactggcccaaaccaaaccaagatacacaataaaaaatacaaactaaaaaatctgacgaaaatataacatgccccatctttatattaggcagattaaaaataatactaacccaacaaatctctctaccaaccctattaaaaaggtttatatatgtatttattatatatttatgtatcatataatttatatggctatttcaaaaatttaaagttcaaactaatatatttcttttacggtaattaatttaaattttgaatcaaatctagatatatttatctcattattacaattaactaaaaaataataattgaatataaacataacaaaattaattcaaaaatattaggggtgagtttggacaagttaacctaaccaaaaataccaattttattagtgctaattactatttttgtttttttttaattggacagattgcatttaaatttttgtaactgtaacataaaccgaccaaacaaaaccacatacacgccatgtattatgagcaaaatagtatagattgaattggataaaacgcaatactactactcctctttcacataatcttcc

SEQ ID NO: 243083 - DNA, 713 bp, Cannabis indica
tatgaggaggttttccgaagctatagtggaagtggaggcagatgggcaggtctgtaaaatccaagatacaagaagggctgggggaaaaattgatgctgcaacggaggtgttatgtgtttcggacgcctcttggaaggacggtgaggcaggtttagctgtggggctgctgcatattcgagaaaacagagttctttggtttgttaggaaagacaaagcagagtctgctgctgaagccgagatgatggcgattctttgggggatgcagctggctgctgcaaaagagttcaaatcgattgctattgcctcagatgcgatggtgttgatcaaggctctgcatgagaagagatgtccgccattatagaagctgagaccgaagacgatggaggtgttttcattgtccaaaacctttattaactgtaatttctgttttttaaatcgtaaggataatttggtttgtgacgctttagctaagaaggctcggaattggaattctgttgttgattgttcggatagggaggaatctccttttatgattccaacttatttacttgaacttcccatagttctatttaaaaaaaaaagggggggggggggctaagcattaagcaggtgagctcgaaacccctactgattagttactatcaaatttggctctctcattcttcatcgtttccaaatatagtaccacgaccaaaaacaaaaaaaaaaattgt

SEQ ID NO: 243084 - DNA, 685 bp, Cannabis indica
tctaataaagtatgtatatacttaaagaataataaaaataaagataagtggtataacaatataatttactactaaatttaacaagatattaattaaaatggactttacctttactactttatgtagttttttttttcaagtttcacttgtttacttaaagaaaatattattttacgttacgcagcaaaacacccaaaataatattaattttaaaacaacgaataataacaaatttatattattagtaaaaaaatcatagcagacaacactaaaataaacaacactccatgtttttagtaagaacaaaaaaaaaattgtaacaataattaaaaaaaaaaaaaaataataaaattataaattttttgtcatttatgaaataatcccttactaatgtatagcagtagaaggagcactcgcattagcttatctactctatttttaaaatactttgtcaaaactgtcattttttctatgttaacccatacatttactacattttaatttctctatattatttgaaaattatttattttaatatatcttatacattttataagtaaataaataaatataataaatatctcacacatatattataaaaatattttaaaaagttaatataatatttattgctcaatgaatagtgcttctcgacatgtagctaagcactattcatgagctaaat

SEQ ID NO: 243085 - DNA, 1057 bp, Cannabis indica
ggatttagaaggaaaaaaaagaaacaactttgctgacaattatttgttggtcagagagtcctccgaatatttttttattggattagtgagcagtttcaatatttttatattcgaatatgactagagaagagaggacaggctcattacattaaaaaaaagatattgggaattctgataagtatcagaagtaattgagcgtgagagccaaatgaatcgaaagattcatgtttggttcgggaagggatcgtggaagttttgaaatgaatggaaagataatctactttcattaagtgatttattagataatcgaaaacaggccagctttttaaaaatgccataaaaattgtcagtcttacaaaaagtacacttaaaaaaagacttttttctagaagggcataataataaaataacataaaaatatgaccaggtttttaacaagttattaagccatggaattatttccttaatggagataactttttgctattcttaaaagaaaaaagaaagatggcatttttctaaaaaatgatttatggcatttttcaatttaacaaagagaaccatggatataaggttgattacttccaaaattaaattttattgtgcacgatagaatactaagagttgtttagtggttaaggctagaacgtacacggtacaagctcaatattggaaactcagttccacaattgggaccgcatggtgcttgagtagttatgggtaactacttgaaataaggtatataagagtttagtagttataggtggttactacttggaatgaggtatatgttagtcgagtaattatgggatgctacttactatatctagaaatatgcaagtagcactaaaatgctacaaaatggatgatgggatagttagttacaggaaactactatttttgggaactagttctatctttgagtttgatctagaatgcaggcttgtatgtataggtaaggagtactatacttgagaagcctttagtagtagaatataatctaaattaatagttttggtgcctggacatatatgagaattactaagtcagctgtttc

SEQ ID NO: 243086 - DNA, 587 bp, Cannabis indica
tcatattttagtaaattttatttgtatattaacatgtcaacggatcggattgggtttctattataaaatgagattttgtggatacgggtggagctagccgtttgtacacctgttttaatcatagtacaataaaaaaaggaaaaaatgaaaggtctattattgatttcttcaaaatgaaataaataaatataaaaaagcaatgtcacaaactatttaaatgtgatatcatgaactatttaatattttacttgcatctttcaaaaataaaattatatatgtagcttcaaataattacacattactgtgtaacctaagaatgtgtgaatcattatttataaataaatacacttactttgaaggttattttaccttgtgctggttcttacaaatgactttgtcccctattagtatttttctttattattttcccaaataattcatcaaatatatatcaggaaatgataatttaatctaaattgtttgtatatcatgtggccagtacaaatacttgcgtttttataatcagtgaacaaatcagaacaaatgtaaattggggtacctgtctacatttgaaataaggactaaac

SEQ ID NO: 243087 - DNA, 487 bp, Cannabis indica
ttaacaaagccacttttattttttttatcaaaattattgtatatttatatagacgtacaaattaataccaaacataataattcataaaaatataacataaaataattgaataacaggttcagtattttaggaaaaaaattaaaactaatttctttttgttaataaattttgaagtttcattaatttaatttatcattaatatttcacaaaagaataattgattcatagttaattattcaatctccattatcatataactgtatatttgaatccgaaaatcaaacacttgctctcaaataactcattcacaatttataactcttatatcaactcccatccattaccattactaattttaattgaataagtttacaacaatttatattattttgtttgagtgctttttgcaatattaatatttcattttccctaaagttttaattctaatacatacaactatatatattagacaatttatgggtaaata

SEQ ID NO: 243088 - DNA, 899 bp, Cannabis indica
aaaggcaggctaagtcgtagatttattggaccttttgaaatacttgaaaaggtgggcaagtggcttattgattagctttcccccatcgttgtcagctgtgaataatgtatttcatgtttcgatgctgagaaagtacgtgtctgacccaatgcacgttctgagttatgagacattggaattgcaacctgacctatcatatgatgaaaaaccagtgcaaattttggataggaaggaaaaggtccttcgaaccaaaaccatatcgttggttaaagtactctggaagtatagtaaagtggaagaagccacttgggaactggagtctgatatgagaactcagcatccagagctgttcaggttagagttcggggacaaaatccttttaacgggggaataattgtaaagaccgcttaagattaataaattggtttattatttaactagagtttatatacgagatttaatttatattataaaatgcatgttgtgaaaatataattaagttcatatatgtttaatatgctattttatgtaaattacttaacttctgtgtttgtgtttggaagatgtggaaagtgacattgggccttagaaagtcgcatttatatgtttagaatattttatcggggtattattgttgggtattagaggtgttgtaaattggtcgggacttgtataatgtctaaactacccttgggtgactttgaacatttgaaatatgttgagggcaaaaaggtcattgggtaagactttatttgtcttatttggatttgtgtttattgctgaatatgagggtatagattttaaaaaagaaaagaaaggaaattcatttgttttgcttaagttagaagaaatctagaaaaaccttaagagaaagcattcaactctctctctctctcttt

SEQ ID NO: 243089 - DNA, 1451 bp, Cannabis indica
tctttttttattttatttttttttttttttgtgttatttttacagaatttagcaactagcagagtaatttaaattgtaatcaaaaatcgtatagcaactcacatagaaatcactttaaaatccaaatcgtaaattaaaaataaataatatatgaggcaatttctttaaattaaatgatgtgtgattattaattggttgagacagagttgacaagaaaagaaaaatagatttttattcattcgtgatatttaaaaatataaagattttttttcatatatatatcaaaatttcattaggattagtttgacaaaaaagaataaattatgttttatttttatttttctgaaaaaagaatatattaattattttaaaggtaatgatgagattattttgatgacgttttctgaataataagaatgaatctattcgtttatttatttatttttaattttgagtgtaattattatttcttgttaaaaacgaaaagaaaaaaaaaagattaataattttttcaaatataaataaataaattatataaatgtttttattttcatttcataaattattcttttaatgaaagtaaacttaactttaaatctatcacgtgcaactaaacaaacaatatttaaattctaaaattatacaaaaattttttgttttgagtaataaaattatctatacgattttttttaacaatatccttataggattaggtattctaattttcatctatataaataatacattcttttaatcaatatgcaaaaccctaagagtacttccaagaaagcaaaataaattttcttcttccaaaatttagtgagacttaattattaatttttttatcataaacatgcaaatgatcatgaataccacatacgacatgactataagtttagattggcctaataatcttttagaacaaaacttccatgcccaactaaacaataagtacttaatttttcaattgaattttcgccatgcactgttaccttctcgacactttattcaaagtgcatgtgaaacgataataactaatcgtactttatatttttctgatcctttcaacttcacaagaactattctacttagattcggtgtgacagattcaacagtgatatcttcttttacaaccgcaatagaaactagcctcatcaatactctcaacgatcctccttttgcgacttctaaatgcgttactatcaatcttttcattgttgccgttagtagtctccagcaagaacaagagtcaaatattattgatattacttttagagaagcacttgatgttattccaaatgttcccgcaacacaagaatctattaaagaacttaaagaattgaatgaggatgatgataatttattagttagcttgggtaccgacaataattgcactatttgccaagaaaatttattgtttgaagattggaaaatcgtagagatgccatgtt

SEQ ID NO: 243090 - DNA, 650 bp, Cannabis indica
tttctagtggatcattagtgagtagagctttgaaaacgttgaagcagtggacattttctggctcaataactctacggaagggatcatcttcacgtatactatttatttttattttattttaaaacttaatattcttaatatcaaaaactaaatactacttgtttttttgttctcataacaattttcacatgatattggtacttcaattcgataatcatgttccatatactacactagttcactcagctatggtaatttagtattgcatctctcttatttttcttaaaaaaaagtaatatttagtttttgatattaagaatattaaattttaaaataaaataaataaatgtaatgcatttgggctcacgtgtccatatttatgagttaataacggaagtgatagtaacggtgggaattgtaacattagatatttttgccacaaaaaataaacattaagtatttaagtttataaaatcgaaaccattaaatatttatacgcatctccaatggtaacattttttgaagatgctatatatctccacatcattcaaaatataatattttattttatttttcttccacatcatttttggcacctttacttttaaaaacactccaatagtataatatatatattgtatttttaattt

SEQ ID NO: 243091 - DNA, 1410 bp, Cannabis indica
tattacaattatatattaatatagccaattgcaaacaatgaatagtttttcaagtgatcagtcaaactaaaaagtagcaccatttacaagatggagcataatgaattaattaataactcatactaacttaggtgtgaaagtatattacaatttaatattaaatttgacacatttttatttaataaataacataaaaaatcgattttttttcacattgattttttttgggataattaaacaacataaatgaagaaggtgcatttatataatatatatgaaaaaactaagaattacaaaaaggattcctttccttaacacctagaataataatgtcagtagatctagtaataaaactaattaaaggaaatagaaaaagcaaaaaaaaaaaaaaataaaataaaaaagtaaaaacatggtccctaaaagaacccaacttcagttagtactatttcactactacattctcatctctcatgaaaaataatattatgatgaatattgtcagtttccaccatattattattattattattacaataacaacaacaacaaccctagctcccttttccatgcaaattcaaacaccacagattcccacgtgccagtagttttccaacaagtgtgcgagaaaaatcatcatcattattattccatgccgaatattggtgtttgaaaaagactaggttgtttcgcatgaacaacttcatgatgatgatgatgatgatgaagatgattatgaacattactactattactactccctccgttaatattatgattactattactaatccagctacttaatcctgatccataacccaagttagtattattattattattattattattagaaattgactcgatgaaattaccataataccctccattacttgttgttgttgtagttgttgttgcattagttgttgtggccgagaggttgtgactattatggcccaacaataaggaaggagtagtactagtagtactactagggttagggttttggaaaccgaaaatgtttgaccaataatccgttgacgatgttgtcgttgttgttaggtcttgtttgatgggaagagtaaagcttagattggaggagatttgttgttgttgttgttgttgttgttggggtgttgtgttgttgttgttgttggtggccgaggaggagaaggcgacgagggatgaagcgggcgatgataggttgtcaatcgcccgttcgggtgaggttttggaaagtttggtgttgtttgacattcctccaacggggagattggagttggctatgcttttaacgtcataacggctcatgtcgaagtttgttacggcgtttaggcctcggaattttatcgccgcgatgtcgtatgcctcggctgcctcttcttgtgtgccttttaaaaaaaattaaaa

SEQ ID NO: 243092 - DNA, 518 bp, Cannabis indica
aagcctccttgtggtttggcacaaaggacaagccccttgttttcttgggattctatcatatatatgccacgtgggttgactattgcaacccatatcgtcactggatgccccttcacattccttatgcggaagtcttctgcagatatttttccagagttaacattgtttgtctctataagaggttattagctcttctagctttaggtcctcgggtccactggccgtggacacctctgaagttccagcttcagatctacggatttgacccttgagtggagcaatttatttgtaagactcatttgggggccttctgagtgggcctcgccttcacgctgggccttgagacagctcatttcctagctatccagaaacatggataacaacaatctaattcgcaaaatgtgaatatctacggttatgttgattgaattagatttaaaaatttaaaatttgtactcgtacggattgaatattaattcacatataaaagtaattgatcgaatccagtccacgcctat

SEQ ID NO: 243093 - DNA, 692 bp, Cannabis indica
agtctgaatttatatatccagtgaaatgcacaaaaagaattatgatttaagaactaatatgaattagaataatcagcaacaatattcctatcaaactgatcttagtttattgacaagtgcatgtatatataaataaaaacaaagattaaaaaaaaaagaatattatgatgattgagttaaaaagagtgaaatatattacttgatggatctgctccaacacagaagtactttttatgaaacagctcccagctttcctcttcattgagcaaatgaggttcatggatgaaaccatttcgatccgcatgcaaagctacatccttatttcgagtagtgagtaagatcttgctatgcaatgtgtctccttgagtagtagtagggaatgcatgttttagaagatcccatgttgttggggtccatatatcatcaagaaccaccaaacattttttctgtttctgaaagttgcaaagctccttggctaattcatcatcgcttatcattttgatttcttctcttctttctttggtgggagaagtgaaagcgaagtaaattgcttcgaagacattgcgtgtattacattgctgagatattgaggcccaagcataacaatcaaagtgaatcctgacacgaggatgctgatagacctttcttgcaagagtagttttgcccaaaccacccatcccacatacagagat

SEQ ID NO: 243094 - DNA, 1003 bp, Cannabis indica
cctgacattgctcatgctttaagcataccaagtaggttcatgtcaaatcttgggataaaacattggaggacactcaaatggctactaagatatttgagagggaatctgatattggattgacttacaaaaaagtttcagagcaagtaacattgaaaggatatgttgatactgattatgcatcaagcaaggatactagaaggtctgctacatcttatgtgtttcaaactaatagagattgtattagttagaaatcacagctctaatccgtagtagcacttttcaactatagaggcagaattcatggagaccacagaggcattcaaagaagcaatatggctacaaggaattttaaaggagttaaagcttctagttagaaaggtaagggtatattctgatagtcaatcctcgattcatttgtgcaagaatccagtttatcacgagaagacaaaacacattgatattcagttattttggataagggagaagatagaagaagaagtaatcgagttggagaaagtgaagtcagaagagaacctgctgatattcccactaaggtgttacctattagcaagttcaagcattacttggacttactcaacctttgttgctaagtagctacacatgaaagcattacaaactccattggacatatatgcttagcttgttggggcttgaagaaataaggtggaatttgtggtattattccttaaacccccaacaactattctgttagttagttaattagttagtctttacctaacttaactgtcaattatgacagcttgcatattgggtcccttgggctatataaagtggagtactcctctcatttcgtaagagaatcacaagggaagaagaacaagaataagggcaagaagtagagagacacaacacagtagagaaagaagttagagtgataaatggagagagagatatctgagaaagagagaaagctaggattgggaaattttattgaacaacattgttgattatgttggctcgg

SEQ ID NO: 243095 - DNA, 746 bp, Cannabis indica
atgtcattaactaatattttgaataatgtaattctttttaaaagtttgaaaatgactaaaacaaaacttattttggatgcaaaaaggacagagccactaagtcacctaaaaattacattacgttggatttttatattgtaatccttaattttatgggcattatcgtgtgcccagtggcgtcaaagtatgtttaaccatttaaagaattatattatttaaaatagaaaattatacattgtatatgctaacatattttgtaagaaatttgaagaaaaaaaggagagaaagagagtatattgtcaagattatgatttttaatttatggagatgttattcataaaatatcatttttgaaatgaattatattatctttaaaaaagaaaaaaaaaacgagttattcaggaactaacatgaaaattgacacttataaagacagttgcttaggcataaaaagtaggtgaaaaattacttttcacaataattctgcaagataatttataatcactaaaaacaatcgacagtttccttaaatatttatatttttatggttcatccaaaacatgatcaaatgtctcattcattgcggctttgatcgaagttgtgataaattaatgtcgttatatttagcttaaaagtatgttattgggcactagtagatatgttgtcatgtaattaaatagcgatacttcccaaaatttattacattaggagtatatgaaactcatacttaattggaccaataatga

SEQ ID NO: 243096 - DNA, 845 bp, Cannabis indica
atttatttatttataaaagaatggcaggaatgtctatataattagtgtgagctctatgcgtcggggaatacgatgagtttcacagggcttacaagaagaagccaaaactagtaaatgaaaaaagggaaagtttcggaattcacgttacaatgccaacatgaccccatataatacagttgcctataaacaacttgaaataaatgaatgaagaatacttgtatatttgcttcatattctcgtttaaatgttatgaagttggtatggttaccaatcttggtttcatttcaggctgtttcctgatatgtatcctgtacatctacactaaaatcaacgttcatctcactgtaatcttttcctttgaaacaggaaggtaaagaagggaagaccaatgaagaggtccaaaaatgtccggaagatgaaatccatagcgaaagcaatatctaagagcgagaaaacagttgagaaagttttgaagcatgacgacaaaaaatcgagaacacagtctgccaaattgctatacgagtaaagagctactagtttgtattaagggattgcaagaagttagtttttcgtgtcaaattctcctattattttttctgatgattattattagtttatatatatatgccaacttgtcaatgctatttttctgatgcttaggttggtggggaatggtcattatcatttcggctcgttttgatttttaattttgaggtaaataataaatccataaataaagtgtgtggtgtggggaaggttaaattgttattgaaaaatgtgtaacagcaagaggagctgtaaaccaaagtaattagtataaccttgatagtaatttccctctcaac

SEQ ID NO: 243097 - DNA, 1046 bp, Cannabis indica
ttggggaaactcaaagtcgccgaagctacccatattggaatgagtaatggatatgtataattacttgtttgaataagaactatatatataactagagatacagttgatgtagttttctttcactttaaaactttggttgaagtgagagagagagtcagagagagagagcaatattggaatgagtaatagtggttgtggtctggtggtttggatgcaagaaatgaattgtgatgtgagtatatttatacttggaggataggcatatgggcatgggatgggatcatcgtatgggtatgggaggaagtttccttcacttttcgatggagagagagagtttattagagtagagttggtgaggtagtagtggagatttgaccaagacgtactgggtgactgttgaaacttctctaccactgaaaaaaaatacttgcttattaaagtgttaatttgtgaaaagaaatgtacaaaagctgacttggactgttacttttaatattgacccctccctccatctccatgtatatattaataagtggtttggtttggagcaatataataatgctaccaaaataaccaatcatatacgcatatgttgcacatgtgaactgaaattattctttttcttttaataaattaagaagagggagatcagaaattagtatttaatatatagggatacgattttgtcctgtgatttactttcacggaatgtattccgtggtacattagatgggtctcatggtacattaaatgagtgttagagtacgtttctactttttaaccctaattacccctagatcaatctcagccgtcagatcaaataactccctcatctgaccgctgctgtacatcacggattacaatccgtgaaagtacaacaacgggacaaaatcatatcccttaatatataatacgtcttatgtacaattaattagtagctatttctattaaaacatgtgctgtaagtgagtaatcatctatataaatattatgctaattaagggaaagaatgtgggttaaacgtacgttttggtttggttgaaaga

SEQ ID NO: 243098 - DNA, 554 bp, Cannabis indica
ttgtttgcactctgaaattaatccggttttgtttctgtcttgttctggtgtattgatctgagattggagaagaggagaccaatcctcacaaactggtatcaagagccaggtttcagattagagtttgaagaaaccagttgaggttgacagagtgttcgaatgaattcctcaaagactgaagaaaggtaaccaacaagggaaacgcttactggccataagtttttctttctttctttctttctttctttctttctttctttcttatttgttcaataatgtctttggagaagtatgaggaggaggaaatcaatggcaaaaacaatttcagtctgtggggtgaaaagacaattgctcatcttgggaatcttggattagaagaagctctgaaaggagaaagaaaaatggcagataccctaaacaagcaagaaatcttgaaaaaggcaaggaatacaagtacgaaactacaaatattcttaatctaagtgatcagattttgagaaaggttttgaagaagacagcatgtgagatgtaaaataaactagagcagctgtata

SEQ ID NO: 243099 - DNA, 965 bp, Cannabis indica
gttcagtggaaaggtaacatattgaattgttcgaagttttttaacatgatggttttgatttcgtcatgaaacgaatgtttttctttgttattacatgacaggatgttgtcattgttgcaacccgaaggattgtgaggccaccaaagaaaggctctgctgcccagcgtcctcgcacccgtacacttacagctgtccacgatgccattctggaggatgttgttcatcctgctgagattgttggcaagcggattagataccgagttgatggctccaagataatcaaggtatatatgagaaagtaaatttgttattaccaatttcacataattgaaagatagatcacagccctgatgaaatgtatgtgtgacaggtttaccttgatccaaaggagcgcaacaacaccgagtacaagctggagacattatcgggtgtttacaggaagcttaccggtaaggatgttgtgttcgaatatccaatcactgaggcttaagtgactagtaactttcattacttgaatgatgggttctgttctgttgctgttacttcaatttagaagtctcatttgcatttttcagataggtactcttgaagttttgacttgtgagattttcataatttgattcagacatagcaattgttttttttattctcttcttcttgtgcttataaaaatcttgatagtttgttatgaaagataatttatcaatcatgagttgcttgcttttattttgaagctcttctttctcattttaatgaagaattcagggaaatttttattccaagagtgaagtttttgtttatataaagaaactaaggaaagatgaatgggatgagtaatgcatatttcaacagaattaaaaccatatttcatatttgtgttaaatattattagtagttgatatggagcattttttgtatagtttgtaattcaggtagggatgtacatcgggtatcgggtgggtttg

SEQ ID NO: 243100 - DNA, 1219 bp, Cannabis indica
ccgaggcccgcgggggatgactgagtagaggcggggagcccccggccggaagaaaaggctgtaggatgtgtcagagcacgagaaagggcaaggtgggaggtcgagggcaccccaaggagagaagcagaagtccgagcaggagaagtggatgaaagccccagattatggcccagcgtgaccgccggaaggttctcaggctgagaaagaccttcctgatcaggaggccctagattgggaggtcccgtcggggccaacaccccgcggaattgccctcaccctcgcccacacccgacgagatctcggggagggcgccaagtagggccccaatggcgtcgtcaatggctgagtcatgctgagatgacatgcgagatccgatggagtggtgtcttcaagcctcactcccttgcttttcttcgccctgcttttttgcttaggggatttcgacataagcctctttcgacgggctgcgttctgggcctcgatctcgtcaatggtcatctcggatagcctcattttgggaaggtgacgggggtaggtctctgcaaggcgggaatgatcctcaaaaaactctatcaagagtggctcgggtgtttgattcaagtgtcttaaagcaaattttaaaaaatcaggccaaataaagtaaggaggataaggagtggggatacctaggggggattctgagttcgcggggccaggcggaggatttgattaaggcttcacgggatagaaggaacttgattgatcgaagcttggggtctagggttgtgaccttccgaaccttctcagtaaaaatatcactgatgacagtctcctcgttatcagcaacagctgcacaagaacacccccattagaattagcatcaatacgcccacaacgggaaaacacgaaaaatacacatgatatatatacaacaatagtaagtaatacacccgaatacccaaagataaaagaaaagggggagagaaagaggttgaataagaaaaagccccagcaatagaggtaaggaaattaccaggatcccccagctctggttaataaacagggtcgtagggtcgtcagaaacaaactcaatggggcctcaggcgaaaaagaacctttccttccaccctttatgggaagtctctaagttagtaaacaaggcacgactcttcctagggcgaagatggtaacgccccggctctttttccatcagaaagtaaaagtggatgacgtcagatac

SEQ ID NO: 243101 - DNA, 961 bp, Cannabis indica
ttgggagtggtgacattgggagagagtgtttgaaccgcgccattgggagtattaaaagaaaagagagaaggagccgtttgtactgttgtactattagtaggtatggtagagtgaaaagctaaaatagcaaatgggaagatgtgttcatcaaataggacatcacgtgatatgtataatctaccatccttggaaagacacttgtaccgtttgtgggacaagctatacccaagaaagacacaaggagtagacctataattgagtttgactttattataaggcctaagattaggataacacaagcacccaaaaactcttaacattgtgtaatctggtttgacatgaaattataattccaaaggtgtgctaaaattgaatttgggtgtaggcattctattgataagaaaaatagcagtgcgataagcctcatcccaatacttaagaggtaaggatgcttgagctaaaagggttaaaccactctctactatatgtctatgtttccgttcagctaccccattttgctcatgtgtgtgaggacaagacaacttgtgaataatcccatgttcttttaaaagattggtaaaagcttgatattccccaccccagtcagattgaagcttttcgattttgaagcctagttgtaattcaacttgtgccttaaaggtaataaaagttggtaatgcctcacattttgttcttaacatgtaaatccaagtgtgtcttgaataagcatctataaaactgatgtaatacttgtatccactagatgatacaataggggcaggaccccacaaatcagagtgcaaaagctgtaaaggttcagtatattcagtagtggaaataggaaagggaaacttatgatgttttcctaaacagcaagaatcacatagatctgaaaaattgacatcaattttattgcttattttgatattacaagttgatagagcactttgtacaatttgag

SEQ ID NO: 243102 - DNA, 604 bp, Cannabis indica
gaaatggcaacatttccaccctcaaacaatggaaagtcattgtgatcgccactattctggctctgcaattcactgtccattgcgctagctttaccaatttcatgattttccacccttccaaacttcttaacaaaacatttataggacacaaacaatacaaaaagaacaaagataatcacagcaattacaataccagcaatcataccagccgaaacccgattaccattccttgttccattcgcgctcccatcagtggaattgctagagccagagccagagccagagccagaagaccctccactctccgagctcggagttttcccaagtaaaagattaccagtagtagtaaacttcacccttggtggaaaactaggaatatcaccagtaagattattattagaaacatcaagaacttgaagctgaggcaaaagggttaaactactaggaattgaaccagtcaaaccattatcatccaaatacaatttcttcaaagatgtaagattagcaaaaccagatgaaatcttccccaaaaaccccagcctttgaaaattcacaataataacattcccatcagaatcacaaacaacaaaactccaatcagaac

SEQ ID NO: 243103 - DNA, 850 bp, Cannabis indica
gaggggcagtgttttgaagatattgtactcgagccacgcaataccaagccttattctcatttgggacggtaacctgatgtcaagacgaatacttgggacacttataatcacaagtacactccttgtcagatagaaggcccatcgatcttagattggcctcgtttaaaagggagtcgcatgacctaaggccataaggaagagtcatcagaagcctatgccgactgaccatctcgggggtaggggtaggcctcgtcaagagagttgtaaaaacaaacaaaacattgatcagaaaactgaaagagaaggatttatataactgagcaagagaaaaaaaatcacttacgaagtctgcaaaagatggttatgccgatgggggaaagaccatatgtctagaacaagttgtttttaaaagacctttagtttggcaagtccacaatgattttaggctcgctacaatgagtaccgagctagtagaagccccctacagcattcttcctcgatggaacagccttaaccgagtagagatactcaatctctactggtgtggggcattcccagttcagaattttatacaagaccttcaaactagcgagaatcctgtaagaaattggattcagctagaatggggcaactccaaggtggattatgtaatccttgaagtagtctcgaagaggaagtatggcccatgcattgatatgctcaaggctccaggcgcccataccagtcgagccactagtactagtctcaccactttggggtactgtttgaaaaatgcgcaggagggaaacaactgaactcaccctctcgtactgatctaacaaagcatgatttcctaagttcaatcccacat

SEQ ID NO: 243104 - DNA, 565 bp, Cannabis indica
acctcaaacaagcagctgagtcaataacctttcggcgacggagtgcagcagccgtttggatagcattgtgaagaactttccatgtaaagattttgatctttgatggtagtttcaagctccaaaaggttttccaccaatccctgtgtaagtttgatgatgaagaatggtgttgttcttctatgttcggagctaagtggaatcctgactttaccgtttatatgcctgtggtggtgtgatgccaaattagtccatcaccggaaggaaagaagcttagaggaattgtgacaattagatcaatatccaattgtctaaaaaaatcctaaagcaattgcaagttccattcccgttcagctgtgataaaattggcaactggcaaggtatttggctcattgtaggcaataggcttgaactccgtatgaccaggtatccatttgtctaatccatatatatattgaaaccattccaactttgtatcgtagcccttgagcaagaagttcacgaccccattggatgctttgtccatgtgagagaaggtgaatgtcctaaccttgcttccaagaatatg

SEQ ID NO: 243105 - DNA, 777 bp, Cannabis indica
cccaaactcaggacctgaacccgcacccgaacccagaccaaaaccttgtccagaacctagacattgtctcggacccagatcgggatcccgcccgaacccaaatagggaccaagactcagaccgggacccaaaccctgactcaaacctaaacccgtactgggacctagacacagacccaaactcaagatcccaacccgaatctgaacttggacctagactgggacctaggatccggacctagatgggggacctaggccctaaacccgaacttggaccaagacctggaccaaggatcctgacccagatgggggacttggacacaaaattgagccccagatccgggaccgaacccaaaactcgaccccaaactcgagacacgggacccgaccctagacccaaaacccaggacctgacttccagacacaaccccaaacccggacccaaaccaaaacttaagacgcggcccaagaccgggaacccaaactagaataagaccgagatccaagactgagatccgaatcttgacctaaggcttcgacctgacctgtagtcagtgtttgaatccaggacctggacccggatctgtacccagactcatacccggacacaaacctaaacccaaactcaaaccataacccataccggcacttggacccggaccgggacctgtgacttgggacctaaaccaagacctggactttgacccaaactgggacccgaacccaaaccaaacccagacccaaaaactaggcccggacccaggacctatgaaccaga

SEQ ID NO: 243106 - DNA, 928 bp, Cannabis indica
tgcctgcccctcctgcttcagctcttccccgtcgcaatccccctgttcgtgttcagcctcagaatacagatcaagaatttcagagaaattccaccattgcagaagataactcgactcagactctccaaaccagatcggcagctgatgatcattccagcccgctctttctcagcaccggcgacaacccagggttggttcttgtgaccacactcctcaatggaaccaactaccagccatggaaacgaggtatcaccatggcgttaacagccaagaacaagatcgcgttcatcgacggatctcttcctcgtcccgaacctggtaacacaaatctaaactcttggttaaggtgcaataatatggtaatgtcttggttagttaattctgtcacacctgaaattgcacaaagcatcatgtattttgatttagctactgacatgtggagtgaccttgctgaacgtttcaatgagggcaatggccctagaatttttcaattgcaaacccagctcactcggcttcagcagggtgactgttctgtttctacatattttacaaagttaaaatccctttgggatgagttgaaagaatttcaacccataactacttgcacttgtggtgcaatgaaaatttttttggattcttacaaccaaaatcaagtacttcaattcttgactggtctaaatgaatcctatgcttcggttcgtgctcaaatcctactcaacgaacctataccaaatctgtcccgagttttttccatggttgttcaagaagaacgtcaaagaaccctaggaaattctgattctattcccttggctgctgcatctagctctaccaaccctccaagaaccaagaaacctaggccttcttgctccaactgtggcaaacccggtcatcttgtcgacaaatgctactttctccatggatttcctcc

SEQ ID NO: 243107 - DNA, 1260 bp, Cannabis indica
atataacaagagagtaaaacaaaaatcactagaaaatgaataaatgaatgctctgttgaaactcgtaatgcttcatttctttgccattaataattatcattaagcaaattaatcaaattctcacattcaaatgctttaacttattatatcacaaacacaactaatataaagtcctaattaaaaaactaatgacaaaaaaaggctatgcatttaattatgaggtgacaaaagttcctttaactgttaaattatgtgttgaaatatatgtcttttgattgatgaaagtggtccatccatagttacaatttgcaataaacaaagtcaaagattcacataaaaaattaaagaggaaaacagttttaacttctaaagactaaaaatatacaaactttatatcatgctgtacacactggattgaaatttgatatattaaaatctgcaattgaatttgaagcaaattcacaaaatgagttgatcaagaaattggttagtgaatgggagtttaatgaggccagaggcaaccagaagtgaaaaagtccaaatgggaagtagccacataaaggtgaacattagaatcttcttacctgcaatgtgaagaaaggtaccaattttgatgtttcaaaaggaaagaatatataaaatggtataaagaaaagtgaagtggtatttttttataatgggtgtagcatatatacttagatgaatgaagctatgagttttgatggtagaataggaattataaatcttgccttgaaatggaataatcattttattcgaatgatatttcaatactttaaaatgtaagaaataaagaaataaataaaattgtttcttttctattttattaactccaaccaaacaccactttatggtgtgttttatttggaatagtgaaatagaaaggaatagaaaagaatcaaattttatttgatttgttctactttaaagtgttagaatatcatttgaatcaaatgatttttttaccattttgataaaataattattacattttacaatgaaatgaattgaaaatatagtgaagtgaagtgaaagctataattttatgttttaattactttgatatgattctaatcctgttcttattcaagctaggaatatatctggaggcgtttggttgggaggaatgaaaatataggaataggaatagaatggaataaaattaaaatagcataaaaaaaattgataaaaaaataattaaattttttttcttgttacattggaatggtcattcctttcttt

SEQ ID NO: 243108 - DNA, 792 bp, Cannabis indica
ctcactcattctgttcataacagcaaattctatttaaagagagttgagagagcgaggaagcccgattacccacatcaatcagtttcttttgcagatcaagcttatgtgggactaaagctcaaagattcaatgactggaggtatttcgatccttaagttatatagtgtatatatttgtttattccgcatgttatatatacatatttatttcagtttgtacatataaatgtctaacagtcatgcaaatattaaagtttaatacagtaacaaaggtaatcactagtataaacaaataaaaaaatttaaatgtaaagagttgaaattgcaaaccctcaatttttacaaggttcggtagaactaagccacctactgtttgtttttagggttcatatcagagtcgcagtgaaagtatttagaatagaattcaataaaaaattattgaatccaatgtgaacaataaacctcgaatctcaacacaattatacataacataaacataactattaatttagagatttttaccacttgttgcctatcagggttacttccctatcttttcgtatttatgaaacaatcatccaatccagtaagacttgttgcagagttcacaccagggtcttctaagtcagtctcaacactccaggaatagaatgagctactagattcaatttatgaatataactttctcatcacagttgtatactcaactcatgagacactatgattgaatcaccctcaagagagactgatgcatgagtaatatatatatagatctagagagagagagagagag

SEQ ID NO: 243109 - DNA, 527 bp, Cannabis indica
tgtgggacgagctggacctcttaaggaggatattgaagttaccactagggacattgaagtccaagagattgacaaccatggtgacattcgtgcagccacttctcataaatgcgatggaggcgaagtattagaggaagaaaaggaagaagctcatcgggtttttcccttcagaggatataatgaggctgaagagcttgtttctaagtgtggggatgtcttggttctagacctatactacgttgatgaggaagcccgtccccttagaactaaggataaaaaagctcctggtgggtttctgtaacgcccttctaaattaggcaccttatcatgttttctaattactatgcaattctttgctactcaaagggtttgttggaaaacatgaataattaaaaattttgtaaatttaattaaactaaaataaataaacacaatacacattttgagatctcgtttgaaaaaattacaaccgttttccaaaatacatttataacagaagttgtcgcctagcgacaatcaaaataaag

SEQ ID NO: 243110 - DNA, 540 bp, Cannabis indica
ctaaatttaacacaaattttatattttacattggaagatagtgataattagtgaaaattaatgttcacaattgtgtttacaatttacaagttaaaattaacaaagaaattagaaagaaaaaaatggtaagacaaatacggccttgttcttttcgccgaataccaccactgagatcaaaatcagcatcattactatcttcggcatacctgttagagatacctttgataaatatttgggccttcctcaaacatttggaagaacaaaaaagaatgtcttcaattacattaaagatcgggtttggtctcaaaatggaattccaagcttttttctaaaggaggtaaagaactccttttaaaatttgttgtccaagccatctcctcctgtgctatggcttgcttcaggctccccgcctcttttcattctaagcttgaatccatgatggctcgttttttgtggagaggaatggagcaaaaccgtaaaatttattggaaaacctggtctttcctttgcttttcaaaattccatggaggtcttggattt

SEQ ID NO: 243111 - DNA, 1606 bp, Cannabis indica
ctttctcatatattattattaattggttgccaaaacctcggtcaatattttggtgctttcattgagagctgaaggaagtatctgcaagtagacgacaatcttataagctaaagcaacaatggtggagactcgcaacacatgtcacgccccgtcaaaacaaaaagatgcaagaggtgatgggcaccatgctaaaagcgatggagacagcaaggatccacatacactctaaatccatccatgcaggactcgaagaaacaacggaagagtcctcaccaagcactcaaaagcataagttcagggagcctagccccatacggtatccctctaaaggaaaccaatggaaaaaatcctacctccatcctggggaaaaagaaaaaggtgcaggatccgcgaaaggtccgctcagatttcccgaaagggaaaggttcgcagaggggaaaattccaaaaagggagtcttggccctcaggatcgagaggaccgaaaaagcgtttctgtgcaccaggaacctagagagaaaggaagaaggaaccagagataccctcccgtcgatctaagatatcagatcaatggaaaacaaggtgacctacgggatcacttggatcaaaagaaacacacaccggcggtctccacgggaacgctgaacgagggaattatggctgagcttgccatactacgcaaagatattgctcgagtctcccggagacaaaaaggggatgactcaaactctgactgtgaggaccgggagccgtgtgctagacacattttggaggcggaactccctaaaaattttaagatgcccgaaatggcagcttacaccaggaattcggaccccaacgatcatttatctcggttcaaccgagtaatgacggtcatgagagtcagcaatgacgccaaatttttatgtttcccactaacattaagtggatcctcgaaaaagtggttcaagaagttggaaccaggatcagtggactgctggaacaagttgcaaattagtttccagagataatttgtcaccgcgagaaagattaatctcgaagtcagcgccctgactaacatcaagcaactacccatagagacattgaagaatttcataaagaggtttaaggaagaagccttgaaaactaagaaaattgataacggacaacagcttgcacttcttcaagcagggatccgtacagggactccattctggaacgagttacagcaagaaggagctgtgaacctccaagatttctagaagagggtccaaaagtacatcaacttagaagaagcccaaatagtggcttatggaggatactatccgaccggagtggcagggtacgtgcccggagtccaactcctgggaacactacctttggctactccacaaatgagcggtatacaattctccgctaccccaggatataatcagagccaggcattggctcccacatcttcgcactatgggaatccttcaggaatgagcggacaagtcccgtctcactctgctcttgctgcaagcctagccggaccttctcaaggctctcgacgcaagaggtcctcgaaggtagcacccggacagaggacaagcgacagaaaagggggtatactccccaatacactca

SEQ ID NO: 243112 - DNA, 1726 bp, Cannabis indica
gccgtcagatcaaataactcctttattgacggctgccttacatcacgaattacaattcgtgaaagtacaataacggaacaaaatcatatcccatatatatataatacatcatcaaattaaatcttttagtgccaattttatatttttttcttagtattaacgtatttttgtaattttttatttttgtttattttttctaatattattattattgttaaatcatattgtcccaaattactgcaagaagaagaaataaataaacagatttgtttgattttaagctctctaattattttcaaaaaagaaaaaagcctctctaattattttatttcatttctaccaaactcaaataccctttttcttcattcttcaaatttcatgccatcacgttatagtatgacataccactaactatgatgtatgtatatctatgtatgtatatgtatgtaactcttattaactctcccaaaaagaaaaacagaacatggcttcaacatatcttgccttctacttcaccactatctttgcttccttcctccattaatacctgaaaaataaaaaacataaagctcatcaatcatgggtagtagtaacaattggctcaaaagaattagaagaaattttgtgaaagggtcatcaaaatctcctaggaacatcattgttgtttactccaacacaacaacaacaacattttaaactccaacacatcccatgaagaaactactcaacttgtctcgtcaactctaacaagacacgatttggctgtcatcaaaatccaagcacatttccgaggccatcttgtaattaatttctactactactaataataataatgacttgcttattttgttgtaatacataaaatgtcatctcatgtggtgtcgttgcttaacatttaatttgtcaggcaagacgagcatttcgagccctgaggagccttgtcaagttacaagccatggttcgaggagggcaagttaggaaacagtcgcgcatagctatgcattgcatgcaagctttagtcaggttgcaggtcagagttcgcgctcgccagctccttggggggggataccaacaacaacaacaacaacaacaacaacaacaacaacaacaacaacaacaacaacaacaactggttaaccttgcaaagacaccttttctagaccatatttacaagttggattcccttttgtaaaagaaaattgtaagaaaaaaacagtgataaaataacataaatatcaatttttccatgtttgatataaaaaatttgttgattgaactttctttccattccaaacatgaaaaaaatgatttgttgtttttgttttatgtcctagtgtttaattgtttatttgttggtatcgtaattccaataactacatgtattgtaacaacaacaaactacatcaagtatcacattttaattgggaaatttgattttatatacttaaaaaactaaaaaaaatattcttaaaccaaaaccttttaaactaaaaaattatgacattttttcttaaaaccccaaaaatacactctcatgattcaaaccctttctctctctttacctcaaactctctctgcatcatctctctctctctatctcgcatcccacaaggccacaaccacccacctcaccaccacctccgacctccgaccctcaccaccaccttcgaccacccgcaccaacaccctcgacccagcccccttctctcggaccacccaaacgtcg

SEQ ID NO: 243113 - DNA, 777 bp, Cannabis indica
aaattaaaataataatttggactaataacattttgacacgtgacaagaaaacgactcagttaaaattaggactaacggacaaataaaaagtgtgaccttgaggactattgccgctatttttggacctaggggactaatctgtatcaacgtgaactttttggggacttttgctgcaaatttcccttctcaattttataagatatgtataagtttcatcttatttttataatttggataattattatatgagtttcaatattagtaaaaaaaaaatttttgagtaaattaaaagttatataaattattttaatttttaaaataatttctcaaaagtccgtttgagaggctacaaatgctagcttttttcaaaagtacttttaaattaaatattaaacactcgatatgttagttaagcagttttagttagtaggacacatgttttttctgttagtaagttcgttggatactattacacagttataatagaattccaactctctcttcttcccttgtatcaagagcttaagctctatatttattgtaatcatgtttcatcttcattcaatgaaaataacaattactctattccgcaattctctaaacgaatatggtatcaaactacaagtactctgttctacaattctctcaactaatatggtatcattttgataataagcttccatttctttcttcttcgatcatctcaagatcgagttcttcttcttcacgcaacagtggccaagcatcatactcagagctctataaatgatgagaatg

SEQ ID NO: 243114 - DNA, 2079 bp, Cannabis indica
ctcgtgtataagagccatttattccgtgggtgtaaggacccaatggaggcttaaagcggggacgttacaaacaataaatcaatctcacgataatcataaatcaattataaataaactatataaaaaaatcagaaaaacaacatcataacaattataatacaattataaataaactataaaacaacaaaaaataaattattttactgaaaaatgtatttttacaaataaaaaagtttgaagtgtaaaagtaattttttttttcatattgacgtaattttgtaattttttaaattctggttaattttataaatttttccaaaaaaaatatgtacatttgaacttaggaaattaatatttttaaaattaattattattataatatataacaatataactaattattacattgtacttagcaaggaaaataaattttcttttataatattaaccattaatgcattcgatcacaagttagtaagtgagaaacaaaataattagttatatattatatataatataatatgatttgagaatctcacaataaaaattaacaaatttgaatttttcataataaataggtttaactttaattcattacttttttttatattgatctatttatgtgtaaattctattttgaattttgtgttttacaaaaattatcaattagactttgtattttgttaaatgataaaatggacattgaattttctaaaatggtaaaaataggacactgagcttaatttttgacaattttttttaatataaccaacttgaagacaattcctaatacgaatagatagaaaaaatgtaaataattttgtcatagaacttttagatcggattataattaaattttactttgacaaaaaatcaattcaggatcctatttgtactattttaaaaaatacagaatttattttgtcatttaacaaaataaaaagtccaattaataattttttgtaaaatacaatatccaatatttatcctctatatatattaattcgaaataattatgcaacaaccacatgtttagaaattacattcttatttttaattttaaactacttaataattaattggcttttattttgtacgtgtcaaattccaacaacactcttcaatcttcatagtcaacacatcaatgagatttttttaaaaacacttatgaaataatttaacttaaatacacttatatatcctatcaaagaaaacttaaatatactcattgccaatctcgatatttattatttagtacctctatatatttacataaataaacaaatttataagaaataattaagaaaaaaaacttttcataataattaattcttttaagggatagtgctataaaaaatggtctcgatgtattattattattcattcttttgcttttttctttaatttatattatacacacacaaaaatttatatatacacacacaaaagtttaggctaaaattaaaataatgatcatcatgatcattaaaaaaatgttgtaatatatttaattgaatttgttaatcacatatatacaactactaatttgagtaatcatttgtgaatattagatatattatactctcatctctaaaaaaaaaacagttttagttggagactataattaaataattaataaggttgttatagtactagttaatggtgatattcaattttcagtacgtacgtgcatatataattccaaagtttatttatataattatatataaaaaaaatgccagttagtggctagtggtgtgtgtattagtgatagctatagctagggcattataaattataacatatatattaatcaaatcaattaattagtacaaattagtaattaggagcatgcatatgtacattaatttcaattgatatatatatacatatatgatatatcttcatatacgtgttgggtttatgaacgtggacgggctaccatacaatatagtgatctttatatatataatgcacaatatatatatatatatatatatatgtagtaattaaataggaagatacatgtatttatatataattaattaagtaattaaagtacaaagaatagaataataa

SEQ ID NO: 243115 - DNA, 801 bp, Cannabis indica
agaaatgtaatttttgtcaaattttatttttctggtaaaatgaataactgaaatgtggtttattaacaagtatactcagtcaattaaactttataaaatcagattattaactagatttaaatgcacatatagacaaaacacaaattggcaaaaggaccattttccccttcccacactaaaagtcataaaaggtcacttagggatattttggtcaattctaaaatctcgactattcttcaaattcccaatgtctaactaaactgtcccgctatactaaaaatactaggatgtgattctaatagccaaacaccgcgttccaatgtttcctggtacaaaaaatgcaaagttatgaaattttatatatgacatataaaatgctttctgaattcaaataaatcatcataaataaataattctaaactaataaacaagtttcataattaaacactaataatctgttaatttccaaattaaagctaagcggtctttacaattatccccccttaaaaggatttcgtcctcgaaatctaaccgtcgtcctcgaaatctaaccggaataactgtgcttattgagctcatgtcggattctaactcccaggaggcttcctccaccttgctatttctccagagtactttgaccaaagttacggtcttattcagaaggatcttatcctttctgtcaaggatttgaaatggttgttcttcatatgacaagttaggttgcagcttaagattttcataccttattacatgagcagggtctgaatcgtacttccttagcatagagacatggaatacgtt

SEQ ID NO: 243116 - DNA, 591 bp, Cannabis indica
acatttgcccatgtgcaaccccatagaagcttttgacgatatagcgtttgctatagaagtcagtgaacatgttgttgtaaaactatttcaaattgtcgaatatgatcttctgagggagtccaaaatgacatatgatgtttttgacaacgaagtcgaagactttctttaaagttatagttgccaatagttgaacttgtgtccacttagtaaaataatcaaatgggactaacatattgtactcctccttttcttttaggaagttatctgattaagtctatcccccatatgactaagggccaaggagactacatctgagtgagctcatttggtggagttctggagatctttgagaatctttagcacttgtcacattttttttgtatagtccattgaatcttcaattataatgggtcaaaaatacctttgtttgagtattttttttttaaaggctttgcccccagtgtcattaccacaaaaaccttcatacacttcaatcaatagtcgttcggttattccttggtgatactattagaatatttctaattaaggaaataaaataatattattgattctgataaatgaatattttat

SEQ ID NO: 243117 - DNA, 862 bp, Cannabis indica
taccggatgagtcggtttttgtaatggatttgaagaagttattgagccgatatagagaactggtccctcagtttacgacttgcaggtttactattttgacattgaaattttcttttattctttttcttcttaccttgttgattatctgcttaaattgctcttgtgcacctttggccttttgtttctgtaacaggacccacatcatttgctccaattatagaaatggccatcactgttgttgagcagagtgggagtcagtaccatgttctagtaataatagcggatggacaggtacttattctattctgtatcattttgtaagtttctcatcaagtattgttactaaatacgaatttgttttgtcacagatgggttaatgtgtgagtagtccgaattcaaattctcctaaatgtatcttatcttgtatatatgtttatatgatttattcccttctgatgttttatccatgaagacacagaaactgagcattgccaagagtaaaatcatcatgtggcaaatacgtagtgtttctaagtatggacataaatattaaattaccccgaattgattttttatgattttgtgtaggcataattatatgggcagtagacacatttagtgaggctattatttttaagtgaacaatgacagttggccatatggtcttaaggtttagattgctgacaattgttacccttgtctcttgttttcaaatttggtttcattttcttaaaaaattgtttctttaaagatagtaacaatttaattttgtctagcagtgtatttttactaagatggcttaataattagtaaatacagtataatatatcttaaaaaaaacctacactggctatcttccatc

SEQ ID NO: 243118 - DNA, 598 bp, Cannabis indica
tttttaaaaaaaaaattaataagaacaagaaaaagaaaataataataaaattaaaattgcgattaatatatactattataataatgaagattgaaatagtataaaaaaaaatctcgagtatgtgttgttaagaagattatttcacaactgcttaaaaatatgtaagtagatatccatttataaatataaagatatatatatatataaatatatatttatgtttgggtgcactcttaatgggtattacccatgaatgagtaaaattaatttatagttaaatttgtatagtaaccattcatgagtaatacccattaagaagtgttacatgtttatatataagttcatatatatcaaaatattatatttttacattatatcacttaatttgtaaaataaattttgcaaaactaggatcgaaccctcgcgaagcgcgactttatttcctagtatatatataagaaattttctattactataaacaataaaaaaaatactaagccataggaatcttttcaaaattacattatttttttttttagttttgttttgggtaagttaagaattcatattgtagaaaccttaaatataatattctgcc

SEQ ID NO: 243119 - DNA, 1327 bp, Cannabis indica
tgtcactaaaacctaattttctaatagtgatcaatcttaccataaactttctccccactttagggttgccattcttgcaacaactcaaacacagaacctacctcatacgtacaaacaagccaataaaaaaaaaaaaaaaatccaaaaatggctaaatgccatggacacaaaaataaaggccttggaggctaacaatacataaatagttatttctctcccacccgaccaacacaccattggttgtaaaatgggcatacaaaatgaaatataacctagatgggacaatcgaaagatacaaatcaagactggttgctaaaagctacaaccaacaacaaggcatatattattttaattcatgtgcccctgaagtcaaattcaacacattagaattacttttagctcttgctgccatcaaaaattagaaccttcatcacatgaatataaacaatacttttctccatggttaaatgaagatgttttcattaaactacctcaagggtacactccaaaagaagtgatcccacctaatgttgtttgttaactagaaaagtctatatggataaaataggctttaaggcaatggtatgccaaattgagcatcacacttctacatcaagggttttatcattccaaataagactactctttattcatcagacataaattaggtgtattcttagcctagctcatttatgttgataacattataattgccactaataacttgcatgaactaacaacatttaaagcttctcttgatgcttaatttaaactcaaagatcttggtgacttacaattttttctaggtcttgaaataggtcgttgtgacaaaggaatttcagtcacgcattgaccattcaccattcaacttttgcaagactcaggctacttaggtgctaaattgtctccacaccgatggaacctaacacaaaactcagcaaagacttaggacagcttatacctaatccaaatctatacaaaagtctaacagggaagctcacatacctgaccatctcaaagcctgatataagcttttcagtcaataagctcagccaatatctttatagtcatcgacaaccacaccttaatcctgtttatcaaattctgcaatacttgaaaggaacacctaaacaaggcatgttcttttatgttgaagctccaacaccactctgttagacttttatttgggcttacattaagttttattggttttattaaaacttgggttgattggatagttctttgctgtgttagcccatgttgttggtgatcaattgttaatgggcttagcatctgtgagtaaagtctaggtgaagcagaagtgtgg

SEQ ID NO: 243120 - DNA, 2536 bp, Cannabis indica
catttccttattcattttcttcactgattctgtgaaactcagttaagctcaggattatgctaaaaataagtttttagcctactcaaagactcaagtatttttacctcattaaagttttatgaagctttagaatttacttgaagatggtgaagatggtgatggggacacagggggcttcaagtcttcatacctgttttatatataattgatttcggttagttgaacaaagcacaagacgattacataacaaaatatatatttgctcacattgtgaaaggtgatagtggtcttggctttggtttgacatgatcctgttcttcaatctctgtcttttcttccacaggaagttgcactgagctctgaactggtgtgctgctatccacagccaatggcgttgaggtgaccgttacatttggagcacttggagatggtgatgtgggaggcttcagctcatcatacctgaaaacatagagttcatcaaggcttgcaaaaaatgacttgattaatcacttaatatatactaatttcccaagttaagataaacacattaacacaatcattttaaatcatcatgccaaaaccttcacaatcatattttttatctaagtggtgatgtcatgtgtatggacccctttgaaaactccaggtaatcaattttcattccattcatttgtttggttgcattttaaagtattggaataatttttctactattttggtggaatgaccattctattttgaaatggaaagaaaaatcatattccaatgcaagatggaaaagaaaactatatatatattaagtattttaaattttgttctatttcattctcattcttattccattctcatttctaatcttatgttttcattccccgctacctaagttcaaatatgaatgcaaatgaaagaagcttggacccctttcactaaggactgtacatcatcaaatatggagcccttccctattattgaacacttgtcacccttgtttggttctacttttaactcatcttacaaagttggtttctttttcttcaaattatttttggttttgggccaccaaattctgtaaataaacactaaagaaggaatatcataaaggcttacgcagggtatggtgaaagataataagatgaaatcttgggagggccattttcagcaacactatctatcacaagctctgcaacctcattgctttcagaagatggtgaagcgagctcacttaattttgaggcatctaaaggaatgcttttgcggccaccgggtggtgttgggcttggagagctaggcggcttcaaatcttcatagctgaaaaataagatgatagaataatattagatattcaacaatatataatgttgaagcattttacaatcttaaatccacagattgtagccctctacagaaataacagaaaatatgagaggttgtaaattttggtgtcatgaaactatgaatgctcatgaaaaaggaaaactaaagatgagtttacgctgaataaggtgagagagtcattcctttcttcacttctgtctttacatcttcctcgataacagttttcgagacttcctctgaagcagttggagttgatgcctcagtgggagtggcaccaggagtagtacttggggttggagtaggagatgtaggtggtctcaagtcttcatagcttttcattggccaaatagagagaaagaacattaaaatagataatgttttttcttatacaaatgacagtgaagagtatattggctcacgcagtataaggagactgtggttgtggagtaattttgtctggttttacatgttccgtcacagcagaaggtttcggttcctcagacttaggaggtggtaaatcaggctccaccactacacctgattcctgttgacataggagggaccaagagacttaaattttgcaatgagagtatttttcggttgagcactttgatgacaccactaactcaaaagcaaataaaaacatagaaataattcttttcacactaaaagaagaattgtgcaaaagacaatggttatattttatactcatatcaagtttttagacatgtaatgtcatcatctccatacaagaaaagagtatagataccttcggtgggaatgagccaggtcgatcagatggtatcgttttcagaagttcttccacgggagtcaatggagcagttgtctctgcaacgacttccactactttgcagtatgacagatcacgatttttagccatacttgccataagctctgccacctaagtttaagtaattgaacatcatatatgtagatgttagaggatgaacttcaagtttctcaaccaaaagtaaatagtgatgctcaagcctaaaatacaatagcacagacagtaagaacacctgcagattcgacacaagcccaccaaacagcgtatcttgctgcgagagtgttgtattatgtgtttccttgaaagtatcggtaggcctttccattccaccaggtctcactatctgagagattaccattttatcagtaccttgcttacaattaagtcttc

SEQ ID NO: 243121 - DNA, 1103 bp, Cannabis indica
acaaaaaacaacaaaaaaaaattataaatttcaagaactaaaaaaaaaaaaaacaaaaaaaattataaaaatacgatttcacggaattttaaatattttttacgattttttttgattttatttacagaaaatacggtctttttatgttgtactcatgttaatttgttgttgattttttgttatctgtatgttattttttgttgttattttcatgttacttttatattttttttttgttgttgttttcgtgttgtttttatgaaaaactgtaaaaatgtaaaaaaaaaaaaaaatctttaaacgtaaaaatataatttttttacaaaaaataatgtcttatgtaattatctctatgcttttattcattctaatcaaacgtgatccaatttttttaaagaaattttacattaaacactaaaatttacataactattacaaaaatattgttgggtttactatcttttttactattttgtgcttctctgcatgattagaagcttttatctacatttctattatactatactatctctctccacttataatttgtttgtattatatctccacttatttttatactatactctctctccacttattctacttttattggttattattattattattattattattattattattattattggaactagtgatagaaatttaacccacagagacgggtacccacgggtatccaccctcaatggatcgagatatccttaagtgggtaatggagtgatggtggggagtaattttatatacccgaagttggtttggggcaggggtgatactatccacctcatattcgactcatatatatagtttctaaactttccatgtagttttctaattattacgtattaaatgctagaaaaccaaaataacccaagacacaaatttgtatataatctagaacacaataataatatataataattaagtatgtatacataattgatacatatcaattacaacaatttaatagtacaatactatcaaataagtttttttccttaaatctctaaatcagaagccgttttattcatctgattatcaaaaatatacaattgtgatgaaacaatatgtattttata

SEQ ID NO: 243122 - DNA, 835 bp, Cannabis indica
ctcttcatcttcttcttctttcttctcatttattttatattattttataatagtaatttaattattatttttaattctatgtatattagtagaaataagacctagtgttagaagtaggcaatagaaaaataaataacttaattacagaaattttattgaattctaggtgtgtcatgcatgttatatgtgtattttaatatttttatgtgttgtgctcggtaataatagcactcgacaatctaactattagagtcacttaaatatggtttagtatctttaattagtggggcaagatctcttttagaatgtttgggtaattgtttatgtccatttttcccataggatttaaggttactgaaaagtgaagaaagagaattttggatattttgccacaagtttgatatttatttccatttactgaaatttctagaattaatttacttttgtaaagtctttagttggcatatttggtatagatgacaaaattaattatgtgtaagtatgttcaaaataaggttgagatcttattttgctatgaaaagttttataaaatgagattgtgttatattggttaaataaatatagagtttccttatttaaattatcatgattgactttttatgtttaatgaaagtaattatatttattactttttaaaaacgttgattttttattcaggaaatcgtgtaatgttgtgtctttaatgtatctttccttatgtatataaggaaattttgctaaaaaatctattcatgttccgtgaatctgtttgaatggattgacagtatgtttgaacaaatttttacattccattttaggaatatttttcatttat

SEQ ID NO: 243123 - DNA, 736 bp, Cannabis indica
ttttttttttggtctgtcgtgtccaacataaataaagttgaatgaaatattgtgttatggtaaactaaagcataagttttctatcaaaataataataataataataaactacagcataagttaaacacttcatataattagcattagcattcattttacaattccctgtcctaaaaatagtgggttagaggatccaaatggatcgttttagttttctttgaactactttagtccttagagtttgggaactcaaacattttcattttcaaaacttatatggttattctttagtgctatggtaaactaaagcataagttaaacacttcatataattagcactagcattcattttacaattccctgtcctaaaaatagtgggttagaggatccaaatggatgcatatataaattagttggagtttttagttttctttgaactctttagttcttagagttcgggaactcgaacattttcattttcaaaacttatatggttattctttagtgcgttagaggattcatataattagcactagcattcattttccaattccctctcctaaaaatagtgggttagaggatccaaatggatgcatatataaattagttggagtttttagtttctttgaactctttagttcttagagttcgggaactcgaacattttcatttcaaaacttatatggttattcattagtgctgttagaggaattcatataattagcactagcattca

SEQ ID NO: 243124 - DNA, 527 bp, Cannabis indica
agaggagagactgtgtggggggcagtagtgttaactatggaaaaacaaaatctaattaaatgaaagatcagaggtgagtgagaacaaatctggaaaatcccacagtagtaggccagacagagaggagaaaatcctcaagtacaaagtaaatgtgtaaaaagatttgagatttgttcaaagatccaaaacaaaggacagaaaaaacagagagaagtgaagtttggtttgttgacttactttccttcgtacactttggcgtgtgcaccttccccaatcctcggtccaacaaaaagatgttttggatcgatcaaccacttggcatctaaactaaactcgtcaaccgagtaaaccccattaccagatcccatacttttctctgtgctaaacccaaaccaaaccaagccaaccagtacttaacaaaccataccctttttcaagtaaactcaaattcttacccaagttccaatttttattcaaaaaataaaacaaacactactatgttttaggacagaagagagagagagaga

SEQ ID NO: 243125 - DNA, 748 bp, Cannabis indica
agagagaagatagagaaatagggagatgagttttgggttaattttgaaatgggaaaggtatttttggaacaaaatcttaaaattacgttatctatggtgttaaacttgggtttaaagttcaaaattagccgtttagaataaagtgttcaaaataatttgattataaagaatattatgaagaagaatatgattgtatgaaaatgtgtaaactatgtttagttttgttgggtaatatataatcacattcccgttaattgaattacactgtttagttgagtacaagaatcttatatattatttaaaagattaaaataaaaatattgttttattatatgtagttaatgttaattatatataaaaataaaataattattaattagtaaatattaaattttattgtattttttattaatttaaataattctttctatatattttatcactatgtttatttttatttgctatgtcatttatgtacactattcgtataaaatttatgtataatgcatacatatgtgttattgctaataacataacaataactctattaaaaaaaccaatctaaaaaaaattaatatatatatgtggaattaaattattcatttccattatattcatttgaatagcatttttaaattaataaataaatttgaatatcattaatattatgatttattataaataaaatattacgatatacatttagtgagatcgttttttttttttttcaaccgagttacttttatgt

SEQ ID NO: 243126 - DNA, 934 bp, Cannabis indica
gtggatcctagtcacagaatactcactactacaaaaaacccttttaatgtcccttttttaagtccaacaaaattattgttgcacataaaaagaaattggggagttttctagtctaacattattagacttaaaaaaaattacatcatgtccaacattgttggactagaaaagtgcaagagaacgtgatatataattaattaatattatttatttttttaattagttagtttcctagtccaacattattggagaataaaaaatatataatgtccaatttaagtggacttaacctatttttaaataaataaaattgggtccttagaatttgcacagctacatatatcaatttctatttattttttctttcttagtattatccctcattaaaagttaaaaaccctaatatttctcatacccagccgctcttctcaaaaatagtctcttcaggttcaaaaaaattatctcagtagtaatagatcgcaccagagcaagccccaaacggaaactatgaatctcgctgctagcctcaaaaatcgcagtctcctccctttgcgttggtttctcttccgacggaggtgggctacactggtcatggaccaaaatggagaccacgagcttcatcgatggctcccttctctctttctccatactgcgaagccctcccacgttctctccgtcgttctctcagcccactccgatgcatctcaatcttattggtctcggtctcttccattgtctctatctccatcggcttcacctagcaaggagtatctcgacgatgaagccatcgtccgctgcccaaacaaagatcaacgatatcgtccgccgcccactgtgaaaaatgtgtctttttacatttgattcttttgctttatttatattatcattatttttagggggttttaattatgtaagtgattttgtatatgttttt

SEQ ID NO: 243127 - DNA, 922 bp, Cannabis indica
ttatgctccaattcctgaagctgttgccaatcttctacctcggttctgctggtcagttgggatattttttccttgtattcattcaattgtttgtcatctcattcttcttaatttattccatcgttgaagagcagccccacatttcccaagccggttctttacctctttagtatgcttaatcggctcattcattagccaaaccgactgtacaatctcagtgcactcttcatcatccacccaagcactctcaaaatggaatctagatctccatctagccatgtgttgcatcctagaagaggggtccttttccgtaaggagaagagggcaatggtccgagttaatacaatcaagatgttttactatcgcctgggaaaatttttcaaaccaatccgagttgccacaaacctgatcaagtctttcaaaaataaggttctgttttctcccattacaccaagtgtaatcacttccctcgaaacccacatcccttagttgacatgaatctagcgccttcctgaaattgttgattagatagctcggtttagaggagcctcccattttctctctttggctcaaaatttcattaaaattacctcccacagcccacggccctaaatacatacgacttaatcttttcaaaagcttccatgagtgaattctttgagttggatctggatcaccatagaaacctgtaaatctccaccattgcccgtcctccattctaatgaaagaatcaatatggaagggagaaaaggaaaaaacttgagtctcaacatccattgaccaaaacaagatgattctgccactcttcccccgagcttcaaccacaaaacacccactaaaacccagtttaacccgcaaagtttcagcatgaaccttattcagtctcgattccgaaatgaagaccatcttaggatttaactac

SEQ ID NO: 243128 - DNA, 657 bp, Cannabis indica
acaacataaaaagaccgcatttttataaataaaatttgattgactccattgagaagaatatggtaccagttaatccatatgggtggatgactttaagatttgtggctaataacctgggaagttggactttacattgccatattgagtctcatttctacatggggtatgggaatagttttttaggaagggattaaagggttgaaaaattgccttcgtagatattggggtgtggtgctagcaagggtctccgataaccatatgataatgtacccagattgagggcaagatacaactaaaccaatattagatgacaacatcttcttgtcgatattgtgaaggtgctttttcacaaaaattggatttttcataagtaatttgataagaccatacttactgacgcatttaaaaaatatcaatgccttaggaggtagccatgaaaatagttcctccaatacagcttttggcatatcacaacatttacttgccatagttatgctttaaatcaaaacttcaagataaacaaaattactcactttagaataattataaaacactcctccaaaatgtattttaaaaaaataatccaataaattttgcaagaaaatcatcaaaaataattaagaggatatagtagatatgttagcttacctgaaaaaa

SEQ ID NO: 243129 - DNA, 937 bp, Cannabis indica
aaataaataaataaaaaaaaacgtaattgcttaaattctataatttgacattgatctaagtcattttaaatttgtgagaaatctcctatataactagaatatgatatacgtattgtcatgtgaaaataactatatttagaattaataatctatgtcccaaaaatattaaaagtatttttaattagtagtgtttaaagataattgccaagttttgtttttaggtgctgattgttattgttttgtaaagttaataatttcgaggaatatataatatcacagctgcttcattaaaaaattcactctaccaagcaatttctagtattgttagaattattgttaagaaaaatgaggttattgcaagtaggcatatataaagtggatgacctctagatctatatatttcattgctttgcaagagtgacaaatacattattttttttttttcattatatagaattgatatttttataataaatttggtgacccatgctttttattgaaatgctgttgttgagctgcccaacatggcagtcgatagaaaaataattaattaataaataataaatatacctaatcggctaattaataactggagccatatgggcactcctagtacccgcacggtgggtcatctataccatatacaatatatagaaatacaatttttttgtcttgtgatgtacttttacggaatgtatttcgtaagacattagatggccgtctcaaggtatattagatgggtctcaaggtacattagatgagtctcaaagtacgttacattttttaatcttaattatccctaaatcaaccctagccctcagattaataactcttccatctaacgatagtcgtatatcatgaaagtacatcatgggcaaaatcgtatccctatatatacatatttttatatatacacaatgagcatattacaatattt

SEQ ID NO: 243130 - DNA, 1223 bp, Cannabis indica
gttacacatctggtataagtttacaacaatgaaagagggaaaaaaaagtaagctgaaaagttgtaaaaagagggtgtacaattctcaactcttcttttttgtgacttggaatgaagaagggggcaatagtttaatttgtatcaaaacatgcgaacctaactggatgtatagactaatattctaacttcctgccatctctccatatttgcattcaattctcactactaagaaaatgatacatattgttagaccaatatttatcatatatattttttggtaaagaaaataatacatatctatttagtttattcctttgatatatacagattcatttccttgaccgccattggtcatgcaaataagtatcagcacaaacaccaaaggcaaaaaaaaatgtataaaaagaaaatggagtaacatgactttaccttgcttcgattggctggttgaattatctgtttcagattcatgctccggcttggcatcagttgattcaactacaacaggaatctcattagcatcggttagggaagattccaaggcagttgaaacaggagcatcactggaaacatctttagcactaggaatatctttagtcggagcatcactagaaatatctttggcaggagcatcagttggaaccacggtctcagtagatgttacgccaatattggatgccttccgattcttccctctgtttgattttccagccatttcaccttctattctaagaattaaagttatcaggaagtaaaacggagaagaaaaaaaactttaagaaacccaaattgatataaaacttacctctgatcttacctcttacctataaaataaatacctatttaacagaatttcttatggcttaacagaaaatttttaaaaattctgttaaaactgaacaaaacatgccaaatataacaacatcgctgaagagatgcaaatgaatgaaccataattgttcacaaattctctaaacaggttactcattagtaactattcagtgaagtgttgctttgcttctcctattaatataccggataaaatttgaaacaactacaaattatttctccagtcaacaacccaacattattccaggcaacttattggtcactgtgagtagttaaaataattacaattcgaattgcctagaacacaataaattagattttatttgtagtaaagtttctctatgttaccaaatacttcaccaacactaagacata

SEQ ID NO: 243131 - DNA, 1312 bp, Cannabis indica
ggatcaaagcaattaccacatcttaagctggtggtggtttctagtgatcatatgcattttcttctacttgcaccaacaatgctactcatttcagctcaggaagttggtacgtccctaataatattaatctttagaatatgtttagtacatatgatcaaaatagatttaataattataataatatttgggaaaagtaattacaagggtacgattattaatcaatggtcacatattgtaaataaaatcttaaatagttgagattgtgccttaccctatcacaataaccctttatattacatatatatttaattagggtttgatttggtttatgcaggtgatgaaagagaatttgactatggagaatcgagcaagaaaggaccacgacattggggagagctaaagaaagaatggagtgcatgcaatcatggaaaattacagtctccggttgatcttttgtatcaaagaatcaaacttagtccgaaacttggagaaataaacatgaattattataagccttctaatgctactatcaacaatagaggccatgatattgcggtaataataataatattattaatctattagataaaagccgaggttagcaaagtcaaagataaaatatgttcattgcacacaattttaaaatggaacttttccttattatacatatatacatattaattttatatttttgttttgtctcatttgaattatgtggtctcctctcagttctgagagaatacgtacctacccctattttgtgatcttcttcttttatatatttcaaagtttaagagataaggatgtataatacaaaatttcttaatgatattgttgttgttgttgttggaagatcgaatggttggaagatgctggatcaatcaagatcaacggcactgattactttcttaagcaatgccactggcactcaccctccgagcacaccctcaacggcaggaggtaactatctatacattcataaataaaaataaaattataaaattctatcgatcatatcatatatagattaattatggttttaagtaataatttgctcattattgaagtcaactttgttttgtctatgatattaggtttgacttagagctacatatggttcaccaaagccatgagatcaaccaagaaagtaaaattgctgtaactgctctcttctacaaaattggcaagcctgattggtttctctccaaggttaaattaaatttaaagtcgtttaatcattacttcctttataattcatggctaccattagcaatgttcttaacaataattcatgctatgaaatattaatatt

SEQ ID NO: 243132 - DNA, 1202 bp, Cannabis indica
caaagacaacgacaaaaatgtaaccagagtaacatggtattttttggacagcaactaaaaagaactaagacaacaacaaaagtaacgtagtgacctggtaaccataataaccccggtacttttgggcaccataaagtaactaagacggtaacaaaaagtttacctagtaaccatagtgtaacccaggtacttttgggacaccacaaagtaactaagacagtaacaaaacgtagcctgagtaacctgatacttttcggacaccataaaagtaacatagaacaattgtgggcataagaaatataataacaaaagtaacttggtatttttgaataccgtaaaagtaacctgagacaattcctgttgtgtaatactatttctatttcccttattgcacttaactatattcatttattctttcaaaaaaacaaaaaaaaaaaaaaactaataattcatttattaatgtgacttgatgttaaggtactaggatacttttaattctatgtctgattaagatttaggtttcaagacactagattactataattatttatttgtgttggtggttttgatataggtttaaacttaccatgctacttttatttatttgtgtttatcactttggatattatttaagatatcaagttaaatatgagtgaagcacatataatttaaggttctaggtttcccaatcttaaaaaagtaacctatacttttcaattaaataaaaggaacaaaaacaataacaaaaggaacttggtacttttcaacaccataaataaacctctaacaacaattacaagtgtattaaagacaagaacaaaggtagcaacaataagtaacttcatattttttacaccgttaaaataaggctaattagtaattttttcccttgaactttgacatgtactaaatcgtgtgccctcaacttttttggccgttaaaaattcccccgaactattgagattgttaaatttaaggatttttgtctaattttagtcaaaaattctaacatagatgaaagctcaaggggcatgatttagtacatattaaagtttgagggacatgatttggtagatatcaaaatctggggagcatggtttagtacataaacaattattgaaacagtaaaattgaatgaaattagacaaaagtccttaaatttaacaatctcaatagttcgaggagaatttttaacggtcaaa

SEQ ID NO: 243133 - DNA, 1002 bp, Cannabis indica
gatcctgcattgcagaacctaggaaacgcaagggttttgccagttgttaatcctgagcaggcggcaaacgttcgtcacggtgtaacgaccgctgtagatgaaatcgctcctggtgtgtaggagactgggaataacagttcagcacccaactagggcattcataacacagccattccgccttctaccaaaactcaaaccaccattggagatgatactgagttacaaaaccttcatgctgctcttggacttgtgcagggtcatgccaataccctacatcatgatcaagaagaactttgggctgtggtaaatctcgcgtttgagaaacaaagactttcagggagagacaaaaagatggaagagttaagggctcatcatacaaagatcaaaaatcgcagtgggcaagctactgtgttgatacgaaaagcctaccaaactgtaggacagcaacctccgagtatcatccccctacggtgagagagacaaagatgcagcgatgaatacttcccagactgcaaatggtcagccgcccaatccccgatcacgagttccactcatgggcctagcagtaggcggacagaccttctctagtaattcatcaggagaagtcatacctgatggttccaaccaggttaacgctgccattccacctgtcaaccaagcgaatcaatctctaagacagccaagcacttctgtatttgataggttggggacaactcatgacctgaggagtgatctgaatagaaggagagaagtagacgatcagattgtcacgataatcgtccaacccggagcccgtgttcaagttctcgctcagaaagagactgatgtgattcaaattgaccagaatgccgagcagcttaggccagctatataggctcagctagacgaattgaaaaatttgttccaaggcatggctagaaagaaaaacaatgatctcgagctggaccgagcacgtggaactccattcactcccgagatcaatcttctggcattgccccacaa

SEQ ID NO: 243134 - DNA, 1371 bp, Cannabis indica
aaaaatgtttaaataaccgaataaagaaaaaaaatgtaaaataatggcaaaaaaggacaccacgtgtaaaaattcttattttttttttcttcacaaaaatgcttaaatatatagcacattaaattagcttatggcacgagaaaaattatttgtcctagtttgaatagttcatttatataatagaagacacttgttatagatatatatttgttttaaatttttcattaaattaatatttacatattagaataaaaaaaattatattttctatttttttcttttttgtacaaatattttttctacttaaaagaattaatgggcgcaacaaagtggtgcctataaaatttcttaatcgtgcttacaatagggtagaatggggaattgcgaattaaatcgggcacaaaatttggctataggtacactactgtgtcgagccaaagagtagcctttaggcacgaaacaaaaagctttactcactaatgttttcgtgccaatagcacttatatcttgtagtgtgagttttgctcttgaaaattgaaattatgatgtggacttttagttgtcgaaaagtaatagataaaaaagaaaaatgctaaagggacaccagtggtgcctagtaccttcctacatgtaaatatcgctattggtccaactaagtatcaggtcccatataatttaatataataacttttagaaaatatcactaatcaatcgcaacacgacatgtcgagaaggtgctaggcacactggtgcgtcatagcaaaaagagactaacaatatctaagcataatacaattaaaatgtaccgtagtccaaattttttttgattcattaatatcaatgattcatataagttacaaatgattacaaaattaaatgtttcatatcaatagatatgaataaaaaaataaatatttaatctacatagaatgtctttatttggatttaattggacatgaatatgtccaaatataaactttttttattcttctcaaaatgattttataatccatcacgattacatcattcaaggtttaaacccttggaggctcgataacccacttgttgccttggatgaaagtaaagctcatgaatggcttgatctcctcatcagtcaaaatctttgaatacttagcacgtcctgatgtgcttgatccaggtccggtacacttgtactctccataaaacacatcactgtaatggaaaacgggttatcattttgattattacagaatacttattgcaaaatatattgacacatgaatagttataatgatttatcgtaatataatacgcacttattgctggaatttcctgcatttttttcaggtgagcccatgccgtcggaccaaccactagtgttgatattgt

SEQ ID NO: 243135 - DNA, 640 bp, Cannabis indica
gaaataaaagttaatttaaggggttctgaacctctcacaataagaatattaagatattttttcactagatatcattttcggcttagacatagtgtggcaaaaatataagatatctttgctagtacacaaattaaacatgtagtaaagtggtctaaatattaatatcgtctcacaaaaagcttttaaaacaattatggctaatactaaacataattttaccaaagtaaacatttacgaatgattagaaagaatttaaacaaaaattgcaaaataaatcttgataaaactcaagataaagacaagtatctaagggttttgattttgcttcattataatttcaatttctttcattaatgtgcctaaatcaattcaaaattcttttagagcattattttatctctatgttttttgtttgagtgttgcataaagaatgtataaataaacaataatctatatctctatacaattatcaagccttctcttcattaaattcaatataaattcatatttgtcttataaatatggctacgtgttaatattcttaaactaattctttaaatcattgatcagtttgattttgacttgttagaattttggaagtctaatcatgcattcatagtcatttggagggatttaaaca

SEQ ID NO: 243136 - DNA, 902 bp, Cannabis indica
aataggctcagaattcacctcaattacaatagcaagaggagcatatggaactaaaataggtgagcttgaagcaacatttgcaagaggaagaagcacaccagcataatcattctggtttgacacaccaacagatgttaaagttggaatcttgccatgagacattaaaatataacctacacttgaagcattaacaacaaaatcatggggtggattcgcatatgtaacaataactgctctagtgtcagattgagaggatacacttggagtgacaagttgaatgggaatcaaatctggagctttcacggtgggaagaggagatgtagttgggacagtcactacacgaggagtagcactggtattgggaaaagacactagagaaccaattttggaagatgatagttgagagaatagaaaaaatactttcaccaaagaggatatctctagagatgtacaacctgccatccttagataaacacttgtaacttttgtgtgaaagactatagcctataaatgtacagggtactggagtttatttttgttgtaaggtctaaggtaaggataacagaggcaaccaaaatccttgagcgaggaatagtcaggttgtgtttgaaagattttctctagaggagacatataattgactaaaggaaaaggcattctattaatgagaaagacatcagacctagacttgtaggcttcatcctagtatttaagagggagagaggcttgatcaaggagagtaaagccactctcaatatgtgtctgtgtttgcgttctgcaacatcatttcactcatgagtatgaggacatgagactttgtacaaaatgctagaatcattgagaaaattagtgaaagcttgatattctctccccaatcaagttggataagttttttttttttt

SEQ ID NO: 243137 - DNA, 621 bp, Cannabis indica
tacgaataaatatttaagatatttaaactctactaagcatgcattgataattaattataataataaaaatttagtgaatgtatatacttctagccagttaaaatccaatcaacactaaattcttctgaacctgaaaacttagctcacaacctacaatataatgaattacaacaaaattataattttaattatttaattacttactagttattaaaaaagtaacaagttactaattactaattactaaattatataaattaatttttgaaaaaatcacatatacataaatatataaaaaattatatctcacaaaggtacaattttaaaaactttatttctaaactaattaaatccttcatatctcattctcattacatatatagaaacacggttttgtcccgtgatataatttcacaaaatgtattccgtaatatattaaataagtctcacagtacattaaataagtctcatgtattaataattttatatctctacccacaaaaaggagatatcaatcgcctccccaatattaataaaataataaaagagtgcgaatgaaagaagtttgaagtaagattttaatacaatatggtccataaaagttgccacatagttttcaca

SEQ ID NO: 243138 - DNA, 4660 bp, Cannabis indica
acaacattttgatgttttcttttaaaaaaaaaaaagagaagagaagagcgaatacaaataacctccaagttttttttagctttggcgagcttctgaaataactagtgaaactctattgtactgcaattggtgcattggtttttgcagctttaatgctttttgctggttagtttcattatcacaaagctcctccaaaattggcttggtttagactaaccccctctggtatagattaaaaccctcacttttggcagaggaaaattgccataaacaaaataaaaggaagtaaaaacaataacaataaagcaaaatgcaaaaaaaaaaaacataagaagttacaggctacagcctaaattacatcaaaactctccattctctactcagatctagaaaagataaatcttcgaaatgcttggttttgaaaacccatgttgctgatcaaaacttgattttatcccaaaccacttctgctgaattctctgtgttttcaaaatctccagaattcctctccaaccaaatagcccaaagtgttgccaaggcagcagtcttccaaagaatacccttatgtttgcttccttttaatttacaaactatcatttgtgaaacactttcagggaaaacccaacactacccgaattcctccaacagctttgaccataaactggaagaaaatttacagtacaaaaataaatgatccacttcttctccactgttcttacaacatacacaccacccaggagaaatgaggagaaaaggtcgccttctttgtaagacatcatgcacattaactttcccaacagcaactagccaaacaaaaattttaacccttgaagggatttcacttttccaaaaattttgatattttctgttttctagttttttgtaactcagtttcaaaaaaatatttttaaaaaatttggccaaatgcaccatattagtttttaaaagatgaaaaaaaaaaaactaaaacagttttaacttatgaaaccaaacaacccctagatatcctgaaaaaaaaaaaaaaagttgcttgcaacggcggggtcctcgaatctctttggcgtcggagaggttgattgccatttccacctatggctagcaatggaattcccactttcgcctgaagccgagaagccgcatggtgagggtactaccggtgatgaggaagcccaccacagtggagagatcaactagaacaaagacgaagataaacaattctaacttccacaattcgttttcttcgaatgggtcactaaaaccctatcacaaaaggccaacccaatcaaaattgttcaagactcgctccacataagaaagcctcttcacctaatttctcaagaaaatgggttgggcacttgagaccccggtaaggcccaattagaagtttcttctccttgtaaaaggccaggaaccaatcgttctattctttccttaatcctcaatgtcgaactttgaagccgcaacagtgccccaattcaaggcttacgcacgagtgaggcgccaaactgtgggagtggcttctttgaacaaaacgaagagatttgttgctacaacatcaatatggcattcggacataatctctggatttacatttgttttttcttattccttttatgtgcctaatcagcgactggccaatctttgccatgcacaatcttgtggtatggaatttgggtactgctctagtataaatacaatgatgggatttcgacaacggtaaatttctttttttttttctttatttcctcatcttacaatatcaatggtgaccaaggaagagagaaaaggatttgtcaatttttcagacaacaatttaatgaaggaagaaagtgaaaactgttagatttgtgaagaagacacgagttattgggtaattgttctatggctccacatcaaaaacatcaaaatagcatattggaccatcaaatcgcaactcctttgcttgtgtattcctatacttgaaatgctattgtcttgaaaaaaccaattacctatggaaacatccctcgccttgtctctagaacaaatcaatttacattggcaggcatgattttggtgatcatattggaactgaagtgaagagagagaaggcagttttcaattttattggtgcagaaaacgtaaaattggttgtgtccaatatggatgactttatactagtttatgttgagtcttccaagtttgaaattgcaaaaacctttgggaatggattctcaaaacatttaccttgagaacaaggtgaaagtttgggtgagttgtcaactccttggtggcttagatggttgtttaatagttatttaatacttagattgctactagttggctagttagggttctttgttagtctagcctataaattcagagattgagttttatgagaatatgagttttgtgttattgtttggagtagggagtttttcccaattcctcaaaaacttgaaattttgtatttgttcttgcccttatcaataaaataacttatcatagttctataaagaattgaactgtgcacaagtgtgcatcaccattataggttttccaacaatcccagttcatcaccatataaataagacaacgtaaatttttactagaaaatgaacattggcttatcaaagttactgaatcttacactgcacaaaggcaacccagtgccctaggacttgtaacccatatcacaaaatttcaacagtgtaaaaagatgttgtttccagaaaatcaaattgaagattgacaattgtataaatcagggtgggccaaaatatgcttactaaactgacactcaccttttcttccttcaaaagattttgtaaaatcacgtccaaaagtagttgagtagcctcctcgttaagaatatcagtcattatagacaaaatatcatttatcaaactctgctggtgatgctctcttgaaaaattaagaataacaaaagaaaaaataattaataccattatagttgtacttgtatcaccaaaattttgagaacaagcataacctacagaacattcaaatagttaagcgattggaaagcaaactgtcagtgatccagtccaacaatgatcttttcttgaattaaaaaaaaagagagagagagagggagagagggagacagaggtcaaatgtctagaactgcccttctcccaagtttattgagagccctcaactatggtggaggaaaaccttggttaaatgaaaacttgggaatgacttactacaacaatcaaaaactctactaaaacaaataaaacccactccaaaagtaaatgatctaaaaccgcacttgggataagaataagtttcttattatcctaaattatttgaaaacaaaaccaccaaatgaagtacagaattcctttctttgaactagtgcgacaataaaaaatataatccgcaatgactaatattacagaaggctatagtggaaaagagaaaaaaaaaacaaggacaaataccaaaatgatggcacatgaagtaaagaaagagagaagatgctgacctcacaacagagaaaaatgtagtgaacatctccataatcaaatcattgcagtcaatatccaacattatcacacaacatttacatcttgagacagtctccagaatcttaaccctccttgaaaagtatgggcttgtggtatcagctagctccgcaaacatgctgatgataagttcaaaaacaccctgaaataaggaattaagtacctagcactaatcagtcccccatgaattttcttttaaggtgttgatatagttagcataataacgtttcaaccctaaaataatcaccaattctacgaacttgataagcacagacaacataatacaacgaaaatgaaaacgtttttaccctaagatacttatcctcgaacggtaggtcgggtgccaggatccgaaatgtttcactaacacatatggctaccaagagcttaacatcattatctttatgctgaagcaatccgcgtattatgatacattctttcagaggctcaatcgcagcctctatctctctagcagcttccaactttttattggggtcaggagaagaaggctgttccaactgtgacaaagcatttgcagcttgctgcaaaaaagaaacaccaatgaatcacagaaagaaccagcaagaaagacgataaagaaaagcgatgaatcgatcaagattgagaaatttgtttaaaaacacactctaagttcgttctatcctacatatcccgaattcagcgagctctaaattgattcacaaaaacatcaaaagtaaccattaagaaattgaatggaaaaataaaattgagcagacagtggtttaatccaagctattggagaagtgtagtaatgaaatgaacttactcgaagagatttgacaatgaaatccttgtttgggttggttcgtttggtgagtttagtgccggtatcggagatgagcttcaacagtgaatcgtccatggatatggttttcagtgaagattgtaaatgagggttttagtgaatttgtaagggcattgcttggattggttggttgctcgctcgctcctttgacgaagagaaattttgcttcagtgttccctccttcctttagggcgcgcgtgatttaaaccttccttgttcacaatgtgttctctccatttagaaactaactttacaaaattggagttttatttgcccccta

SEQ ID NO: 243139 - DNA, 520 bp, Cannabis indica
agtgtaagattgaataagtctttgaaatagttctttatccaacaaagaacaactttttggagagatttttgagtctaaatgattaattttaggcatatgtcaatttgactaaatgatcctaacatggaaggggtacgattttgtgcgtattaaaatttaaaaaacataatttaatacttatgaaagttgggggtagaattttatacatgaatacttgatacattagtcaaattgagcaaaatttaacaaaaattcttgaattcaacaatctcaataatttaagaaattttttttaacaatgtgaaaaagtttaagaacgcgatttgatacatatgaaaatttgggagacaaaaatcgtaattagcctataatttttaaacattttgtaatgtaataaaaatcttaatgtgcttctacaatgcaccttttaatacaccaatgtattctttatttgtttcgacatttaggagaattttttagttcatttttttttcatagtcgtgtatattgtaattattta

SEQ ID NO: 243140 - DNA, 582 bp, Cannabis indica
cacttttatcatcccaaacatacacctattttcacaaatacagctgtaaatattctcaaaacaaattataagtagagaaaataggtaccaaatatattaaaacaatagaaattgcaaggagagagagaagggacacacgaaagaggcacacatttgtgtgtaatagaaattgcacacaacgctcctcatatcatatagagtaatgattgatacacgttttacacacaaattgtccaaatatactaaacacctattgaaaggtgcataatcccacttggaaatgattatattgttgaaagtttattaatatgttgtgtacagctaacatgcaatgaagtgggtctagcatcacccataacatatgttattgtataccacacaattttatcttaaatgagatcatgcaacttttcagggatgactaattatacatcgtgagtctcaagtattactcacacagataacgtattaattagaactaatgtactatattttttttggataaataaggtttgatttaaatgtactctactttttgaatacatacattaattagaattcacagtatctaacaccacatga

SEQ ID NO: 243141 - DNA, 1324 bp, Cannabis indica
aatggagttatgtacaggtcatcgaaatccacacctaactagtttctgtaaactaactactaaagaaatcaagaaaacctaagctacaagatatatatacctgctgacaaactactgattaaggttttaaaaggttgaagggaaaattcttacaagatccaggggttgttgatccttagtaagaagtaaggagaagaagactcacacatgcacaaaaacaaaagagagctagtgaatggaaagagaaaggggattaaacacaatatatatatatgtaattaaatatagagattagtcaaactcatacttgtgacttggaatctcatccttgtaactctgaacattaaattgatagtggaatcgagctaccaaatctggggaatagctcaagggggacgtagccaatttgggtgaactttgggaaaaatttctggtgttttctaaacctttctaactctatttttttgtactttgtggaatagagtttctggtgaagatctgatctcgtgatcgtgtgtgtttagtgtttctggtgaagattaagctgaagcatcgagtttctttgagaaagaaactctttgctaggatttcgaaggtaaacctaaagcctaagggaattgatcgagaaggttcttgatcctttgttttgtcttggacaaaatggagtcgtattgactctgtttacttgataaagtcaagaaagggaaagattgaatttgaccttggtttaaaaactgataattgattgttggtgtagggcaatttggtaaaagataattcctacaataatgagtgagaataaatccaacaatcaaatacttaccatttatacattgtataataaattgaaaataactttcttcatagtagataaaatatataattatatgaaaataatttattatgcacatatattgtaataaaatataatgtatatattactgtaaatttgccctttttaaaaattacaaactgatctgttaacctaaggactaacggacttacgaaaattgcgaccctaaggacttttactgtcaatttttgaggttggggacttatttgaatcaccctaaatttttgagaacttttggtgcaattatccctatatatttttattagaagttatttatttattttcatagaagtcttgttatattatatttttaaaattacacctgagattcaattctattaggggtgttcgcggtgcggtttttgactatttttttaaaccaactcgcacatgcgattttttaaatttcttaaaccgcacccgcaccgcaaaattaaaaacccgcaaatgcggtgcggtttttgcagttta

SEQ ID NO: 243142 - DNA, 2215 bp, Cannabis indica
tatcaatgatgtctattactattactagacaccataagtttagcatttctctttaataattaatatatagttgcattgctattagttacactaaagtatttaacaccatatttattatgaataattattaattgaaaaaatgctaagaagcatataatattattattagtgtaattcagtatcaaatctctcatattttaattaaataaataatataaaaacacaataatcacttacaatatgccacatcatgatatactactatttatgtatgtaatttatcgagtaatgtcattagaatattgttataagacatcaataatactttatgattaattgacaatatttttaaaaatttattaaataaaattatataaaacttaatacttagacgagtaaaaatatgaaattatgatattagtgatattttataataataataataataataataataataataataataatatgataccttaaaaatttaaatgataggcaccactttcaaaatttctcactttaatatgtattatgtatgatattgaatagtaccttaatacttaaaaactatctagttgcattgttagaataataataccttcattcctcattccaaggtgggacaataataatatagagaattcaaataaaaagatacaaatatatttatatataaattattaaactcattttcttagaaacacataaccttacattattaccatgcaaataagaaaattacacaaaatatcccaacaaattacaatttcattattattacaataaaaactcccttcattcataactcataacaagaatgaaaatacttattatacataatcatacatatatattattattaattgcaaatgatttgcaattaatcaattgtggcatttttgcaaataccaagaataaaatctgtaaagatttgttcaaaatgtggtaattttgcaaatccaggaaaataattgatatcaatcacagcataactattctcttctccactcactctgatcacatcaaaattaaacaatcgaagccctaattcccttctcagctcctttccgatctccgtcaccagctccggcgccggcattacagcttcatcaaccttctcactctcatgttccaccgtagccgaattcgatatctgagaaaacggcagaatcgaaaccccattccactctccaccaccatcgccgccgtcctcctccgccgtcacgtgaatatccgccaacgaccggcgtttcacgcactccacgtgttctccgatgacgtagattttgaaaacaacctcgttgtgattcacgtattcttgaaccagtaacggcgtctgatccttcacgcgctcaaaccctttgctgtttagaacgacccacatctcgtgagacgacgcgccgccgttggctaacaagggtttggctatgaccggatattttaaaccgatttcttctaaagtttcgtctttttcgattactttttgatttgggattcggattttgatttcgggttgttgggttattcggattcgggttacggattcgagcattgtgacacggttgtgtaaaggttggattttttcaggtgggtcgacgattactgtgtttgggtatttggatttgaaatctgtgagttgttgtttccaatcttggccgtagattttgtggattatgcagtgaaatggggcttggtcgagtaagggttttgtgggttcgatttgtacgaggtcgattccatttaggtttgctaagttgatgaaggatggtatgataaaggtgttaacttttttgggttcgaatgcgtagccgactctgtaacgagggtggtgggtttgttcttcatctggttttgtcattactttctctctctactttctctctctaaactgaaaatatcaataaaagaaggatctttttgagttactttctttcttgttgttttagattcggggtttagagggcttttatatgtgtttttggggaatactggccaagcccattcccattgttttacaaatttggtatcttttttagtcggcatatgctttttggaaaattgtagaatgtactagggctgtacatcggtcggtttagtcggtttatactatatattttccaacccgacataaagatcgggttataaaattctgcatgcaaactgcccaatttaaaaaaaaaaaattctggacccgaccaacgggttgggcggg

SEQ ID NO: 243143 - DNA, 1600 bp, Cannabis indica
cgaatgggtagtagcgtttcccatcagcatcaaagtggcacatgttctcaactacagcaacacacggcacctaaaagcacacagcatgagatggttaaagaaaacaaggcgtttgaagaatttagcaggcttatgaaattatgatgaaataaaattgcctaggaagaaataatatccaaatatcagttgtcataagttattcttcagaaaacaccttattttgcattggcaatatagagatgatatcaatggcttgaaaaaactgttcaggagaatgattaccttaagctttgaaaacattctgactcctttggcaacgtcaataaatgcaagcttctgaggggtagtaacaatcacagcagcagttaacgggactacctgaaaaaatgattcaaacttggtgtaagatgaaaaaaatgttttatgccaaaaaggttatatatgcagactagattctaattttcatagttaccctccaaatgggacatcatttaatttcaatgcatagcactataagaacagcaccaaactaatcacatactaatgataaatcatgaagttgagtttatagactattactattgggagactgagactgagagtaaaaggtgagcacctgacataaggtaagctgaatatcaccagttcctgggggcatgtcgatgacaagatagtccagttctcccctgcaacgtgagcaaattcatcattagacattgtaattaaaccgtattaacatataatattatgtattacttcattttccatgacacattgcagactcattttgcagttctattatttctactttattttctatagctttcatcaacatatactcttctctattttcttcctttttattttattccattccagataccatgcccctgaaaccaggagcaggccataccactcagttgtagtcagaagttggtcgatgactccagataccattggacctcgcataattgcacgaccttgtccagcaaatccaaaagacaccaatttaactcccatgtattcagtaggaatgatagttctcttctctgggttctgcaataaatcattttactgtcaaaactacaatatcttcaaaatgaataactcgtttaaaattcacaatattaccatttctagaagtcgattttcaggggagaccatagttggcaaacttggaccgtagacatcagcatcaaatattcccactctagcacccataccagccaatgtgtacgccaagtttacggcaacagttgattttcccacaccctccctgaacagattttaccaaacatgggcactgatagagtaagcaaaggaaactcccacctttccccaaatacaatataccacaactaacataatcataactgacagaggcaaagaatatgcaacaaaaagctaccttgcaacttgaaactgccacaatatttgaaattgtctgtaaacctttgggaagttgcccagcatacatgggtctagctggctgtgctgacatggtcactttcacatttttcacccaagcaagcttttccaccacttcatttgcttgctgctcaaactgacatgatattttcaaatcttgttacactctcag

SEQ ID NO: 243144 - DNA, 633 bp, Cannabis indica
caaaccaatctgtgaacacccctccttcaaattttaataaatccctattttgttgcaatgaattcaaataaaagttttgttgttcttagtgttagagtttttccttgaaaaacttgcaaaaatatttctgtttataaataagagttgaatattttcattaatacttgattgttagattattaatattttatatttaatgatttatattcaaatatcaaaaaaaaatattcatacataaggttgtgacttgtatttgtacgaataattaagatcacttagacatgaataaaacagttaggaacatattaaagttttagaatttttaatcaatagttgctagtgcagtttactaatgaccgttcttcggtgcaagcaatctctattcggattgctgatgtagtatgacatctaagtgattgtgctttatataatagagattacatatgacatggactgatatataattaagctgtctttaccaaacatgtttataacgccctgactattaggcacgttacccaagataattaagaaaccataatctcctagccgggattactaataaaattaagcacataaattaaactttaaatacaaatggaatgaaataaacttgtaacaatttaaacttta

SEQ ID NO: 243145 - DNA, 1286 bp, Cannabis indica
aagaaataatatacaaccttggaacagctctgcaaacattattgttataccaacttattacctctttctatctgcatgcatgcagcttcttattcttttcttttcctcaaaatcaatgtcttccacatataatataaattgaatttatatgtggtgcgcacgtctttcttttcctttttctttctttacaacttattatattcctttccaaatggatcatataaattctaatatatacaatttggttatcatgtggttagtaattagcagtacgcttattctcataaatgcctctaacaattaggacgtccttgaatttatgtaatatgcgaatgatgataagtttagcaattttatacttgtacatgaatgatgagaaatttattattacaaacccaacaaaaccatttaaataataagagacacaacaatatacatctaccctcaacataattaagttttagtgagatttcgaaaaggcagatgagatgagctatataccatatataatttttttagaaaataatcgaattaaattcgtagtttattagaagtctgtgaaaactattaaaatacaggttggtctgaaaagattcggcattagtttagacccaactgtaaagtcaactccctcccaacagtacctccatccattctcccatctatttttaactttaccttatagctaatgttattttattttataataaataattttttttcatgcatgagaatacgtgaccctattaatacggatctctatccttgagaaagaggatgtctgtcttttccaaaaatatatatttatatacatacgcacatatatacaagtgcacaagtattttatttatttatgcatcttgcccccacttgcaaatattagagtattctctcaagttaaaattttctaacgcgagtaaagtcacctgatcattgaccctttcaaagtccaagaagtcactcacaactcacaagagatcaaacaagtgccacacaagacacaactaaacccattataaaataaccaagcaataacacatatctctttgaatacatgtacgtataattaatatactatggtatattctacttaaaaaacaaaatcagatgcaataattgagttaggtctacaatcaccatggtctagatatctgagtatttgttttaacgactaattgggtataatatatcaactacaacataacaacagttctatacatattattgatcatgttgagctcgtttattattttctaataagtaatcatgatgaccagatcccaaaa

SEQ ID NO: 243146 - DNA, 698 bp, Cannabis indica
ttggatcgtgcggattggattggatcagttattttatgaacacccctagttatgcatattcaattgagagaaatcaaagtagaaaaataaattgtggtcgcggcgagccaatggttggtcgtgactaattattgtcacgacgagaagtattgcgatcgcgacgaggagctttggcaaaatcaaagttttagactcactacagtggttgcgactagactatatgtggtcgcagcgatgtcttcgtacaagacatgggcaactttgtcttttcttaattttgggctgaaaaactctaaaaggggtcgcgaattttagaagggattgacagagtagaacactaaaaatacaagaagaagaagcttggagtgaacgtgggtaatccatgataattctctgtctagttttcttctcttctcttgattttttatatttttatccatgcctagtttaattatagatttgattatgagttaaactcctaatttcgggatttgatggatgttgtctgagattatttcatgagttaatattagttaatttcattgattgtatgatttattcatctttgtatttattacatgttaaacatgatcctaatgtgaaatgtgaaaattaaacgataggaatactctaaatgaataaatataagttttgatgtgaaacgaaatatttaccagtgagaatgattctgatatgtt

SEQ ID NO: 243147 - DNA, 712 bp, Cannabis indica
aataattttataaataaaaattttcatcattccattatttcatcctttccaccaaacaacttaaaagtataactattctcctctccctccctcttattctacatcctccaccaactctctccattattttatgaaaaagatggtatagtctcaatataaattgtagagcatttttattattgttgttcttttaaattattgtatcattaatcatgtatcttgatcacgtggaggaggagcttgctgtctcggagcccatgcctcaatgaggggagttggacgctgcatgggagtctccttcatccacgtttactgttgcgaggtttaggaaccttgaagtgttcatccaatccaatctacactagtattttgctcatagtgcatccgatccgtactaagtgcggatttcatattttggattcggtccaatccgcacaatagctcaatctaatctaatccgatccgtaaaaagtgcatattggatcgattattttggattggttactttttaatattaaatttaaaaaactgagtttttgcaaataccaataaatattacagaaatatataataaacaaaattgtatacgtctgcagcaacagaatgtaattttgttactgcagaaaataattttgcagaaacaaaccagaaccagcagattacaaaaataattaaaaaaattaaatcacttgacacaagagatttgtacgtg

SEQ ID NO: 243148 - DNA, 597 bp, Cannabis indica
ctatccataggtgcctatcactgtgtcctaacacagtaatagtggaaccacctatgtcctaaccagatagtggtgatgtttttgcccaaacaaattttgcctttttctcaatttatttaattaataaattttaaaataaataattcattacaaaataaataattactattttgacaaatcaaaatggatttttctgaacatcaatatacaatttttatccatacccttgacagtgtttcaaagtggcaatctagagaccatggacctatactactaagctccaataaataagattatttattgaattttatcaaccaagtaatcttatttattaattccatgcttcctccactataaatatggaatttgaacacttagtaatttatagaattatatttactcagttttattattgtgtccattgatataatcaattccagtgattagccctccttatgtaaattcgtaattagttttggtcaaattaccatttacccttttaattacttctttatccttaagtacctttaattcacaagtgaaaatataatttagattcaatctaaatttatgcacaacttttcagttctagaatta

SEQ ID NO: 243149 - DNA, 1300 bp, Cannabis indica
attatgatatatatgagtttatgttttttcatattttttatgtccaacaatagtagaatgtgactgttggcctatagagtcacctggaaaagtatagtattttgattttagcgggacaatttagttagacatttggaatatcgagtatttttggggttttcacttaagaccattctactcttatgcatgttgaacactttttagtgtaagtaatttggcaaagtaccttggtttatcttttagtgggattatttgaagttatctttagataacttaagctgatttatttgagaattatgattaatcacattaattttctttttcataatagaacaaataataaaaaaaaaactaagttttactctttctctcttgctcccctttttgttcagccacactatgagactaaggaaaaaccaataatttctctccaattcagaccatttctagatgatcatagcagttgtaactctagtgagttgtaaggtaaggtcttttcttctttttcctctagtttgaagatcaaaaattgggttttcaatttttcatgcatgaatgatggttttggttgatgtaagtttagtaggagtttaactttgttttctgaagttttttttatgtttgttttgagtgatattttaagttggatttgttgcttgttgtggagcttaggcaaagtttgagcttttgagatcaaactttgctctttaatggtagattgttgggtttataactgtcgttattgcttataatatatttaaggatgttgaattaggtgttctagatagtttgggaagatttggaattgttttgagtgagttttgtggaatggggtcatttttgctgtaaaaatgacaccatttctgggaaaacagtctatcgtttttccagacaaaaaatccagaaaaaatggcctgccatttttacagtggggtgtattatttttttggcactttttcttgaagcctcattttttagtgttttcttaatatataggtgttagtcacgctatttatcgatagggaaacttttaattttgagttcaagtccccaaaagtgatttagcgtatcacttatcagttttgcgtacgttgtgatttaggagcctgtaaactgtcgagcagcagttccactcagggtgaccgaaatacctaaattcagaatcgaggtaagattagtataatcggatcatatgtgattacatatttagcgtgcatgtttatgaatacctgttagttaacatatcagtaatggcggtattagtgtacgtagacttacactaaataccgacagatatatg

SEQ ID NO: 243150 - DNA, 634 bp, Cannabis indica
tttctcccaaggtgctacatgaattttgaccctgttaccaaaaagaccccaaaggaaacttctgcataatttctctacgtctttggtgatgctttggggaagaacaaaaatgctcatccaatagttgtgaagaccaagaagaacagaatggataagttggactcttcctacaaaagagaggtatctagtagaccaagaaaacagtctatatcttatctttttgatgataacttcacagtcttcaaccttccatttggttagtcttaaatgatctcccaaatacttgagagggaatgtcccttcagacagcttaagaacttggaggatgttgagcttctcattagttttcacaccaccaaagtaaatctgagatttctccatgttgatgtgcgatcctgatgaagaactgaaagcagcaagatcctttaaagcaccaatatcgattgtcttgaccctttgttaaacaccattaaatcataagtgaagcaaagattaatgatttttaagcttttacacatagggtggaacctgaaaagggagttatgggcaacaacctgaagacttctagtcaagtagtccatgattagaacaaaaagaaaaggggataacgggtccttttgtctaagcccctttt

SEQ ID NO: 243151 - DNA, 4283 bp, Cannabis indica
actgaatatctttctactctaacaaactagaaagccggacactaaaactaatatggtagctaaacaagaacacaccccgggggtttcaaaaatacttgggatgacataataaaatccacatccaaaagcacataaaaattaaacataatttcaagtagcaaaacttcatgtttttcagcataacacaaaatcacagcctaaaaatgcataatccagaaacgaaatagaaattatctaaacattattgagttcttttttgacacaagccctgcccacatgacaggccaatattccttaactgtagcccacttgttgttgttgctgctgtggctgctggtagtttccgtaaccgcctgggtaccctccatagtacatgttggggtcttgagaaaccggggcataaccatatccctcgtgtcctggtgcatatccataatagccgccaccgccaccacccccaccattccattggcttccttcttgctgtgtctgaggcaaacatcacataatataagtatggtacacaagggaaacatatcaaaaaaatctgaaagaaaaaaaagaggtcattaaacataatcatctgatgttaaggtatagactagactagaacctgtttatttggactgcggccccaagatagtctaatattttgccctcctaactgagttccattgagtaaccggagggcttcttcagctgagctcctgatgaacataaaaacataacagaacaatcaagaacacagttcccgaatgcatgtcattgataaaattactagaaaataatttacctctcagcaaattggacaaacccacagcgcttgccagttggtatcttaacgtgcacaagctcaccatattgggagaaaacttgtctcaagtgatcatccgtaacagtagaatccagattaccaacaaatatctacgaaaagttcatagtcagtagaatgttccaaaaagtaaaacttatggaggaaatatataaatatgatacccacagtagtattatttggatcattctcattctgtccgccttgagaattctggtatgaggctgaaattgaaaataaattaaaaagatatacttaagaacatagcaaaaggaacagtcaagaaactgaatgctattacctcaaataagaattgatttttaaaataaataaaacaaaatttgatatccaaatgaaactatgcatgacttacacttcactaccctaaacaataccattcatacttataggaaagacaatttagtctcaagagaggagaaaatataggaaataccatatcatatagtggcttgaatcaatcaagcagaaagtcataaaaacaactagtaaggaattagaaaaaggcctataaagccataaagccttgctgctatcatcataacacatattgacaagtcagaaacaacagacaactaagtaaaaggatagggaaaactgtgcatccttcttcaatgtcatattagaatagtatttgcacataaaacacattgataacaaaactttaagtcagcaactacagacaacaaaagatcgaaaaacggcacagccgtcttaactgacatttgtccattagaatagtgatttacatatgttaatagaaaatagttatcaagctaaaggagattgtaattttgtaacaaaaggcatatccaagtcaacaggacaagtcatttctcctagacatattttagcacttcaactgacacaaatatgcccaactgaaatttgaacattattcttttaaataataaaaatataaatatagaagaaataaaataaagactggaaatgattaaattgaggtagaagtgacagtcacaatgattactagccggcaacacagtatctggaaattccaataagtttccaccagccctgctaaaatgcctgccttatggactgatcggtaaatagatagtcagaattgcaaattgcactgggaaaatagactaatttttataaatcaggaaatgagggaatgaaggaaaacaaaagtaagatctccggtatcaaaactcttgatagaaaaacagagaaaactctattaaacataaactgaattttactggactttaaactttaagcaacaaagaacagtcacgaattgtaactttatggaaagctcaaccaaaagaacgagccggaaaaaaaaaattaagcaatgtagcataacaaatgccacatgaataaagggcaacgcatacgtaaatgggaaactgacctaagggaggccacgccctaagggaataccatttcagctgaaatcagtagcaggcccctagatgacagagcctcttgacacccctgctttgagacaacattagttctaataagttcccaagatttcaatagcatgtacgctgcccatatttttttaaggaaattataggaagtaaatgacaatggaaattcgctgcttatcttcgagagcataaccgaaagaaacttcaaaaatcaaaaatgttcaacatactgctgctcatcaaatagaacttgaaaataaaaccttataattaaaggcagcaatctagctaactacccaaaaaaaatgcaaattagaacaataaaagtgaaccaaaaaaaaaacaagcatgaagtaacaccataatgcaacatagaaaaacgattgccgtgagacaagtcacagcaccaaacgaaaggtaaatggcaaaccttttgcaaattgctgaccaccaccaacagcattcttgtttgcagctgggccaattctcataggtcttgaagagcagaggacaccattcatctcagtcatagcccggatctgttcagtttcatcaccaaatctaacaaacccataacccttggtgcggcctgtaagcctgtcaatcacaacctttgcacccttaactgaagggaatcggcccctgaaaacctcttgtagagtgtaatctgtaacatctgcagctaaatctcctacaaaaattgtaaaatcaggtgtttcttcagtggagcgcttctctcctggagaagcccaatttaatctgaaattctgggcaccatttggcatagggctgccattatatgtttgaagtgatctttctgcagcctggcggttaacaaattcaataaaaccataaccctctgactgactagtttgcttattacggatgaccttaacagaaacaacctgccacaacaaaataaaaacatgtatttactaacaaaattcaccaaaactaccagttcaacttcaactcatctattcgcgcttgtgaataaatatttccttctactactacttcgatacaaaagcaggttcagtcaacatcgaataaaaacgcttccgtaaataacatcctctcaccttaaaagtattacttattcaaaacaaagattaatgaaaacctcgtattaaaacaaacctggataatattaataataaaaaatatagaataaacctaaatcttgtgcaagatccacacttcaataataacaacaaaggataataaagttggtaagaaaacctaaagaacagtgcaaaagaagatcgagaaataagagttagaatggggaaacaaacctcgccagtgtgagcaaaacaaccgtagagatagttctcttccatccaatactgcaagtcgccgatccaaagcgtccggacctcgtcggaacttgtaggctgaggctgctgggaaggctgagtttgctgcggtggaccctggggctgaccagcccacatgggaggtgcctgagcagcttgtggcggcgggggtggcatcatcatgtatggctggtgaggttgctgagaatattgctgaggctgctgggccatggctgggggaggcacacctgagccgggttgcatcatagtgagaaaggagagatagaggaatatgggactgagagggttttggttttggagcgatagaaaccctaaccctagatagataggagaggtcccaaaagagagaaaggagggattaagataacggtaggcactgtatataataatatgaatgattgtaaaagggctcgctcgggctaacattttttttatttttatttttatttttaaatgcacgtaatctatacacgtggcatatacttttttatgtgattttatctatttacaccattatatcattttttttttagggtaaactatcattatatcatcaaaaaaacattactactttttttttgaatgctcaaaaaataaaaaacatatgtttgtgtcgtatatttcggtttataaatttttaggatttttaaaatatgagtcataataaagaaacataaattgtgtcat

SEQ ID NO: 243152 - DNA, 593 bp, Cannabis indica
cgtgctatgcttgcattagtgtgtgagttgtgtgtgcattggggggctcgtatgcgagctgtgcatgcatgtgtgtgtgttgagtgtgtgcattgggggctcacgtgcgagcccatgtgggaggctcgcatgtgagtcgtggcattcatgtgggtgtttgtattgtgtcgggtgagttgcgtggtgtatgtgtgttgtagacgtaaggtgaaatttaatttgaatgcgcgctgaagagaatatcgttagaggaagaatcaaaggacaaggcttacaaccacgcctcctaaactctaagattaaggaggtacgactagtggagggaatgcacctacaaggtctgaggacccgaccaagggtacaccaaaaccatcacctcggggaccacctctacgaccgggaacaacctgacaccaaacaagaggcgcaagatgacctcctgcacctgcaacttaataaagcgacagcttgtctatttgggaccaccatgtaactcaagcaattaaagcctataaataccccattctcaaatgtgagagggggttggaagatcaagcttgtaatattacattgagagcaatagaaagtttatc

SEQ ID NO: 243153 - DNA, 1074 bp, Cannabis indica
aaaaagtttttaattatatataaaaatgtatgagaaaatgataataagtttttttgcacatattttgtaattaattaaaataatgtatacaaaattgtaaaatgctcttttatttatttacagttactactgcaaaaaaagattttagcggctgtttttttccatcatttttataaaaaagtggagttaaaaagtgtaaaaatacctgcttagtttaaagagaaatgctaacaaatggtcttatttttttctctagtgaaagttaatgtttcttttttagaataataaagtaaatgtccctttttattttttgcttaactatatataaggtatatattattatgttttgttcattcaaaataaattatgaacaaagaaataaaactgtatgatagaaacatggagttgtcccgtataatttaatttaatatattatattttttgttgtagtacatcagtttatttttcaattatagttggagtatggtatattaattacataatatgttacattttttagtcaaacatggattggtatatactattgaatgaatgctttttttttttggtcgttctctttattaacaagtgttgatatacattaacgtataaaattagttattgtgtatgtatgaatatggatcatatatttcatgctaacttagagagataaaagttatactatatcaattgtttgtactaagataaaaaaattgatgaaatattaatttttagtctgtggcatatacattttacattttgtgtactacagttagcatttagaaaataaaataataaaatttgaattgtatgaaaatataccttaatcctaacctaatataccactgtggaaaaaaaaaaaatatatgtatatatctatacaatcttaaacatggaaataacatactccaatcaaatatatttatccctcaaacttaaactaacattttatgttttttatttcacccaatatatgttatatcacataaaaataatatatcttacaacaatatgaatataccacaaaattaatattaatgatgcacttaagttttcgtctgcttcatgatatac

SEQ ID NO: 243154 - DNA, 1060 bp, Cannabis indica
cactagttgaattaatcgatgatatcttacgaacaaacaaaaatgcaagaatgcaagtaccgaactaataatatatgtattgtatttataataacaagaaaatatttaagggcttgattctttggtggttgtatagtaccttcataacctcatcaagcaaatttatatccaaaatgcttgggagataacctgcatgagagggcacaaaacttcaaataaaacaaaaaatattatctgatagagaaaagtgaagaccagtagagtgctaataaccttgattttcccccgatatgacacttctttcagctggctctacaccaactacctaaaggaaagtaaaagagaaggatatagagtttcaaataaagatgtattgagatgaatttaagcactcaattttcagagaagatagattcaagtttcgaggtatctcccaacctgtatttctttgttcatcattttgaggtatcgccccgtgcctgtaatagtaccaccagttccaatggatgcaactaagatatcaacattccccaaggtgtcctcccaaatttcaggccctgtggtttcgaagtgaatctgcactcatcaaatttttcggggtatttaatttgagattgatttatatgcacccacatagacatgtttgagactgagaaggggggaaaagaaatcaacctctgaatttgcaatattatcaaactgttgaaacatatacgaatttggtgttctaaggacgatttcttcagctttatcaacagcacctttaaggcctttctccgggtctgtcaaaacaatttctgctccaaatgcacgcaataagattctcctctctatatttatggacgcgggcattgtgactataagtttgtagcctttagttgctgcaataaaagcaataccgattccagtatttccactagtgggctcaactaatatgctctgcacaatcacatatagaaatgtaggattcttatataaggtaaacaaaaacaaaacaaaagaatttgattacacaatttgcctaattgaccttcttatgtgatagcagcaccacgagctc

SEQ ID NO: 243155 - DNA, 829 bp, Cannabis indica
tacttctatacagtgttggttcagcaaatggttcaccatctgttaagctgagttttgtagatgagctacttggatttggacaaggtttagcaccttccatgtgtgttcgaactaatatatccgtgatatatttggactgagacaagtgcataccagagtcagttctaactatttcaactcccaagaaataatggacctctcccaagtctttaagtgaaaactggttgtttaattcctttaccaacttagagatcaaaacttgatttggacctgttactaatatgtcatcgacatatacaagtaacacaacttgattatctcctgaaccacggatgaacaaggatgtatctgcccgtgaagattgaaaacccatttgaattaaactgtgtctcagctgttcattccaggcacgaggggcctgttttaatccatatatggccttgtgtagtaaacaaacataatcaggatgttcctcatcctcaaaaccaggtggttgttgcatgtacacaacttcatttaaagtgccatttaaaaaggcattactcacatcgagttgtttaacttgccaattatttgagacagccaaggaaagcactgttcggacagttacaggtttgacaactggagagaaagtttcttcatagtcaatgcctggaacttgtaaataacctcgagccactaaccgagacttgcatctatcaagagagccatctgcatttagtttcacccgaaaaatccacttgttggatataacttgcatgtcatcggttcgagggaccaatgtccaggttccagctcttttcaaagctttgttttctgttgacataga

SEQ ID NO: 243156 - DNA, 1630 bp, Cannabis indica
aatgtgttagattccattgataaatatataaggaatgactctttgttagaagatccgacttgaagaccaaacgagcacaacatgtagtcaagctaacgacgttaaacaaggcaaacttacgggagtttttcttacccatttctttttattttgcattgattttatttaattgagccttgaggacaatgcgcttatattaagtgtggaggggggggggggaggagattaactgtcgtgcctatctagtttttttttccttagttgtttagtttttattcatttatttatatcatttttttagtttatattaatttttcttgctttaattttagtgagcatggtttgaatgaaattctgttgacaatgattgctcctgtttgatatgtgtttttactttgatattttatgcatggtcttgtggaaaataattttgttgatgatgaaatccttaattgtgtgataattataattctaggaaaatgatagattctcataatttgtgtgcttaactgaagattaactactgctcaaacttgaatttaaaaaaaaaaacttttgcacattagttgaattatcatatttgctaatgtttggaaagttaagtgcatgcttgacttttaatttaaagtttcaaccactttaaaacttgtttgataatcatttgaggcgaaattgataaattacacatgattttgagatatgatataggcaatttttttagatcgattgagtttttcaagtctaccctatttgttaaatccctagttttacccaatttcagcctaaatattgacatcttgtttaacttttgaccctatacaataaccttttgagcctaaaaaaaatccttattcatcccttttcacaccataaatatattgatattttatgtatttataaaagtgtgagacttttgttgaggaaaaaatattcatggttatgggatgatgaaaaaaataatgactattcctttaaaataaaagtttgtaagttgtaagtatttaagaaaaaactaaaaaaatgatgagaaatacgccaaaaaaataataaataaatgaatacttgctacaatttaagtatgggggaacaatacgttttatgaaaaaatgtataagattgaattgttgaggagagttatttgagaatacaaatgagaattatttgagagaatattgtatatgctatggtgtgatttaatgagcctaaattaatcttctctatctaccttttaccctagccttacattataagcctataaattcctattgatctttagaatgtgtgtaattacattagtggagaacagtttgataattaagcttatggagtggattttcgttgaaatacacatttattttgagataaatattgattgttgacatgcatgaattgatgtgaatgttagtaatatgatgatttgattgcacacacaaaaaaataatttgagtttgaaaagtaatttatcttgagttgaaattttaatgattgaatagtttagattttcttggaattataagtggatgtacaatttttgaaactaaaattattttttttttataaagtatagatttgtttaagtatcattcattttattattaacttactcgaggacgagcaagagtcaagtatg

SEQ ID NO: 243157 - DNA, 519 bp, Cannabis indica
ttttggtttcttttgttttactcaactacaattgcaaaaagatagcatatatatacatatacgtttgtaagtttatgactctgtatcgatatgtgttttgagattggtgattaatcttgagttttggcttcagcttttatctatgataaacatataccaattgctaaatgcatttacataccctaacccattaaagcccaacccagatatatacatatattttattttccctaaattaattatgtgtatgtcagcatggtatatatatgttttgattaatgggttgatggattcaatgtatatatacatatatgtcttgctttattttgccattatttattttttttctctctttgtgtgatatatttagttatcatatatatatgataaataatatgtattttagtttaaacaattaaattcaaattttggtgttggtttatgactaatattttgaataaattaattgaaacaatatgtcgccaaagtgacctcttttgtgtagattaatttatttaa

SEQ ID NO: 243158 - DNA, 784 bp, Cannabis indica
taatatatgtcgatgatatcatcgttgctaccaatagtctagaagaattacaacatttcacttccactctagactctcattttaaactaaagacctaggcagcctacatttcttcctcggcctagaaatagcacgctggaaccaaggcatcttagtcacacaacgtccatttaccatgcaactcttacaagaaacgggttatcttggctccaaaccggttaccactcccatggaacccaacaacaaactcaataatgaatctggtaaacttctttccaaccccacacagtatagaagtttaattggtaaactcatatacttgactatcacaagaccagatatttcattctcagtcaacaaactgagtcaatatcttcaagctccaagagaaccacatctccatgcagctcaccgcatattgcaatacttaaaaggtacacctggtcaaggcctcttttttcatgcctcaaccactgaaccaatccatcttcaagcatttgccgatgctgactggggtgcatgcttagacactcgacgctcaatatcgggctattgtgttttcttaggcaaatctctcatctcatggaaatctaagaaacaacacactgtctctcgctcttcggctgaagcagagtatagagccatggctcacgctgcttgtgaactaacatggcttcattccattcttcacgaatttggcattcaaaaccgacttccatccactttgttttgtgacaatagcaatccacatttcagagaaccctgtctaccacgagcgcaccaa

SEQ ID NO: 243159 - DNA, 713 bp, Cannabis indica
ttttaatttgatatatactggaggtatttatccattttcattcttctttttattaccatttatttcctcattcactttgtgtaagtaatttatgatggctgatgatgatgaggtctgttatattttatagaacagtggattattcatggatgatatccattttcattttcttcgtttttttttttaatacttggtagagtttttcagcgactatttatatgctgtaatgcaagatgggccagatcaaatagggcctaataacaagttaaatcatgggctattacaaaactgggaaaaaatggaacatttatataagggataatttggaaaatatctttttttttttatctattaattaaaaatactcttatattatttttttattaaaatatatcttcttttttgagtgagttgtcaaatatactctcactctttattaagtttagcatataatttacattaactcgggtatatctaaaataaatatagaaatagagataaaaattaaaacaagtaaaattaagtacataaatagaggtaaaaattaaaacaagtaaaaaaaatacataagtatataggtatatatgtagaaaatatcataaaaattattaaaaaattgaataaatttttcaaacaactctctgaattattaaaatatacttataaatggattacagagattgtatcgtatcaatctatttataaacaactcg

SEQ ID NO: 243160 - DNA, 1416 bp, Cannabis indica
ataaaacttacacagtatttttttaaaaaaatctgtccagagtaaaaaaaaaattaaaaattttagtatagtgtaaaaatatcttttaaaaaaagataaaatgggatgaacaaccataaaataacttttaggtcgttttttatttgtattatatatattaaaaaataatactatcacaatacaagctgctcataaaacagatgattaatccaacctcatgatgacacgtgttaatcaataaaaaaactacctacagaaataggacacatgctacccatgatgacggttggatttactaaaccacaactccagtttggctgaacttcttaaactgatttttgaaaaataaaacgaacattcacaaacatctataataagaaaaaaaaaaaaaaaaaaaaagaaattaattaatttttttaaaaactaattgtcagcatatattcaaaaacaaatattttgaaaaaaaaaaaaaagaatttattatatatataaagaagaatttttttctctttgtgtagtgttgcgttttagttttgagttgtggagaagagcagagagcagagactatggtgtctcccaatcgaaatccagcacaagggtttagttaccctcattcatccaatatgcataatgacttgcccggcatcaattcgatgcaaccaccggaaaataccataccatcgcccactgctaatgtgaatacgacgtcgtttgaggtccctccaaccaagaagatccgaaaaccctatactattaccaagtccagggagagttggtcggaacaggaacatcagaagttcgttgaagctgtgcagttgtaagtataccttgtcaatattattttttgtaactatttgtttctttatcaatggttgaattgaattatgtgcagccaattcaattgtgtgttggttgatgagaaaattaaagaaaagatatctttttttctcttgatagagataattaggtgttcgttttggatttttagtttatcattaaagaaagtagatgttttgggtattttagttatgttatgttaatctcctctgaaaacgtccaactccaagtgaccaaaacagaggtgtgctgaacctttgaaataagtttctaaaatttttgtacgactttcgttgtgacttttaatatactctagaaaaaattggagtgtcataaaaagtgtacaccgcccatgccctaacaattaattgaacaagcaatttagtacctttattattgtaattttgagtatcttaatcacattcaatgaaaaataaataaactagaattgttctgattgaggctctttgtatatggtttgaattcagatttggtcgcgactggaaaaagattgaagcattcgttggtacaaaaactgccgttcaggtattgttcttaccatcttttgagttcacctga

SEQ ID NO: 243161 - DNA, 8130 bp, Cannabis indica
tatagaagatgaatatactcaaaaaaaaaaatatagaagatgaaaagatttatataagaattaaagaaactatatcgcgacttcgtaacatttgagaatgataaatatttaagtaatttttatatttttataggtaccgtttggtaacacttttgttttttaattttttaatcacaaaatgaaagtaaaatttttgtttttaaaaaataaaaatgcctttggtaacctacttttatttttcaattttaaaaacagaaaacaaaagtatattctgtaaatgtcatttttatttttattttttgattttatttaagtcgggtcaagatccggggttggattcaggttcgggtcagaagccgggttcagcgccaaggccgtgagtagactatccaactatccggggttggatcgaaagtagactatccaactcaataacaacatcttgaataccctttctcttgacccaactgagtgcttcctcaatccccattatctcggccaactcgggttgaactaataacaattttttacaaaaaaaagaactaataagaaaaaaaaaaaaattgagaaaaaaaaatcacaaaatttaaaaattacaacagaacacgtgttaatttttttttgtttttgtttttttttttttttttttgcatgggagaattatatatagataaattattgagtttttttaggagaattatcccatataatattttttttaaatttacgtggtttactatgtgaattttgattacaatttaagttgttctgttatttgctatatggatttttgtatgaaattccgtaaaaataaaaaaaaaaaaaaaaaatgacttgtcattttattttatctttttgtaaaatttttataacagagatccctggaacatttgtcgttatgatgtctgtttttagtgttttattttagtcaaatttttaatattattacaatttttaaaaataatattaaactagtttataaaatcatacatgtggcgtccctatagattagaatttcctaagtgagtttcctaacttgtcagtcttcatttccaaatcttataatttgagtgttgatatgacttccttaagagttatggaagtccttccatattggatggttatttttacttttatataggattctaataatgagttgaggatgatgtagcttgattcccatcactcaaagcctctttctctcctaagttatcccattcggtatgtatcctcaagaattcatcaagattttgataaatcttgttagagagtgatttctattgaaaattgctattctagttttttccaaatctttgttggagtttcttccttgtcaattaatatgatgattgagtaagatagattgaatataatcagagcattagcagtttccaacaattcctcatgttgaatctttgtagttccatctcgccactcaattgggagaacccttaatagattatgttgagccagtagagatcgaatcttctttctccatatcttgtaattttctgtaccatcaaacttatctatttcaactttaattgtactcatgttattaggttgtaagtcaaatataaatagagttagagggttctaatccaaaatttccaatgagacatcaacaaattcatctagattgaattcaggttcttatatattaatcctctccagtcttgcaacttctttctaatgttcttagtcgattcttgcttctaagattcatgcagctctgataccatgtaggaagttcaatttcgaatttaccgtacaccaactcaaagacaaaattaaaaaaaaaataaggtcaaaattgaataaatcatgatactgtagtactacctttaccttcctctaatagtttggtgtgctagaacaaacttcgaatcacacacacaggaacacacattagagtctcaaactaaatccacacacaagaacacatgattcacaatgaattcaatcaatacaaaagagaaattaaaagattgagtaagagacgcaaacacaataattatagaagttcacctcaaaatactaagactacttccacttttgagttttcctcatagatatggggctcaatctgcactagtaatggtaaatccaattacaaagtctcaagattccatgtcacaatacgcaatctcttttttcttctcaggatctctctctcgctaacttggacaaccaatctctcatctcgcttttttcttaccatgattggtatttatatttattagcctttttctgttacacaattttgtgtctaaaataggaaataagaaagtcttggactgagctagcttaatgctaggacttgatccaatatgtattcattttctttttcctctataacactttttttgacacctctttcacactttaatttaatcaacggttttcagttttttttattaaagatttcaaaattagattaatacaaaaatgatttcaaatattgttgtagagtcatggtattcaaatattgtacccttttcaaaattagattcaccaaaccgtacaatatttgaataacatgactctataacaactgttatgtatactacatcatttgaactattacaatttatatatatggaaagagtttagtaaatgtgtctaactgaaagttattgaaaaagcattcaagaccattctatttcttctaccatataaacctctgggtcccaagctcatggtcccagtggaatggcctatacaagaacatgatcattgtgaaaatattaagggccacatacaaaaatcccatcagaacccagctttggatatcattattatgggaatgaagtatcaagaaaatgaatgggatggtgtagtatctgaactcaatcagtggagcaggaatcagaactgcagcagtggccaaaaaatatcccaacacccaaatcttcctctgaactttccctgccataggagaaacaataatttatctacactatatcgacgaattgtacaataaccatatcaacattttcagtaaaacttcttctaacccaatctagtgcagatggaaagccacgaatacacatatagcgggaccaggaggtatttcattggccaataagctttgatgatcttccgccatagatagaaggtatagtgccgattatcagcaagaagatatggatgagcgatgctgcaatagtcaaaattttgcatcacacttagtatgataaccatcacatgggtgcttgaaatgaatagcaggtaaaaacatcagatgagaaagttacaacataatcttgattggaatcatatacggtattatcatagtttacattacaaaagaaagtattatcatagtataggtcaatattataacatgagagcacaagttacaactacagggataaggatcaatggatcttatgcaagaattctatatgaacaaaaaaaaatgagctcaactagactttgaaaataaatgagtaaatactgaaaaagtgatcaagcacgttaaatgggcctgacctgaagaaatgaacagagatgaagccagcaataagtgccaaaattgcttgaaagaaactgtggggcctattcttccagaatgactggaaaaaatttatggtttcttcaaaactgaaatagagcggagccaaaacaagagcagaaaatataccgaagtacaagatttgtgcaaaatgtaatgaaacagcatgagcttctttagcacctgcaatactgagccagagtaaaaaaacaatagaatttacatgtgaaaatgttattaaaagatgtggtaagagatttaccaagaactacactcccattccagcggacaaaagcaacaaatgctaccaataagataataaagggggaaaaagcaacaaaaagcttcttcttcatatgcaaacttgttaaacatacagcaataatatcatcaaccaatcctgcagtcaaagtaaccaaaaatgccaagaacactgtaaaacacaaattcaagacatttaacattagtgctaacttggcaagttacagagcaagcattccgattttccattgcacagagaaaacggattgtgtgaattgttatgttaatgtgaggtctaaaaatatataaaatcaaacctggtgtgcttattcttgacgtagaacttctagtgtgagttgactgtgcaccagtatctaatttactactgataattctctttctcaggtttgagctcaaaatggcattattttcaggagcctgctgactatttttcctgatggagacactggcatcatcaatgtctattttatctctttggtggcctaaagtaatatttatgatctcactgcatgcaacaaaaagcatccatataatatttgtttgtcgaatggccactgccatggcaccaagctgcagtgagaaatggaatacgtcagcacttgacttcaagaagtcatggacagtgcactaataccaaatgaagtgaatggctgcggataaatttaccaacagtatagaatatttagaattttgggacacaaagttttttttaactcatttaccaatccgctgaaccagtaactcttcctcaaacaagcaagatacatagcaagcacagcagtaagtgacgctacatctgtatagtagagaaatgtaaagaaccaatggagaggatacatggaaaggacaacagcataaaatgtagcttttctatcatcaagggctggtctcaacagggttatgatctcatacagaagaatactgcatattactgccaaaacaccatttacagatcgaaggatcacaggggagcacacttcaaaaattgaggaggctccatttatgtatgacaagcctggaaacagaaaagtagcatgggcaagtgaaagatagtacctgcagtagtattaatattcacatttaaaattcaaatccctaccggcacgatgaatcactaaggcgttgaattcaatactgaaactagtttctcaactttgcaagagaatcaaagacatgtacaagcaagttgtaaactagaacaaaagatcagtaaaggggaaacatgaagttataatattccaattccaatagcataaaattcctatttttgacaccaatgcttgttatatatggtcactcgaaatgcagctattttcctttctacaattacaggactgaattgattccaaatgtctcttgtagctagtaattctctttcagcatttgttataagaaacctaaaagttgactgcttgggtttcttaaaatcagttttctcatgcatctagctgaagagagcagtatataagaatataaaacagaaactggaactaaaattaaatttgggaaaggaagaaaagataagattcttacaggccaggaggagtggtaatcattggatcccagcttctgaaatttcctttgcagtactgctgagcctgaggcatgtggaatatctcgtcctacaaattagaaattatggggccttaagttttttcaggcaaaaaaaagaaaaattaacttcaagaacaattattattagtgctaccatgtagggttcgggcacaatacgattgacgaggatagaaatgggaatcacccacaagctcaccatcactgcaactgctaatcttcccatctttccgatttctctcactggttgtccccttcgtcaattgagcagccgcagtgatgaaacagaactttcaaaatgctgtgttttggtctcactgatgaatgaacaagacaaaaatattacacactcatgccataattgtattgcccaaggctatgtttcaagcttggattttaggttatggcagggaagaaaagtataaggaaactgaggaaataatttattatgtttggcaccattacaatatgcttttatgagtcatccaactttaccttttttcttacttttctcacacaaagtaattcatgaaaaggaaaaacaggagcaatcaaactacagataaggcgtatatcagcaaaaatatcatagctataatgaattgtgaattcttttaattcagttcattaatttgtttctcctcaaagtcactcaaatcatatattagaattccaactaaataacaactggtcactcttagatttcttgagacttcaaccatttataaaaatacaacgaattaactacagttcatcaagatggttacctaccatagtcatacagaatatatcaaaatgtacaaaaccattcaattcaacatttgtatgctaaagatctataacaaatagcttaagaaaactataagttcaacagaatcattcaaagcaatcttctattcagttaatcattccaacaaacatttggtatgacatgctttatttaaaatgttcttctacactatattcaaagggcatccattaaaattttgaaaaataaataactcgattaaaagatgaaataatttgtatctcaccattgaaagacttcgaaatcaatgttgagaagtcaaagacattgattatcactacatatctcggcgcgaccagtattaaaagtcgacagtcagaggcataacgcgacggcggtgttaggtttcggcagtggaggacgcgccagcaatggcggtgtcgtttgttgttgagctctctagatcgaggtgagcttgtgttctcctttcataactctacatattgtatttgggctttcactggcccattgggccaagtatgagttagtgggcttctggcgccaatattcagaaaagttcggtaattgaaaagtcaatgtaacgagtgaagtcttccaagctcaaagatcttctatcaatggccaccaatctcagaattcgatttctggtttggttgagaagatggtcgaagagggattgggcaatcgcaatcgctgttttcacaatcaccatcttcgtcctcactttcaccatcaactctttctccgacgatcccgactctccatctccggtcgatgccactgccgacgatgatgtgttgacttgaccttcttgcgcaacgctaagtctagaggcgctcgtacttgacctataccctatcctatcttcttcttcttcttctcccttccttcagtgtaattcgaaggaacggactctgaaaatcttttcttgcttgtcgttttgcagtttgtttagatgggagtgtacctggatatcatttcaagaagggctttggatctgggtctgaaaattggcttcttcacgttgaggtttgcattccgaatttaaatttcaattcacgccattaactgtttgaattttccatttttcaattttggattgacgaatcgtgtgtagggtggaggttggtgcgctaatagagaatcatgttctttccgcgcgaagacccagttgggctctctcaattatatgacacgtcgtgtacccttttctgggattttgagcagtgacccatcacagaatcctggtactatatttaaaatccttgcgcaagcccctacttcgtgtcttaagtcttaactataattggttcttgtagctttatatttgtgtgcattttctagatttcttcaactggaacaaggtcaagttacgatattgtgatggtgcatcttttgctggccaccccgagactgagctgaaagtatgttttcggtttatgaagataaatatttagtcattgatactgctgtatttatttatatatttatttttgtaatgcagactgggaacaatctgtttttcagaggccaacttatatgggaagaacttatggatgaactgttatcaattggcatgtctagagcaaaacaggtctttctcttctctataatttgtcgcttgtagtatgtagtacgaatataatttggttaagctagtattgttgtcaaagttacaaatgtactatgcttccatttgaagttaaaagctattcagtattttttccccctaatatctgtggaatcttgttttaggctcttctttcaggatgttctgctggtgggttggctgctcttatacattgtgatgacttccgcaaacttcttccgaaagatgtagtagtgaagtgtcttgctgatgcaggttttttccttgatgagtatgtcttatatatgtcttgtaccttgtgcacctgactctagcttatacgttgtgctagaaaatttcatttatttgtaatctgctaggagcatctggatcacacattct

SEQ ID NO: 243162 - DNA, 1070 bp, Cannabis indica
tagtattatataaaaatatgatatataatctaattcaatattatacaatataatacgacctaggcgttataaacgagcctaaattattcatcttctctatttcatattttaaatttaatgaattaaaatgcatgcttacttctccttttccaacgttaataacaccataagaaggaccctcctgatcaacacctgtcacgccacacataatctcatcatctaacataaaaagataatatgtaaagcaaatgaacattattaccggagcaagaaaatcaagattttggtacatgatgatactaactaacgtttgaaaattatattaaattatagtatatacgtacactctgatttttgtttactcgcattagcacaaacttttgggaatcctgttctagcgcgcttgcgggatactggggcttctatttgtgttaatttccttgaaggctcactagaaaaagaaaaagaagacagttgtaatattactgattcctccattttagattggtccattgctgctaattccatattattgggttgttcttgggctcgtaatttcattgcaggattactaggaaaagaggaagaagatagccgcagtgctgttaattcctccatatcaagttgatcttgtgctgttgatgatgattccatattgggttgtttttcttgcgctattgatcttttaaacaaatcttcaacaatgaaagacaaatctctagttcttgtgggaatagatgaattggataatgtttccctatcatcatcatcacgtccatttgcatccatgttgctttgaaaagctagcttataattacaaagaatgttttccaaagtagaaaagctatctttgcaaagataaaaattagtgtttttcaaaggaatgtgggttggtgggggtaacgtacacaattgtatatatatagtaatcaagatatagttcgtcacgggttcaagattcaagaacgataaaacagaggaataaaaatatatatcatttattcctttaattccactatctactcatttcaaggctaaattacttgcggtgtttggtaacacttttttaa

SEQ ID NO: 243163 - DNA, 850 bp, Cannabis indica
aaataaatctaatgtacccctctcgattgatctggatgaggtagtggtgatgttgtatggtagtttttggagatccactggaaacctctcactcaaaaaagctaaaagaagatgaattttcacttgaagacgatggtgactttgcttggagtctaagttgatcttcaaagagtcttgggagggcacgtgggattaggtacgtgtcacccatccgagcaacctaaagacaagaagtccacgcacgaaaaactattcccacgcagacttaaggcaaatgttatcccaatttttgcacagggtgacatggcattcaatagggtgacatgtcaaaagcgtatgaagaccgagacgacctatacgtgctcgatgtttcgtccagaaggaatcaagctcaaaatggttgtttaagtcttcaacatgcaacatccgaacaggttctgaatctcataatgttctgagcaaaacacatatatccagcgaagcattatcccctgcgtagaaagatgcaataattatagattctctaagacattttcttcaaatatctctacaattgtagcataattaaatccttatatttatgtgattgattgaggtcatccgagagatttgagagaattaatacttagtttcctgtttcttttccatttattttgagtaacatatttcatgtattttctctataaaaatagtgaagtcatttcattatttgaggatccgaaattctactttttagagagctctattgctgctaaaatatttgtaagctttcacgagattgttaagaaattcacctggctagctcattgtgatcttaggaatactctagtaatataacaaaaataggagt

SEQ ID NO: 243164 - DNA, 1274 bp, Cannabis indica
atgataggatttgattagtcaaattcaaatagagataagctttgttagtctgaccttattatgccctactaaaagggattataacatgggagagagagagagaggtacctaagcatgtgggcacatgagagtatttcttgccatgtgagacctgaatcaaatataaattatttgtgaccaagatacccttttgataaacttgagagtatttctgacattttctcataatttcacatctgggtggattttcttgtcatattgggggggaagtggtagatataatgtccatcaaattataaagcttccattacagtatatggtaggtttaattttaatcaagtacagctaataaacttatggggaatttttaaaaatatatttaaatattttatttataatcttacaacttaaaacttttatttataaaattatgtttataaagctgtacttgtaaaactataaaaatatattttatttaataaaaattttttttcaaatttttaatttgttatgtaaatttttgtaaacataaggggtatataaatcttcttgtcactatatatatagcatatgtggttgaatttatttttttgtttatatagctcataatgatcctaattgtttaatcattcactctatctattattaattcttttggctacccttgttccataattgagggagacaataatttaggtgttcaacagctctcataaacaacaaaattgagcatgtggctaagtaaaaaagttttaagatttgcaatagaattttttttttaaaaaaaaaaaatcctttttcttctcttgctttatttttattatttttcaataaccaaaaaggaatactcaataacatagtaatgtggtgatttgttgtgataaggattagtcttttctttttcaaccaagttcccacaatacaaatgttcttggaaacatggaaaaatcaaggtacaaaaaagatagtgctattaatgcacattttattatataaaaaattataataatgataattgaaaaggcagtgaatactgaattgtatcataatggattcagatgcagttatacgcgtggagtaaaatccaacaattgggtccctgaaaagataaaaaaaaaaatgataatgctcacatagtgctcacatatttttaaacacataaacacaaagaaattaaaaaattatcactatatacttaatttttttataaattttttaaatttacggtttgaatttctaaagttgttgcagtgctagttgcaataggggtttct

SEQ ID NO: 243165 - DNA, 646 bp, Cannabis indica
gtatgcgtactatgaattcttgttagtagtacaaatttcacactttgaattaagctgttaacagattaaattttctaatcccataagtcactgtgacgtgctctccaaatcatatatatcattatatttattgttgttttcaaaaatcaataaaataaatgtgaaagctaagaaaattgataaataataaaaaaaaaaaataatactatttatgcattggagcgttaacaagtcttagtccacacgtcaatattacgactagaaaagttttataatttttacaagtgtttgaaccctaaatttaacttgagcaattgagggatcttgaccctcggacaagatcttagaagttaagttctgacatcgtgggatcttgaaattaatagatgtgacacagagctagatatccagacttttgctaactactttatcggacgcttcaaatgatgtcttccagattcttgttgtgttggaggattatctcgcctggacgagtcgtatgtctgtcattcggaagagttgactttgctaatggatctggcccattatcttggttgggcctgctattggccctaaagtgattgagttgtatccaactttaacatttatcccaagcttccggaactctaggggttatggaagtttg

SEQ ID NO: 243166 - DNA, 1124 bp, Cannabis indica
tctatcatttagcttatatttgtaaagttaacccctcctttacatcccaaaatcaagtgaaagtttccgtggtagctagctgaaattgcaaaaacagatcagacgaagtagtccaaagttcatgccgaagtctatcattatatgaaagcttagatgacttaatagtcctaccctttccaccaaagaagtagactccagatatttcctgaaaccaacaaaacaattcagctcataccaagaattcaaatgaataaaatatgcccaaatccaactttaaaaagaatggaagattatgattctgttagatttggaacaagaatataatgtcctcgatcacaggaagaagtagaatgtatcagcatgtcggaaaatactgctgacgctactttctttttcttttctagattactggccgaaccaaatccggaaagcaagtaaatgtcaatgctagtggttagtaaaaaaaaattaactagaaagtcaagaaacattactgggtcaatttagcacagaatctgcagcatgagtgttttggaggacaaatcaccaaaatctataaataaagaacttgaagaaactaccaaatgataataatattatcagattgaaatgtttttgtatttctctcagtatcatctaattttgtctagattattgcatcatatggcatgctaattaattagtacaaaaatttagatagttgagaaacatctttgggctgccaagttgtaaaagataaatttgaaattattgttcaaatagtctaaaatcagcatacttggtcagagatgatatccataccaatatcaacgaaagaatattagaaagagagacttactggtggagctagggctgcatcaaggatagaacttatcccattctcaggtgactgcagaagtcccacaagattcaagacaaaaaatgccacttgagtaataaaggaaggaaattcacgcaaaagattggttttcacaaatccaggatctgccgcactttcaaatgatgataaaatagaattagaaagacaatcattagctatcaataatattgaggaatatctgtttatggtataacactgagaaaatttctgtccagaagtagtaaatgtaagatgtgcgaagaaa

SEQ ID NO: 243167 - DNA, 2305 bp, Cannabis indica
tgggaatgcaaaatgcagggttgcctggagccagagtccatctggcgatatcattgctatcccagcaccagatccgtttttgtttgatgacccatcaacgaataccttccatgttggggttcgcactactgggatgcttgaattagcttctgcttcattacatttcgtaatgaagtctgctaaggcctgtctttttatggaaatgcgtggtacgtagtgtatgtcgaactggctcaactccatggcccatttgaggagtcttccagacgctttcgacttctgtaagacttgccaaagcgggtgatttgttagtcttttgatggggtgagcctggaagtagggtctcaacttccttgaagccatcaggaggcagaaaactaacttctcaatcaacggataccgtatctctccccctatcatgcacttgctaacgtagtacactggatgttggaccttgtcctcttctcggactaaggctgcgctgacagcattctcggagacagctaagtatagtaaaaatcttcttcgttaactggcttcgatagaatcagtggtttagccatgtgttcttttagttttctgaatgcctcctcgcattcttcagtccattcaaatttttgatatttcttatgattttgaaaaaagggatgcagttgtcggttgatcgggaaaggaattggcttaaggcaacaacctttccggtcaagctttgcacatctttgtgcttcttgggggaaggcatgtttaataaagcttgaattttctcggggtttgtctctatccccctttggctgacgatgaatcccaaaaatttccctaacttgactccgaaagtgcatttctttgggttaagtctcattctatacctcccaaatactccgaagcattctgcgaggtcatccgcatggctcacgcatgctttggatttgactaacatttcatccacgtaaacctccatatttcttcctaggaggcctttaaacatttggttcaccattctctgatatgttgcaccaacgttttttaatccaaaaggcataactaggtagtactatacccccttattggtcgtgaagctagtgcactcttaatctgcaacgtgcatcttaatctggttgtatccagagtaggcgtccatgaaagacagtagcttgaacccagaggtggcatctaccatctggtcaatctgaggtaaagagaagcagtctttcgggtaggccttgttaaggtgggtgaagtctatacatactcgccatgtcccatttttctttggcaccagtaccggattagccagccattctgggtagtacacatcctagattaggtcgttggtcactagcttatctacctccttttccaaggcgtccgcttttactgggtcaatgggacgccgcttttactgtactggcggcatatctaggttaatgtttaggacatgggtaatcacatgcgggcttatgtcggtcatgtctccttcgcaccacgcgaaaacatctgtggtcgcccttaatgcttcaataattttgtttttttcctctggctctaggtttcatcccaagcggaggatcttggtagggtcgaggtcgcacactcgtacttcctcaatgtccttcataggctctacagtctttttggatcccatacgaggatcaaacttatcttcttctgccaactctggttcaatgccctcacggaccaccagcaccggcaagtgtgctgcaacattatagcattgcttggcctctcccggatttcccctcattgtccccactccagcttcctgagttaggaattttaggcacaagtgccggatggtggtgattgcaccaaagtcgaccaaggtcagccagccaaggatggcgttgtatgcggttgggcaatctaccaccacaaaggtgcagtacttaaaagtactctaaggggtatccgagcacagggtgactagcagtctcccttttcccattgggataagtgtggtcccattgaatcctgtgagtttggagcccttgggcgacaaacccctatccgtgaggcctatggttgtgaaggcttctttgaacaacaaattcacggaactcccattatcgactaatattcttgccacaattttgttggcgataggagtctctatgaccagggggtcatggtgagcgaaacgcaccagttttgcgtcctcttccgtgaaagtaatgggttgatccatgagttggggcctttgcgctggaacctgggttatgtgacagtcagtagtcccgtgatccgtaaggggaaaaactgggtaagctgtgcaatcccacatcgcctg

SEQ ID NO: 243168 - DNA, 1416 bp, Cannabis indica
agctgttttttcccacagtacagctacagctgcttttctcacagcacagctgtgccaaactggccctttgagtaattatcaaagttacactataaaataaatttatttaaatattaaattgtaactttaaattttaaataatagaacagtttctaataacttttaaaaattagttggtataataaattttgtgtaagtcatttagttgcactttgaatattaaagtaaaaaaaaaattactctttgatttactaaatattaaagaaactaaaatgatgctttttgtttttattttttttattgacaaaaaatatatgtttctcatatattaaaatgatcattttaaaaaatagattgcaacagtatttttttgagacaaaataattagtagtgtaattaaaattccattttaaaacaaaaagagagaaataaatattgttttttttttttaaaaaaaaaaggtcaatgttaagtgcaatgagtcaagtgtatacttttattaatagtatataactgaatacatatatacggtattcttggtgacatggaacgttataatttactaattatttgtataatgtcatttttgtaaataaattattgattatgtatattattaaaaaaattccttatataaatttggtaggttagcctcaaattttatattttaataaattgattctcaaacttctgttttcttggaaacataaattcctcattttttttttttaaacaaagtcatcactcttaaacgatagtattttgtttatgaggattgttaaaaggcaccactggtgtctagtaccctcagtgtcatattgctactaatataattaagtatcgggttccacataatttaagaaaatagcttttagaggatatcgctaataaaccgtggggtgtcacctataaaaagtgttgggtaccactagtgcccaataacaatactttttatttatttatttatttatgtattaattttaaatagttttatattaatatatgtatcccgagattttcggcaactaataattaaagctgtgtgaagaatttaatgaaagttagaagagaaaatttttatgtggttggggcattaatgagctttagtacacgagtcactatatttgtgagattatttatcatagagctttttcttggtcgatccccatttttgtttatcattagggtatttatagctgtggtaaaaggtcaccattgtcatgtttgtttacactatacttggcacaatttctcaaatctaatttagggcataattgttaggttgtgtcctaaataaaacccattttaatataatcagatttacttattcacatgatttattcatgattatacttaatatataaattttatcaagtccagaacatatatatatttgttcatgattatagtgtcgtc

SEQ ID NO: 243169 - DNA, 638 bp, Cannabis indica
acaacccttgatctttgttctagccgttgtggactaccttttacccctattatggtgcttggaatctttgcatcagaggtatcttgatgactaaaagttggtaattctatttcaggtggttcttgaaggattcttgattgtccatcattgattcttgagggttcttggaccattcttgcgtgatcttgagcttccaaaaatcgctggaactattgctatatcatttgcatttggcgcctcatctcgagcaacgattcgttgaccaattccttgacaacatttgtaattcccaacacttctatcttcaatgctgcaacttcatcgtcgacggtggaatccgaggtgctcttgtctcttggtttcttccgcatggtatccacagctcaccgcaccaatttgatagattttccttagttagaatttactatctatgatattactcgagtttgaatctagtaagtttgactttattgaatttagtagcagaattacaaaggtttggagcttttcaggaggctccactctcctacttccacctttcgagagggtgaaatttctccactcaagtcttctgacttaatttctcagctcctcctaaatgaactagctaccctcctatttatatgcattggtctttt

SEQ ID NO: 243170 - DNA, 1009 bp, Cannabis indica
attatttgtaaattttttagaaaattttcagtaatttaacatctacattattttattttatgcacgtatatttttcagcattgtaaactagaataaccctttaggagtctacttcaaaaaatttctaaattattattgttgagcttatttcttaccaaaatacgtggcaagtgtaagaggctccacatggctaagaggccccacttaggaagaaattaacgctcattacatagtaacttcttacttgtactagacaaagtgtaagactcgtcgaaggagcaggtttgcaatgtcaagataggcaattaagagatcactatttggccatccaagaggcgatgatctcttggatcaaaggtcatccagaattcaattatttgcataacacgaatttcaaagtgagttactatagatgactaattcagcgtaggaataacatcattaagaagtcatactattctgacaacccatatacttaagcaaataaagtgacagttgtgcattacacagtcacatcagtcgcacatgagacaaatcttatctcaccaaactcttaccacagaggataggtagtgcttagagaccgaaggagatgtcctttctctcctctgaccttcatttttcttataaatacttggaactgtaatgaaaaaggactttagagtcacacacaaagtgagctcttatactttaacctgaatattttctggtcaagcgaacattcccactataagtacaagtgactcgtgttagactataatataatatgaacaataaagcatatataaatgatatgtaatgtagaataactacagacatatcaaaatgtatatgcgatgaaaggaccgaaatacctccagtcattaatgtttaagcttcaatccctgtgatagctttggtatgggaattcgggcttcctcgctctctcaattctctttagatggaattttattgttttcacagaatgaagtgaagagctcgaggaccgagaccctatatttataggtga

SEQ ID NO: 243171 - DNA, 666 bp, Cannabis indica
atatatagttttgttgtttaaatgaattatgtgtttaacaatgtataaacatgcttaaatatgaaatcttattaaataaaatttgcatgtgggctacattatttttaattaataagattagatttagatgtagattatgatagatttgaacaatttttgaaaaaacttaaagtttaatatttctattttaatgaaatatgtgaagcatttaattattttataaatgatttaaaattttataattctaataaactattaaattaaatctacataatttcatgttcgataaattaaaagaatttaatttaacatattaattatataaacatataatgaaatccttgtagggtacaattattatatccacataagtaattataaaacatgtctattatgtgatcctaatccacttaatatatataattttatataattaaagatgccggctactcccaaattattgaaaattatataatagttccctaaacactaaagtataagctgaagatgaaaattttactaaatttaaaattgcatgtggctaaattttaaattttataaaatttggtaaaccttatgatagatttaataaacaaatagtttaggaaaagtgaaggtttattatctgtcttaattagatttataataacactattaaattaaatc

SEQ ID NO: 243172 - DNA, 541 bp, Cannabis indica
tgaatccacaataaccatcaattcatatatacatatattacttaagtaataatgtaacactgagtactgttaacctcggttgtattatagtactatccttttttgttttttttatagaagtatatatacttaatctgtcttcagtgtagttgctgatgaaattaagcaattattatacaatggaatctgaagatgaaaatggtaccctgatgagatcaagaaatcaagccctgaaacctattcaaaccacgaatatattaaaaagaaggggaaatgatgataatattaagatgaagagcacattcttggccgagcaggatatgatgttgatgatggccgagaaagatgagcctgtaagtccagcaggccgttttttcaacgaacaaaacttcactgttcatatcttagccattctcggctgcaagacaaagattttcccagatgttttcaaacaaggattactccatactcttctcaagcaccctcgcttctctagtttgatggtataataattaattgtttatttaataataataataat

SEQ ID NO: 243173 - DNA, 818 bp, Cannabis indica
atctattggattcctaccctaaacacccgaggcaaccctctacaaaaaattgcaaaatttcagaggtatttttaacttccagattgtgcgccataaactcgagggctgagcagcaggccaagctcccttaagcacttggatatgtttatacgcactactaacaatgtatcccccatgattctcgaacttccaacaccagttttcatccattgtgctatcacttagctgaatagaaagaataagattctgatctctagtgtcaaacaagtccctgataacatcttcatccaagtttttgaatcagttttgaggaggctgcttacagattggttaaacagtgccggatgatcagacattacaaaaggattagcatcaggaagtcagggatcataagaatagaaactgaaaaaccaaacctattgaacgacatacaccagaaatcaattactcttttgcctcaaatatgcttcgccacacaaaactaggatggtcacccaggtctgggtcctaggtcccgatttgggtccatgttcgggtttgggttctagtcccaatttcgatttcgatttagtgtctgggttcgggttatggtccgggtttgggttttggtcgaagtcctggtccgagtctgggtccgggtttgggtccaggttcggatcttggtctgggtctgcattcaggtccaggtttgagttcggatcccgggtgtgggtcaaagtctgggtctgggtcagggtctcagtccagatttaggtcctgagttttgatcccgatgtgggtccgtgtctgggttcgagtccaggttcgtatctggatcc

SEQ ID NO: 243174 - DNA, 568 bp, Cannabis indica
cttaaataatataaagtgtataattgtatatggaactttgattaattttaattttgacattatttaaattaaaaaataaaataaaagaacaaaaaaatttaataatgttttggttgctaaagttgttcatacaatctacaaattagtagttttataaagttttcggactaaactatttgagaccagccagtagtaatagtttgatcaatagtttggtcaaacggaacaattttatttgatatttgagttattgtttagaaatcttgagtgcaagttcaaataaaaccagagttgtctatttgatgaagttcaaattcctctgtttttgattattttcatcaaattgcttgttaattatatattattgaacttaatacattgatataagagtattttagcagtttgtagatttcgaaattatctttgggtggttaagacatctgtttaatgaaatttattttcctttaaacatatcatcaaaacaaatttcttgtacttaaactcaaaaattaacaaatgaacatgttgttagcaaaggaagaaataatatgctaaaagtgactcttaa

SEQ ID NO: 243175 - DNA, 610 bp, Cannabis indica
caacaatattagactagaaaactccccaaaacttttttatgtccaacattaatttttttagacttgaaaaaaggacattaaaaggtttttattgtagtagtgtacgttgccccagcgttcttcagtttaaacggcatgactttataacagtagagtcccacgttggttacaaagcttgtatgttcttaatttgggacatacatttttatctggttatatccagagtatgcatccataaatgacataagctcgtgctcaatagttgcatccactaactggtcgatcctgggaagtggaaaacaatctttagggcatgccttattcagatcggagaagtcaatacaagttctcaaagtttctttgggcttcgggacgagaacaggattggctatccacgagggatagaacacctcgtgtataaagttgtttgctaacaacttgtcaacctcctgttttagtgcctcttgcctctcagaatccaaggggctccttttctgtctttttggttggtttttggatcaacattcaagtgatggcagataatattatgatcgatccctatcatatctccatgggtccaggcaaactaatcttggttcgccttcaaaaa

SEQ ID NO: 243176 - DNA, 648 bp, Cannabis indica
ctcgtaagattaatagttttccattaatgatccagggtctattacggaggatggccattcggtcttctggtttcttgaaaaaaataccccatacacccggtttaaaggttttgaatttccaatatcccttgagcttccatatctgactaaggatttccctaagtctcgactttgacactccttttcctccaaagaaactggctaaaacaccagtatcgacaacctctgctgtaagttcaaagtctggctccagctctagtgtcatggactctagaaagttacttctcaatacttcgatatcctcatttgtttttcctggattattgcacacaggggacaccaccaacctttcttctgcttcatttattgattcttccataatgacttcattcgattgtggtggttggtggttcagttctggtgcattaacttctggggtcccattgctttgatcattatcatccactgtaataacttcagggggcccattagcttgaacagtgtcttcttgagtagcctcttgtgggttaaccatggtatccccttctcaccaaacaccaaggacaaaccttagctttactgagttgaaaaagggaaaagggctatgaaacaaaacaataaacgatagagtctgaatagaaaggggga

SEQ ID NO: 243177 - DNA, 857 bp, Cannabis indica
tttcttgaggtggattaaaccaccatctttcaagtttttgggttctttcttagagtgttggttgatgtctctaaattatcacgaggggtatcttggttcactttgaaagcattcatacgaaaaatggttgaattttaagtatgagaacatgcctattatatgttttcattgtggaatgtttgaccacactctcactaagtgtgttccatatctaaaaaaatgtgatgagcttacttatcctcctcctcttcattataggatctcccttaaagctcatgcttaatccaatttcaagaaaacccttttgatctccctaactcaattccttttgaggaaatatatttgcctgttgtgaacattgaccaaagattacctattatagttaatcaatttcttaccacaagggacaatggagctggcccttctatctctatttctgctagtagaggtactgaaggaagctcttagtgttttatgtaagggcttagttcctctattgatgcgagtcgtgctttgagtatgcaaactgttactcatagccttgttgccagttttttcaagtatggtgaggttcctgttagggttaattgtgagaatcttgaagctgtttctcttactgtggttgtggttgtggttgtggctatccattcttgtagtggtgataatcctgtcaacattaatcacattgctaggacttctgagaagtctgaaggcaaagttgtttctggggctaagagggtttcttttattcctcaatctattgttgtaatgaccgctttagtaatttgaattagtaaagacaattagcactaatttttattattctattattatttgtgaattaatttaattgtgga

SEQ ID NO: 243178 - DNA, 2013 bp, Cannabis indica
ttgtgagtagatataagatcttggtaaaataatttcaacaaaaaggataaataccaatttgcatcctatattttacaaaatttattgattgaacaccttattttattaaatgataaattagactttatatttttaaaataatactaaatgatatccagcattaattttttgaacattacctcacatgcctaagtataaatcacatacccaatcattttctctcccctcttttaattatatcaatcttatttgtcttttagtattgcttcacacataatgacataggagattttatacctttttttttttactctttttatagaaattaggttatttatctattatactaaaatgaaatactgtatattgatagaaatattacatcttatttttttccaataaaaaaattccttcctatgatatcctaataaacttatggtaaataatttaggatttatatttatattttgagttaatcaagtaacaagtgagattatgattctataatctagttcaacatcaatgttaaatttactataagtgagtaaataagcgtaattgataaattttagagatttacatagcatgtgtgaatgcaatatgagctatatgaggaataaaaatattttcaagtttggcgaccttggagacttgattgcgagccggaaatagcataaaagatttaattgatagaattattgtgaatattgtgataatttcataatatagattggggtaattaagaatatgcagaatttaatttaacaccctaaagttaaaaaaaaaaccaagtaactaaaaaacaatagaataaccattaattaaaagttattattaatatataatgttattattattattattaatattaatacattattatattatattattaaattattattaccaatatattattattattattattattattattattattattattattattattattaacgttaacagtacatatataagttataagttacaaacagaaaacatacaaaacaaaacgaaactctcgttctccgacgaaatccttatttccctttctttattttcttcaaattctcaaaacatagcgatctaagattcgatagtagcagaatagtgaattctctgagcaaaaaaaacttaaagtaaggtttaatttcgttttaaatttaaaacaattagtttcgtataggggttttacgaattagagtagtaattaaggttttgaccttataggattgttcttgggtagtcatgagacttgttttgatattttcttgctgaaattgaggtgattttgggttaaaattgagtttagaactttatatagcttaagtctgaacattggtggcattttgtgaattaagggctcgaatttagtttctattgcgtaagtatggtagtatgtatggtatatatgtgccatatgaagtttggagtggtttggataggcttcggtagcatttcagtgagcgcataaacttggaaattcacattttttgcccccgaccaaccggtcaaccagttgggaactggtcaaccagttctgggtagtctcgagaactggagaatcgtatttttgccataactttgcactcaggtgtccgttttggaccttctatataccgttttgaatcttacgacgagctctaccatatggtatatgttttaaaaatataagttttattttagtgaacatttaactttgggtttggtaggaattcctaggtattcatttacaattattaagtagtattttggggtaaacacttattagtttattattgttatggcatagggcctagatcattgatcgtactccaagtaggtcggccaacatacctgaactagaacttaatgtaagaaaagtataatgtgccacatggcatgagaagttctaaatttatcgattgtctgattaggcaatgagaatgtgataatatatgagctcacctaattaggtgatacaatatacatggcgacgtactgggtgtaggtacgggcgtcagt

SEQ ID NO: 243179 - DNA, 1021 bp, Cannabis indica
aaaaaaaaaaataataaaaaaacgtaaaaataaaaaaataaataaaaaatatcttatacatggtaattctcctattttactacgttaaattaatattatttgatcaatcaatcacttaatttaaaatacatattaaaaattagtatattttttttttaggttttaattttttatttttacattttaaaataattttgtttttatatttttacgaaaatttatataaaaattcatatagagactaatggatcaacttaaatcgtaatcaaaattcacatagcaactgacatagaaccggaacaatccaaattgtaaatttaaaaaaagaattaaaaaataatatataaaataatttcttttcacgaaatcttatacatgacataatttttttcagtgtgcatgataaaagtaaaaagtctctaaattatatatataattgaaaaaaacaaaaacaacaaccatatatatctttaattaactatgatgatataataatttatttgttatatgagaatgagatcacatgcatgcatgttctgatttttatttttcattttgaattaataataatgatcatgtttttcgattttgaatattgcatgtgaatacttgttttaaatggtttggtaagcatgtgaaatctattagaagcatatatatagggttagatattcctacccataacaactacccacaaataagtgacaaatattattaaatagaaaaaaaattcagtcaaacccctaatgagtaggaaatagagatctacatttcaatattaattaaactaatttttggtacattttattttctctagtccaagatataaaaaaaaaagtaataaggtagattgccctatactacatattccttttaattaatacctttttccttttctaatttaatacttatggaaatttaatacatttcttctatccattggacattcaattttctagggagaaattataacctaattttttttatatagataggaatttatgtaaaatctctacacaaa

SEQ ID NO: 243180 - DNA, 1796 bp, Cannabis indica
agcacgacacgaaaaatactgggtctacaggccatgccgggcctaccctttaaaaatattagcacaatacagcacgactcatattttatagtagcacggcaccgcatgacccgtttttaaaaaagcacgaataaatacgagtcgggccagcacgacacagaagaacttataacactagtgtaccttaagaacatctccaacgaagttgcttagtggagtgatcttatcacatgtacaatttggtccaagttcctataatatcaatttcatcaatatagtgttgctcaaataagaccacacccatgtgacatttcttttttaaaaatatatttatatatataactttttacaaaaaaaaaaaaataattaatttaattgtgaaagttttacatgaagaatacaaaatccaacttttattacaattttaccttcacaatggtaaaaaacttttatacccattttattgttttatttaccaaaatacatgttacacacataaatcataaaagtattgatgacattgttctacaatgacaagaacaatgaaactcaactatttttttcctctcttttctataccttttttctagtttatttcaattcttcttttcatttttttattttcagtttcattttaaatcatttcaccacgatcaaaataatattcctctccaaaaaattgctcccctgtgatctctaacttccattgaagctccagcccacgttttttcattcaatttttttcctatcaaattctatataattaatagttgtcaccatctccatctgtgaaaaaatccactatcaagaagcctatttataaaagttctaaatctatagtaatgggtgtgaaatctttggcaaaaaaaaaaaataaagataaacgggttattgtggaagatgatgactccgacgaaaattttgttgaactagtaacaaaatatgaaggttgtcctttgaagaaaaaagtgaagatgaacgaaggtaataagagttctataccaaaagttaaaaaagggaagaagaatgtcaatgaaattcttaaagtttcgtctcaattttttttctattttttcctaatttaaaaattgtctctgttcattttagtatttttacatgtgcttttgattctaaggatttatatattatatttattttgttgtaatattggtggtaggtttactgatttagaatattgttagatttagattattttttaattttttcgacataaatagttgttcgttgttgtatttttttttctattcatttaagattttattttgtaatgagtaattctattgttttaggtttaggtttggtatggtattatttgttaatagttgtattgtagtttgtttacaacgtatttaccatttacttttattttgatatttttattatttaatttctagaatgggaatacaagtaccctgaatttgatcaccataaatggaaagtggcctggagttgcatgcacttacaatgtcattgagaagcttaatgttactctttcaaaaaatgtcaaggctttgtttcatgctacgaaatttggtaaatttttagacattcttttgtgtaaattctaccttgaagtggttcatgatcttctattaagagaggtgcaatagtccaatgtgaagaaattttgggcaaacattgctagtcactacattcattttagtgttgaatagttcactttgattatgagttttgattgtatgggggattgtaataaaatgaatttcactcaagattcaaactaaattattaacacttgttttggtagtgttaaa

SEQ ID NO: 243181 - DNA, 2161 bp, Cannabis indica
ttctaagttctagtcttccttttggcatttaaagcttcctcccaaggtcaaaaattttgtgtggtgtgtaggacaaaactatcttcctactttgtatcagcttcaatgtaaaagagttaatgttagctctctttgctctgtctataagttggaagaggagacaatcttacatgctttagttacctatccaattgtcaaacatgtgtggaattgatatggctttactagtaaaggaccactctttttaagactagtgtatatcggttttttctagtacatacatgggtggtaagctcttactgtcggttctttactgggcaatttggagcggtcgaaatgatttagtttggtcaaaaagatgttggggtggattgtatagtagtgtaagctaaaaattatcttgatcaatgaacacgtgctcaaagatctcttattaagacattatggtctgatttacagtcgggtgatggtactaagcaatagtcttctccaagcaaaaacaatatcataattaatgtggacactgctttgtttgaaggtggaaacaattatatggtgttgggctacttgcaagagatcgtatcatagtttcttagtggaaggttgtgctgactttttctcagggtcagggttgccactcctgaactagttgaggcaattggagttcgtgaagtattcatgagctagattatggagcataattggcaaagagtgatcattgaaactgattatttaacggtaagttttttgaagttcagtgtgtatgctatctttgtttggacaagtcattaacgattgtaaacaactccttcttgagttgcaaaatgttaatgtgttttttattaaacgatcagctaatatagtagcttataattttgcaagagtttttatattattctctggttgtcatttcggtatgaactttgttctgaccaatttattattatgtttggtaacaaattttaaaggttaacaaaattttatttttcattaaaaaaatatgtatacataggaagataggaacattacactaaaaagtggtggaattcattattcagttaccttcatatcatatattacatgtatcatttcttatggatatagccagaaattctgagcactgtatcaatggatagagtaggcttaaatgggaaaaaaatcttataaaagtactgtactaattaatgagaaagaatctctatcctttttattttttattttttggaagggtagttgagtgggttgagatctctgttattgccatattggaatacttgataaggctaatactaataatagattagattagttttatcatctaatattatacggctgttggagtcaccaccagcaacatttgagcctgcaaaatattatgctatcctactaatattacacttaataatatattaaccagttaattaaaggcctaatatacgtggtaataaacgagaggctatagtatgtaccctcctcgttaaagtatttcctttactttaaaaagcatttatttctacaaacagtacaaatgaagaaaaagtagttaaccttcttaattgttaaaaaaaaaatcagaaaactaatttttctgacaaaaacaaatgaagaagaaaaagtatagtatattaattataatgtacaggtgcatccttattccatatcaagaaaagaaaagagaaaaaaaaaaagttttttgtcgtaagaaatggtcatatatttttctactttttcgatggagagaactgtgtatataataatattatttttttttttatcgtcgagtttgggtgtacatcatatagcgataatagaaaagttttctactaaactagttcacaatcaatttttatatgatattaataatatatgctatatttaagttactttaaaaaatttacaaaattctaaataatttagaatacaaagtcactacaaaaaatttaagttttagtcacaacaaaacttatgactaaagtaaaacaattgtgattaattataaatcactattcctatgttgtgactgaaaaatccatgactaaaagtattagtcataaatattacaatttgttgtgactaaatgtgttgttagtcacaatacttgttgtgacactaaaattaaattagtgacaacttgtagctaaatactatattttagtcacaa

SEQ ID NO: 243182 - DNA, 1561 bp, Cannabis indica
agttacatgatcaatttgctcttaaaaagctcggttctgtcaactatttttttgggctttgaggttcatcgatccaatgattctatcaccttgactcaacaaaaatatacaagggatctcctcaccaacactcagttactggattccaagccccaaaccactcctatgtgctttacaactaagttgtcttctacagtcggcaccctaatgcaaaatccaactacctatagaagtgtgataggggccttgcaatatctcactatgtctcgacctgacattgcctttcctataaacaagctgagtcaattaatgcaatcctcaacttctgaacattggagtgcttgcaaacgcattcttagatatctagcaggtacattggacagggggttaacctttaaagctgcaataagacttgatttacagggtttcactgatgccgattgggctggatgttacgatgacaggaaatctacttcgggctactgcattttccttgggggcaatctcatcagctggtgttcaaagaaacaaactgttgtagcaaggtcaagtacagagtctgagtatcgtgcacttgccttggccacaactgaaataatatggatacagtccctgctatctgaattacaaattgcagttcttacttgccccattctatggtgtgataatttaagagcagggtccttagcttccaaccctgtttttcatgaccgcacaaaacatatcgaaattgaccttcatttcgttcgagacaaagtcttagctcaagaacttgatattcgatatgtggattctcaacatcaactcgctaatctcttcacgaagcctctggcagcatctccttttctgtttttacgagacaaattaacacttggtcttagccagtgtcatttggggggggggggtagttggagatgtaggtggttagtcggttagttagtttatactgttcataactaactatttttctgttagttagttagttatctttttactgttgcatttgtacaactggtttggatatcattgtaactaacctcttctatcaatccacctatataaataaagagatcaacaaggccaatcgattgattgagctttacttttcattccatctgttttgtacttctttctatttccatctcacctttctctcagctcaagaactctagttttcagagttccttcagttttaaaaaatatttttttttttggaaactgtcactaataaatttaaataactgttttaaattgttgggaaaatttgagtattctcgatgatttagaacactcactatagaaattcgtgatagttataagttaaaacacgattttttagtcggagttatacctgacagtttaaaacgtcaggtatatccccgactaaatataatcctcttcacttcctttctttcctcatttcagctaccctatctctctctcaaaccctagcagcgcacctaaactctaaaacccacccactcgatctccatctctctcgcctccacccacccacgaagcccactctctctctctctctctctctctctctctctctctc

SEQ ID NO: 243183 - DNA, 732 bp, Cannabis indica
ctcctcctccaacaatggaaaatagtattatgaagatatatttatgttataactagagagctggagaagaagatcgattttctggtgatcatgtacttgttgataattaatgtttaatctagtttatattttttattttagttttttcaaattatttgttatatttttaaattattgttaacatgtaatgtagatcattctttgtaatcttgaaagtgtgtagatttcttattgttgtgttttttttaagtgaacacaaaaatggatcttttaagttttatccacaaattaatcaacatatatataggattttttttaagtgataacaccacttttgctactcataagagcattttatttcagttttaattggtttaaaatgagagtgtatagaattaaaatgagttgtgaaacatgtaattaattattttatttttatttttaattaaattttaaaacagttacccttttttttataagttaaaacaattattcataaatcaaaataggatcattttgccaagtttctaagaaaagcaattattattttcttcttcttcttcctttattttatcatttccttaaatttagatattgtatatgtataaaataattttctagattttctctagagcatgttggcatgaataaaaaaactaaccaaataaaagatgtgtatactaatcatctaataattttttttcgtacacatttctatttttttttaataga

SEQ ID NO: 243184 - DNA, 504 bp, Cannabis indica
gcttggccagccatattatactatatatacaaaaggcctgtaggccgaacagacaaaagaatttaaaaattttacttcataggattccttagatcttgaagctgagcagatgaatcctgagcggcaacggttgagtcctgagcggtattattctcttgctcctggacggtagaagaatcctctattagagttttttttttttttttgcttttcttcctttcgcaattgtcaagaaagccaccacggagatcgcctttgagatagtcaaaattaccttctggatttgtcttttagaattcataagaaacctccaaggtagttgtttcatactcttcaacctcattccgaagtgtctcccgctcagcaacaaaagactcctgcaaggcagtcttcccccgacagcataacaactacatttaacttattcaaaaattttaaaacccaatctaaacaatctaaaattttcaaatacatcacagattcatactatttctacatacacaa

SEQ ID NO: 243185 - DNA, 1366 bp, Cannabis indica
tgtttcaaaataaatataaattagaggcaaatttgattaatgatataaaagaggcatttttcaacttacctcaaatttttaagggtcttcaaaagttcaaagagcataatacacattaaattttttgggaataaaatttttaattaactatataaaaaagaatttaaatattcaaattttaaagtatatatattgacgttgaccgcggataattaatttaggtgggaataaatatttgagagattattaattattaatttaaaaaagtacgtgcgtgtagtatgagtgaaatcacatgcagtgcatgcacgtgtgtacgtacttgcattttaatactatagtcatcaatatatttcacgagatcgatagaaagaacacacagtccatacattttatcaattcttatctctcatttgtcaattcatacattaatttgtcattttgataaaattataagggggtgtactaatagtaatgtatccctatttatttcggtatcacaaataatttttcagtctaatttatttgtgaagaaattagaagatttatatttttttttatatgtattgtcctcttttatttttattttcttttttaaagtctattattcttacatattttcttaaatattgtactaattttgcctctgtcacttcaatatatattctctatgtgactcacttatgtcaaggtattttgagtacattacataccaaaaaaaattataagtaaatttagttaattgattaataaaagaagtattttttaacttacctctccttttttcatagtcttaggtaggcctggccatttttcaagttaattaagagtcttgagttaaaaaatttaattaggcttttttatttttatatgaaactttttatgtttttttatgtatataatattttgggaatataattggattttttaattcttaataaaatattaatattaaatgtagtattttaagagcagcttcaacacgcgttgttatgcgatggagttggagaggttctgatgagcacctcttgttgctacacagcaacaactagctataatttcgatttttgtttatattttattttctaaaaagaaagtaaaaattaaaattgaaaacaataagggtatgaatttaaaataatgttatattaaataatattgtgttaggtatggtggcaacttttaaagttttagtgtattggagtattattttttttagaagagattgaaattatgtggattagagatgctttaaaaaaataaattacatatattgtttttagaaaataattatgatttttactaaataataataaaaatataaaatatgatattttaaaaagtaaatttgagacatttttattaa

SEQ ID NO: 243186 - DNA, 6441 bp, Cannabis indica
atgtatgtgtgtgtgtgtgtatgtcattgcatgtcttctgatgattttgctaactccattgtccaaagtccaaacactctaaatggtcgactttggtaatagtgtccaaaatctctttctttcatttccttgtttgtttagggaaattatttaacttcgttttgcattgttttctcctttttttcactatcccacattattatttggtatatatatatatattatttttatttatttttcctcatcaaatgctccaagctttttccagattggagattctgattttgacgtttcagagatctgtgatgacatctcaaaatagtaatccgagtgtttgaacacagtgacggttatatgtagttttctttatatatataaatgtatatattattttccaatcctagtcatagcagcttttaataataggtacttccggcactcttgaagtgcttttttctccattatatatatactttcctatgtatatgaagaaaaatatctatgtattttttaatatatatgttttagtagtcatcatctatttcaatttttgagtatagggatatatatatatgtttcatttgattaatcacctttatactaatggagatactacctattagtgcatgtatatatatctaggttaattgaaaatcattcttgaaaagtgtccaattgtagtctaactcttggtataatttcttggattaataaatgtttttaataattattcccttcccttgtaaagaaagaagaaaaaaaaattgggaaattaatatgattgcatttgaaggtatttttgttggatttataaatgtttttaataattattattattccttttcttcataaagaaagagaaaaactaaaaaatattgggaaattaacatgattgcatttgaaggtttccttgtttgtgaagcttaatggaatattcatgtataaaaccatgcataattgcttatatttgtttgatatgaagaattgttattaattaattttatttatgcttatagaatattaggcaccatttattttaaaaatactctataagtatttataatgtgctggctattatttgctttacaattttagatacaacatatatattatgaactgaaattatttgactaatattattataaaagtcttactataactcattccacaaacaaatttgataataaacacatttaatttcatgtaatggtatgagtgacaacactaaaaagattttaaagtgtagtactgtaattaacatataatctttaacctgttaaaatctagtgtttggatattgtaatgatctctttagaaattagaaatatatatcttttgggtaggtgtaaattgtgtggtctcaagttccaatgagcattggaaatggtctagtttgctgacttgatgtcatagagttagattattgatacagccatataatatatctattgctatcatggataataaaatatgtatagatataatccatgctatatataaaagcatttcacttttggtattatttagcttcatcaatactgtgtcatcaaatataatgtatagctctagaagatttggtattagaatcttactaattatcacatgagagctatataaaaatgatcatttttgtgctttgtgtcctgctgtttatttggtccttcaatatccattttcttgctttgattgagctcttattaattaatatctttatccaattcgatccatagttatctccactgaaatgaaataaaagaaaaattaaattacttaattttatagtatagtgttacaaattaatgacatttgtttataatactaattaataagtacatcttcttttgctggtttgtttgcttttttagaaagcatttgtattctattagaatatataaggctgctattgtttccattttgcacaagtgtggagggtttgcatgttgtgcaaatattaaaattggttttgcagctttttagtttcgaagtagtgatgattagcttttatcaatttaaattagtatatagatttgttaaggatattatatatgtgtaatcactgtaattatcatgttggttaaggttggcaactaataatttttttttgtgttggaagtacataataccttttcaaccagatgtgctttgcttacatgtatatgctttctaactggcattgtttgattcttgttttccttgatcttctctagtaaatcacttctattaaaatagatttgtggccaatccaaaaaaaaaaaaaaagaaagaataagaaaaccaataatccttaattatatatatttatataaaaaattgttaagtagtttcaaaagatttttcacaaattttcatctgtttagataattaaggtgttaaaattatgattcaaataattaattacatgcataatatttgttttaatacttacatgtgtgttgattcgctattttaatattttaaattatatacaagaaacgtcacttttgccaatatatttttgtgctgacaaaagtttagtattgcatttggtaaaatggaatttacttcagtagtgttggttaatcaatattggtattagaacttttgccagcacaaaatgaaaagtactagcaaaaatgacttttcttagcgtataaatgtactggtaaaagttagattttagtcactgcaaatgtgtgcaggtaaaactttgacctttttgtcagcatagtaacttttactagcgcagtagcgaacatgcgctagtaaaaatgatatttcttgtagtgaattttattatgaatttcttatagtttgacaagttcagtgtaattatatatattacatattttaagtaacaaaaatacttattagtagtagtattacagtgatactatactacatgtataaaaatatatggtaaattagtatatttataagcgtggcatatattcacgtggtttgatggtggtgtttgaagatttggatttggtatttgcgtaaacattgttttgttatatatatatagcctaattaattagctgattaattagcgtatctttgaggagtagtagtactgctagtgttattgtctctgcatattctcttggtctctctacttaataataatgcaatcttaatcccttcttttcagtccattgtctccctcttttgtacttatttattctaatgctttttcttattctatataattccattaaacaaattggttttctctatatgggaaaagttatctttatattcccatataatatcttccattatcaatttatatttgattccttcgtatcttgtacatctatatagtttatgccaaagaatcctggttttggataaaattttgtttaagcctcaacttcatgcatgttaatttgtaataggtaacttctcttaattttacacatatttatattcctttcagctaaatatgataaggaaaaactgttgttatggcttcttagtgtgatctgttttaatttctctcataaaaatacatgatttcaattcatgtcccactttttatttgcaaaaaatacaaacatgcatatatgtatatatatatatgcaagattgcacgtgcaaatcaccttgtttgaacattttttagtattgaaaatttgttataagttgttaactaaattgttttgtttgtgctgactatatacgttgacctatcgacccttaaattgttatcatgtttgattttatttaaaagtgtgacattatacgtttaattttatgtgatgtgaatcatggagtattgatctaataagagcacaatacctaactagctagctattagtacagaaattagtgaaatgctaactgtattttggtgtcttaaattgaaatttctgttaaaaagtagtgtacatgtcaattaatttaatttatattaaatattttaattatttttattgactcgttaaacacaattactttttagatcattaaattatagtattaaggggtttaaagtgtcaaatagtaatctttatgatattatttacgttgcaaacttttgtgtgtggtggagtgagtcatgtagagttaactcaaggtggttaaggtggttgtgtgtgtatttttttttcttcagaagaaaaataatgaaaaagaaaagagtcccgggtagagcgggtggtggtgggaggtgagattgtttgatgtctcatctctcacatggactcccgcagttttaggtgtggagcagctttttcagtgcagtgtattgtaagtatatgtgtgtctcttctataataacatcccaacctaattaatattattaatattatattaataataaccctataaatattattaatttcgaaaaaagaaaaaactccacttgactagttgtggtttttattaaacacacagacacaaaacatatggggtctgatctctgagtagagagactgtgtatctgtgtgtgtgtgtgtgaactgtggtctctctctctctggtattaagtagtgcttgtcatattttccatgggatcgatcagttctctgtcgtgggtctccatgcttcatcattgcgtgcacgtgtctgttacctatctcccgttttactctctatatgggtcccaatttcttacataattctactcatttgattaaattttcaaaaccatttcatcaattttagtgttgcaaaccaatttatttatttttaatttggggaatcctatatctctcttaaatagatgcctaaacaagatttactcatttttgttttctttgtcaaatagagataattaaaaaaaataaaataaataaaaggggaagagaggggcggtgggggacgtgcctggattcacgccaagtcttaatcactttctgtctgagatatgagttaattatatgatttgatttgattggtttgcccgtaccgtcttgtcgattctgaccaaaagaaaagaaaaaaaaaagagtgtcactctcaatactctgacttgacaaacgacgggaccagacactgagagtgagtgactcactgagtttagtaagtgtgtgtctaaattctcatctcttatgaatcaatcgttctaaagtgggcccatattttttctataattgggccccggaccgggcctagcatgggccttttatagctttgtgcgcccacgaatggcattactagtagtactactactactactacttctactgcctttgtctgccatttcagtttgctttattttctaatgtattctcttatgagtacgaactatcaattaccactaacaaagctaatgatgcttgtttttaagttttctttatacgaggaatcttatagctagatcatatctttttcttaattgtatataatactactcatgtttggattgtgatgaattaagtatgatgacttactccttatcaattagttttaagatagaaccatgattctcaacatggtattagaattgctttcgatccacacctattagatagttagctagctgcaaacgagcaaaatggtactcccagttgcgagctaaaggaatatataaaaaatatagactgctctactctttttatttgtggtcacttatcttttaataataatatattatgctctatatgatgggtttaaagtttgaaaccattttcttttgatttgttaacacgttaatttattcattatatcattgatgtttgttgtacctgatcttcatcatttcatttccatgaaacattggagaatggggtgaccccatatttagttgttgtacgtaatatctatataattcttttaatttagaattttgtgcttctattttataataatatatatatatatacatatacagatgaaggtggtgcatcttcggaagaagagttaagtggaggagaggtagaaggaggaggacaacaacaacaacaagagtgtcagcttagaagtgaagatcgtgatcttaaagataagcttttaagaaggtatggcagccatatcggtacgttaaaactcattttctaagaaaaaaaagaaaggaaagctaccaagagaagctaggcaaacccttcttgactggtggaatcttcactataaatggccttatccaacggtacgtacgtatacgtaacctaatcaaatttattaccttatcttatattattttgcatggtttacatataatcatgtagaattaatttttttttaatataattattcatgataaataggaagcggataagaatgcacttgctgagacaacaggattagatcagaagcaaatcaacaactggtttatcaaccaaagaaagcgccattggaagccttcggagaacatgcaattcgcggtcatggataatctttctggacaattttacagggatgactgatctgatgatcgatctgaggtccaatatttttgtacattcttatcttatttgaactttatattagacctctctcatccccattctatatctatat

SEQ ID NO: 243187 - DNA, 554 bp, Cannabis indica
gcaaaatctttatatgtcacttataaaacgacgaaaatacccctttttgtagtagtgctagctgcaatgaattcataatttcaagctctaacaaagcaaagaacctgggcactagttccctatgaaaagcatatgcaagtcattaccaacaaatggatccacagaattaagctcaacaaagatggttctttaaaataaattcaagtctcggctggttgcaaggggctcttcttcagacacctgggatcgactacgaagatacccttagtcctgtagtaaaaccggtcacagtcaaaatcgtgttgtctttagcagtcaatgccaagtggtttgtcaagcaactcgacgtgagtaatgcatttctaaaatggagatctcaatgaagtggtatatatgcagcagccactaggttttgtcgacacatccaaacctactcatgtgtgtcttttaacacaaagccatttatggcttgaaacaggcccccagggcctggaatgagaagcttagacagacactattacgaatggggttttcatggctcgaaatcagattca

SEQ ID NO: 243188 - DNA, 1327 bp, Cannabis indica
ttctcccgagacgagagactcccaaagtggttatgcttcgagaataattataatgtgtacggcagtggacgattgtcggtggagacggcagatccaacggcggttaagacatcaacgaggccggtgaagctggtgggttcgagcgtgaccgttgaatgcgtgactgacacgtggatggacgggattgataagtttgggttaggatgtacggacgatgagaggagaatgaatcttgcgaaggacacgtgtccggggtttgtttcggacagttacggaagggtgacgtggacaaacggggcctacaagaaattagtgggccaagggtgcgaggatcacgatcttcaccaccacgattgtggcggtggtgatgatcatgatcagatgatgatgatggtttggttagttatgaaggagaggttgcctgtgacggtgctaacgtgcccggcgttcacatgcagagtgagactacagtgctacaccaatgggaataaagagatcaaaagctccctaacactgccttgtgatgtttggagaatggattgtggtggttttgcatggcgattggacgttaacgctgctctctgcttgggccggtaaccttaccaaaacccctttacccatacccacacacatataaatatctatgccaagttatgaaatgtttaattaattaagcttaattattattagctataaatagccttttttttgttttattttatgttatttttcgaaagaaaaataaaatgtaaatagttttgtgatcgatgatatcgatcaagagctagtagtactgtagcatcacgttgtggttgtacactctcaaatattcatcacacatcagagttgtgggggctgatttgtgttattataattaaatatatactagtgatgatgatgatgatgatatatatagagagaagagaaaaagaaccaacttaatttaatgtacgtactatcactactgttttgttttgttattaatataatcaaaattttgtacaaactagctgttggtgacagtatatatgatgatgtgtaaggatcttttacttgattttttttttatgggtgagagggagtgagcttaaatggaaaaaaaaaggtggatatgccgtacgtaactgaaaaagctggaaagggttaattagagaagaggagaaagagaggttggtactgttatagtactgtaggtttagtttggtggagaagaaagagaggacaggtggaaggatgagaaggagtgaatgaaggaaatatctaatcagagggatctgtttgatctttcttttgggcaaatcaaagaattaaggtttttattatgtat

SEQ ID NO: 243189 - DNA, 1459 bp, Cannabis indica
ttttcactttttttttttctcaatctcaccggaattaattgttattttatgattgttatgggtgttcctatagtagttctgttcgtgggtgtagaaaatggaagcctcattttttattttttggtgtttacagtataaaagaaaaaaaaaattgaccaagacagtataaaaataatttctaccgtgtgatagtatttttgtaaagattggaccaaaaatcagtaattttgtaactctccctttaataacgttgtatgtttaggaaacaaaaatactaatcacttctcaaaataattaagcttaaatatttgaagagtcacttcgggcgtgcaaccctactagtatcttacaaaaggacaatttaagtgtagttatttatcaaagtccaaattttatttccaagcagggggctttgatataatactaatcctagtccaatgagtccaaatgaacattaaaccatggggcaacctagccaattagatatcatatctttgttggtcaggcttgtttaggaacagggactataccccattttctcctcacctcctccaaatcctcatgaaagtgctgctcataatacacacacataagatcggttgcctgagcaccagcccgaatggcccaaggaaagtagtgctggaagaacagcttcctttgcttctcattgaatctagcagtacccccaatgactgacattagacacattggtaggcacatttgctcaaactcaatcaccttgagggctgactcaccaatcaaattggttggaagatcaaaaagggtgtgccagaagtcatgcacctctcgagctcgcatggcaacatatgcaagctcatctgtctccatgaaccgcactggtggtctatcatcaggggagaagttccttgatcccatgaattttgcataggctgcaccaaatgtgttttctgggagatcccaagcgtgccccacttttgaagatatgactcgcggttggtcgagaagtattgcctgtaaaaaaacgacaagcattatctaaatctgcagtaaaacagataagaagagaaaattagaaaaaacttgaagaaaacaaaatcctataagcaagatatttcagtgtatccactttactattgcaaaaatttctcagcaatgaagggatcttatattgaaaaccaaaggataaaactctcattgtcaaaataagatcaaattatggacaaatttggaaaaagattagtttttactgtgaaaacaaattattgccaactctatgacaccactctgacaagttttctcagcattgcccttaattttaacttagaagaatgggattatttcagaaatacccaaaaacaacaaaaaatttacgttttttcagaatactattttttttcttacaggtttctaagttgttctaaaaaataaattttcacattgtgaaaatataatataatgttgcggcaacatgcaaaca

SEQ ID NO: 243190 - DNA, 1041 bp, Cannabis indica
atatatatatataaaatttaataaatattacttaatatataattttttattattgttaactataaatatattttaaatgacatagataaaaatataaataaattgatgtatggcgtaatataaatttatgagataaaatagagttttgattagatatttttaatgatagagtagagaaattttagggaatgctcatctatatttatttgtatgaaaaagggtagagttgtaaaaacgtgtgtgtcgtgctacccaacttatattttttggctttttaaaatataggttgttgcgtgctgggttaataaaaaaatataggtcgtattatgttgtgctaataaaaaaatatgagtcgtgtcgttcgtattgtactcgaattcgtgtcgtattttattcacatcgactcgttttcttatatgggctcaaattcatgctttatatttttacatcatcattacaattaatgagctaattacttaaatataagcatattttatagttttaattacttttatatcttttttcaataatagttaacacacattcttataaaaaaaaataattataattattagaatttgaatattactattgttgaccgaggttttcggcaactattaaaatatgattataataaagagctgtaagaaagtgagatgaagattttttacgtggttggggcgttaatgagccttagtccacgagcctctgttattaatggatgtatttaatacagattctacacttgagagaatgtctttctcttaaatacagagaatgttcttggtgagtattttctcttcttgctcttttgcaaaccaagattctcgaccccattaaatgagctttgagggggtatttatagtgttttggtggggtaatccctagaattgttcttacacatgtgtctgtaagtatccataaagttgggcatttccgatgaatataccatgggtgatgcatggtcaaatccctaggtgctgtagggcttttatgaagaatgtcctttttgccttgtgattgacgtgactcttcgcatag

SEQ ID NO: 243191 - DNA, 723 bp, Cannabis indica
ttttatactttaaaataattttcgtaaattcacatatcaactcaaaccattttttacgctgcagttttagaaaacacttggaggactatagagactaacaagtcgaatagtatagaatagctaggcgtcgcgtcacctcttttcattatatttattcataataataataataataataataataataatttatagattaatatttgctaggtggttcaagaaaatattacaccacttattaaaattactagttaggacactcgtgctacgcacgtgagacataattacttttttcgaaaacttaattattttgaaggaaagtacattattaatattattaatagaatattttattaaatcaaaataatgaaaattaaaaatacaatgctatctaattcaaaaaaagcaacaaagagtgtgactttcctaaaagaaaaacatattacttgttataaaaacaaaaaaaaaaatattagaaaaaaattaacttgacatatttttacatttagttacatacacatttaataactaagattctctagtctctatagggcccgtttggtacgcaggattgaactggattggactgaaaaggattggactggactggacaagattggattatgctaaaagtaatcctgtgtttggtttaagaatggactggactattttatttatttccttttgtaaaaaaaaaaaaaacttaaattaaaataaaattat

SEQ ID NO: 243192 - DNA, 2790 bp, Cannabis indica
gcctcagatagttgcgttgcatgcctaccctccgccgaggattgtgtcttcaattccggatgcactgcgttataatgctgattatgattttggcaacaagcccaatgtccgtggaaccaaaggtaccctacctagctatatccacccatcccttcccctacctaattgacactacccctaacctctaccccttaattacttgcttatttaacaacacatataaacccacactataatatgttatgattcagtttttgaggtgattaatgaaattatatttcaaaacaaatttaatacataaatgtcacccaattctcaattttcatgaggagacatgaaaatttgagagtgcaattaatagagtacctcaattacctcacattaaatagttgctagctacagtgtaattgactagttaaacaaacccatcaagccatttctaattacaagataacttttcaaacacatccttaaagttggagcttacttctaataatttaataattttttttttgaaaaactaataatttaataattaaatagtgctgcacattattcccacctcatgcggtttgcacattgaaagtgttttatacaaatagtcatacttccgtacctatataggtaccgtacaacatagaatgatctctttcataaccaaggccagggagatataatttgagatgggttgtgtttgaaaagtccatgtaatattgccaaaactatttaatgcaattgtgttgacatgaattaatgcattattgtgaaacttgttttccaacttttaggccattttattcaatcgaaccaaccaaaaccaagccagatatgatttttttttttgtcttcttgaaaatagtgtatccttctaattcaattggtttgtgtaaatgttattgtgtatatttttagtccaaattgtcttatatattgttggcttgatcgtatattaattacctggatgttcaattaatacttgagaaattctattgacgtacgctacatatgttcttgtgagttggcagattcgcccctttaaattaggtacataattaatgtttaacactgacacaacaaccaattagtttcaaaacttttttcttacttattattaatattaaaaatattggggatcaaaattatcatatattgtattaattaattaatcaacaacaccatagtagcatcaaagaataaatattctaaatttttggagttcaaccactcaacacttgaaaaggcaacagaaggctttaatgatgcccaataagcagttttaggacccgtggtacttattaagtggcattgtattatattattaaattaaattatacatatattttttttaaaattatgttagattttaatttatactaaaatatatatattttatgtctatacaaattaataccatacttaaattaaaagtatgatataaaatataatttaatacctcaaaatatgcacacaaaatgataatgggaaatgatagtattttaaccaatcatatttatttaaactttacgtttgggtgcacattgctctaaattataacatgcatcgtttgtaaaagcgtgacaatgtgaccagtgtctatgtgtatatatgttcaataaataaatatttgattatttatacttaatcatagagttattactttcttaatttatatgcctgtgatcaatatatatttgtagggaactctattgctgacggtagagaaattgcagtaaagcgtttatttgcaactgggaaaattcaagcagaggaaatatgcaacgaaattgatatgtagtgcacaacacaaaaggttgatgtttgtagctttggagttaatgttggagttagttagtggtgtgaggaacaacaaatttagatcttgacacttttgaaactctatatataaccgtcttaacgtcctaacatggcaatgaggaccaaagtaattaattcaaatgcttaaacaaatgattttgaattgccaacaccacaaagcctcctttcattgatgaaaatttggagttatatcttcctcatttgattcttgtcgatggtaaccttcttgtatacccgacttatatatgttcaccccatattgagagagattctaatccccatatttcttttctttctttcttttttcaattttaatcttttgtttgtttttacttatgttcataaaaacacatatatagacaggatgtgccataacttttcaccacaagagttttctttttccctttatatctatatatatttatcatttagtagccgagatttttgaatttttttgatggaatcccattttctttttggactaatttattaacttttgagatttgcaatctttagagaatccataaaccaagaaaatgcaagtatatatgtaaaatatacgcaaattgtgcaagaattttgtgatcacattttcggtttttgtctgagagatgtggaaaaaattaaaaagaagaggcaacttatttgactttattaaaaaatgtcagattgttcatgatctcatgggtcatctgtgtaatcattctactttggtagacttcctatacctttttacttttttcccctctctttctattcatgagttgatttgtgggatagtattctacgcgctccaatcatgagtgctttgctctctaatattggtaatcaaacttcctttcataaaaagcaaaatatagttacaaaaactcctttttttttcaagctttaaaacttgtactttgatcttaattctttatggttaatcctaatttactttctaatataaagtaa

SEQ ID NO: 243193 - DNA, 670 bp, Cannabis indica
agcctaattttagtggggttctttagaacatgcaagcaaaatacattggtccaaatggtctttttcctatacaagccaaaaaagaaaggggggctagggtttagggatttagagctatttaatcaagctttgtttggctgaataaatttggagttgtatccaacatctaacaacgctttgttgtaaggtattaatattaaagctaactattttccaaatagtgatgtcttaaaaggttaaatgtggatcacatgcttctttggtttggaggagcttaaattgaggaactaaatattgaattaagaagagagatatatcaatcagatgacagttaatcgattacatggtgaagcttcacatgtggaaattagccagctcatggctgcctactcattccatattggctcatacctaggaaaattccaattgatctaagctgccaaagatgttctaggggagtcaatgaaaatatttttcatgcactttgaagatgcaactcgataaaggaagtacggcgcaagtgtggcttcaaacataaactaaagagagaatgaaaagatgatgtgctagcttttctaatcaatgagagatccatcgaaatacctagaaatgggagcctcctggatgaatcaagatttaccgttaaaaaggtgtaatcctatactgtgtt

SEQ ID NO: 243194 - DNA, 365 bp, Cannabis indica
aaatcagaaacattaagtgttcttgaacataattgtttgaaatacacacacaactcaatgattgtgtctcagatttcttttttcaagtacttaaggatacctgtcggtaataaacgttgtaacaacacatgacaatcatgggattcgagcccaaaaatctgtctggtgtccaagtttaaatttttgtctaagttttctgcaaaaccttctgaaaatcgtatagaatttataaaatctgctactttagtccattcttgaacaataagtgtgtaactagctagagtctttttccacttcccatttcgatcttcatacaaccacaactcacgtcatatttgcaagtcttacaaatccattctcgcctt

SEQ ID NO: 243195 - DNA, 911 bp, Cannabis indica
attttcattagaccctttactctatgtaatcatagagatgtctattctggttttgttcttttcaaccttccttttcttgtgttccttcttccctgaagatttgggggctctaatcaaggtatattttctcttctcagtcgaaattatatgctatttatcatttaaaatctaattgttaaaggataagaactttatattttgttttgtcttttcatgaatttttgctaaatcaattgaaaatcagtgtgtttattattacaaccctttttatagataatgtactacaatatgtttaaacagttgtgatgagtggtaatggagtttaattgtttttcaaaatccttcccttaatttaggggaaaatcttaagattttttcttaacctaattttgggcctatcttggtgggatttcatttaactgttttttctaagcgattacttatgtaattaccatattcacttgttattctttcttccaataaatatgcttcttaccgttttagtcgctttttgtcaattgaattcccctctctcatataaatgatattcattgtatttattttcatttattattatcagttttatttctaataacgataatttcactttttatgctatgctttaaatactattaatgatatttaattccatttgattcaaaaaaaaaatgatatttaattccattagagcattgctattaggcgcaccagtagtgcctagtaccttctcaacatgtcgcgttgcgattggctagcgatatttcctaaaggctattatattaaattatatgagactcgatacttagttagaccaatattgacacataggagggtgctagacatcactggtgccctttagcatttctcattccgttattctaccttactgattccacctctcttatatgatt

SEQ ID NO: 243196 - DNA, 4370 bp, Cannabis indica
atcgggtttctcaattacctaggaagttatactcttaccctgaaattcaatacacattcctttcatttcttcttacagctctatcacattactatttgagtacatcattacacttatcaaataacaccttaatgtattgggattgtgagtgtatagttgctgaatcatacttttgtattttacaggtaattgagtttgtccagttcaaagaacgacttcagcactctaatcagtatttagttgcaagggttgaagcatcaattctgcagctgaagcagaatgcagataatcttgacgaagaagaggtaattacttgctttgcaacttctgccgtagaacatgcctactgaaaacggtctcatttgcatttgtgattgtgtttgtctatcatatttaggttgtgcttgaaagcttgcaatgtggagctcacttccttgaactatctaatgaaattggatccaaatctttgacctttaatgaagatatgcaggcacgcccgtggtgggtgccgacaacagaaaaaaattatcttctaggtcagtattgtctgtgattctaaggttttgtcatagttgaagggatatatatacttttcttttaaaattcaaaattatgtctcagaaaatatttgggattcatcatttcatatttagcatttatgattgggtttttctgtctattacatgtcatttattcaaatagttgaaaagctatcttttgtttcaggcccttacgaaggagtttcatactgtcctaaagaaaactcggtatgcataataattttccgtagttaaagaaatcatattttttgcacatagtttttcgtagcctaaaacttgtttatcacatttcttctcttgctctaggaagttacttttgtcccttttttcttcttatttatttttattaattgcaaattatcttctgtatgctggccccaaaactagactaaagaaagggaaggaagtgttcgaagagctgttgagaggaaatctcttcttcctcggatgatttatctgtctattcgtagtgcttcggcatcactcaaggataatattgaggtcaacggttcaatttccggcagtaaaagctcatcagaactgaagattttgcttgagcgttatgcaaaaatgttgggattttctctcagtgatgcaatagaagttgttttgggtgtttctggtggccaaaagtcttttgaggtatgattgcatcaatcttactttatgcttgtggtacattgtactatcatttaatattatgcaaccggtagagtacaatgtactatcattataaactatatgtgtgtacagagtacagtgtactatcattataaactatatgcatgtagtgtactatcaacaaaatccttccttagtgtactatcagtcaactctgtacttgctgtccaatgtactaccaaatctacaccgatttttttcaagtctgttacagagatgtcaatttcctggtccatgaaactattatttagcttgactagtatccatagtcctgtatgaaatagttagctcatatttaggtgggcattgaaagaagttccttaaattgaggagtgattcaatttatcactttgtttacatttagaagaaatcttgcgaagaaatttgcaatattatgtcaagtctcgctttaccagaatgcagatttatatgatttgttggtgctatatcacccatatcataagaaattgtattatgttaaatgaatttgccatagaaagacttgaatcgggcacatatttggtggcagatattataggcaaatttattttctgtcacatatactaatgactgatacgcttgtcgtatatgatttctgtagaaaaggtagtagttgtctgggtactgggtatagctttcttagttcatttacgctaatcttatgagcttatttttatgtaaagctaacatatttctgtgctgttgtaggtgtttggttcagacttcattgactggttgaactttgctgtatttttgaattcatggaatttgggttcacatgaaattggtcgggctgatggagatggatgccagcctcaaacttggcaaattgtagattccttgctggagaagtatattttggagaatatgaatatgacagaattttccattacttctccttggagtaatctttcagtactgtcacagttggttacagagccgtttgcttggcatagtcttgtgattcaatcctgtgttcgttcatcgcttccatcgggcaaaaagaagaagaaaactggaccttcacatctgccaactctatctcatactcgtgattcggtcctttccttgtgtggtacattagaaaagcttatggaaaggttgagagagcagtttaacaagccagaggatgaaattttggaatctttcctctcttgtttgcagaagaaaggacaggaaggccctggccaggttttccatattctagaaactcttgtctcgtccacaaatgacattgattatggcgatcgaatctcccaagctctcaaatcttggaatcgtgtcgatatggcaaggaaaatagtaacagggaaatgcagggtattggctgaatttcttcgaatttgtgagtcaaaattcaagatgcttcaggcattaaaacgacaattggctcaaatctgaatggttacttgttattttctgtgatagatagtattttatgttcttcggtggcaccacttggtgctttgtttgtttcaacttatgatgctttcatttcatcccatcttaagaataaggtgtccagcacggaagattttgaggagatcgagttagtttttatgcttctgctctacatcgaatcatcattagactgctggtgtgtttcggcatctaaaggttgaatgttggctggtaaattttctgagtttaataaaatacaagctgagttaatttatatttttttgctgttactttttgaggtgtgtgaggtttagtataggctttagtttaagctttgtattatttgagcataaattttgacaaatgtttttatctttttgggttcagtcaattattagatttttcaaataacatttattcactcttccacaaataatgtcacaatcattgggatatgtttggtaaattgtagccctatagcctattagaaattaaattaccttgtttgaaatctttgttttataaatgtctctctgttattttacgaccatcataatcaatgacataaagtataactttgaaatcatatagcattgaaattaagcatgtttagatatctcactagggattttgaccattttgttttctgtatgaaatgttatagatgcataaactagttacattatattacatttaaatgtaaagaaaccatatatgtatgtattgtaatacaacaaagattaatatatatgtattttcaagtaagtcggcaggttacctaattcaaattattaggaattttgaaaaataggctacaataagtacaatgtcaatttataagaagtctacctgactaactgcccagctaaatctgcttaatttataatttattatattggcaatggaaaagagcgagtgaactgctctgcatgttaattagtgccttgattgatgtttagtatataaaaatctaaatgatcattgtttttgttgacaaaccaaaactagctactaattattagtttatgaggcaatgcagttcacaagtttggattagagattcaccaaattacttcttccttttaaaacactagtttgtttcgtgtaggataactaactattttcttttagtattaaattgaaatacttcctataaaaagtacatattggagaggaaggagttcacgtttagtttagtaaaattattattctatatttatagagaaagcaaattaattaataatttaagtaaaactcacgaaattagatctaacactagcatctaatcatttaagttacagtgaagtgcctatcctaatataattgtatttatttgatgagaatatagtggaaatattttattaggcattgcatttttcactaaattatatagtaatatcatgatctaaccaaacaaattaaaaaaataaaaaacaaaaaggaatttgtattgtatataaatatcacttgttgaaacaaattccacttaacttagcggagctgatgagaacttctgttttattttcttacaattaacgttgttaatgcccagatttttttagttactaatattattattttgttcccaatgtcaaaaaaaaaatattattattattttgttgggctttttataacggaacgtggttttatgccttttctcattcgtccaccaaatcaaaccaaaattcaacctcatcctaaccatcccacccatttaataataataat

SEQ ID NO: 243197 - DNA, 1334 bp, Cannabis indica
ccttatatacgcattgagttattactccatatacgttttatagacaacttcacatttggtaacaaagggggaaagaaggcaatacattaccatattagttgtatctctcttttccttctttctttcttttttattttgttttccttctttgctcatagttggttttcaggtattgaatttctttttttaggattttcactcagaagtttgcccgtttgggattgttattattaatagagaaaatttgaaatttgaaatatatatatataaaaaaaaggagaaactgaaaaatgggaaggggtagggttgagttgaagcgcatagagaacaagatcaacaggcaagttactttttccaaaagaagaaatggtttattgaagaaagcccatgagatctcagtcttatgtgatgctgaagttgctgttattgtcttctcccacaaaggaaagctctctgagtactccactgattcttggtactgcaatattttctaatattaatattattaaattctctctctatacatcatatataataaaatccatcttcttcttcttcttcttgtctttttttttaagtaaaaaaatccatgttcttctgcttctttctctttctcgtcttttaatattattattttcctatataatatatatacgtatatggttattttacttataatttttacccatattttttttttaaaaaaaaacatcttccttgtatttgtgcatttcatatatgaaatttttaacatcgatatataggctaatttatttgtagttttacttttattgaacatgaatatatacaaaataaactcatgaataagggtagatgaatgggggattggacttatcatagtggatataataataaaagtgtggtacttttaacctaacactcctctctgccactactccgtcttgtaatctgtggtagtaatttcagtaataacaaatgtttgatttagtagtactagggttatatgtgtatatatatatatatgagatgtagagtagtgtagtatactgtatagtagaagcagtagtagtactttgatcatcactagtcaaagacttgaatctatataaagagtatttttctgaatcagatgtactttgaactgagctaaacttgtgagttttctgatcaattcatctgtatcaaagccctgatcagagatactcacaaaggtcataccctcattctccgtgttctacggagtagtcttgtgtatattactctttaactacacattaaaaactgctgcaagaaaaaaaaaaagaataaactatacattaaacacacaataaaataataataaaaaagatgaa

SEQ ID NO: 243198 - DNA, 721 bp, Cannabis indica
aaaagcaggaatgtaaatactgatgaggttttcctctatgcctctattgttgttgacacgatttggcgggtccggaatgacaagatacacaataacagaatggataatgtgaaacaatgtattgattttatttctcactcttatgcaccattatccctatatcatccccaacccccattgttgtttggaaccctccccctccagactggatcaaaattaattgcgacgttagggttggcggggagcatatgtgcatagcagtggttgttagggatcacctaagcaggttaatttggttgtttacgaccaaaatcgacttctctggtgccctgtgtgaagaagctgctgcggtttgcttggcgcttgaggtcgctaaggagaaaggtcaccattttatcctggtggaaagcgattcaaagatagtgatcaacactctcaacggcttagatcctcgatggggaaattgaaaactactctttattttgtaaaagtatcgctgcttcctttgctttttgtttattttgttattcgactagatcttgtaactttatggcccataatgtggccaattgggcttacccataatttatatggttgtattgatatttctactattcctaagaacatttgttgtagtgaccgcggggtctaatgtcttatgaatgaacgtttcttttacaaaaaaaacctaacttatgtgtatacatcaaagatagttgcc

SEQ ID NO: 243199 - DNA, 1046 bp, Cannabis indica
ttataatttttaaaatttatctttttcaaataaaaaagagcaaaattttgtattagtcaaagtttagggagtaaaaatgctaatttttaacggtaaaagaaacagaacttaacagaagtggcatagttatgtaactattatattatagggagaattttgaacaaaccgtatattggtctttatgtcgttggttatttttatccttacggcatcggctagaacaacatcaatagtaaattttactaatattaacgctgtaaactcccaaaaaatgtctctaaaagcctaaattataatagtgcactcacaatgtgccatgttggacaccttatatgtatagtatataaagcgatcaacaacagccaaatttgtgataagctactaaccttttcaccttcaacaaaagaaacacaatgtggtgtgtatttgatatcccatggtgggttcgggttaaagaatatgggtttggttaaaccgaaataaagaaaaggagagctcgtatgtagagctaggtaagtaggaagggattaaggttttggacgttagctgcagtccctgtctggtacacaatacccatggagagcagtggtcttgtgtagtcactcaaactagctttttattattagacatacaaagtcaaatgccatacagtcatacaccacatgcaccccccggtctgtcccttaattctttcatttatttcacaaatccatcccaatccatgtcatcaacatcttttcttcccaattaatttctgttattatacataacgggatcaatcactttcaaaatagtgctccaaaacattttttatttaacaaccacttcttcttcttttttttccatttcttttttgagagcattacccgttaacatatactataattcattacatattaggttgaatctcaatttcagtaattctcaagttcaatgctaatcagaaacattaaaatttaaagatattggaaatatttatatgtgaataattttattaagctgctcaatgaccagcttgttttattattattattattattattatt

SEQ ID NO: 243200 - DNA, 1146 bp, Cannabis indica
tcatggcccctaccacagcaggacatagtggaagtggctcacgtgaagacgcaggttctgtggaggaacaggcctgcctacagaacaaatgtcttaagctggaatgctcaaggcttgggagtgatcgagcattcctaaacctctccctctagtcaagatgtataagccttctcttcttttaagaatggagtctagattatctaagggttattttgatagtcttaggttgaagttgggtttgtccatggttttgaggtccctcgaatgtggatgtacttattactaattactctattaatcatgttcattgttatgtctctggtatcaatttttttggttttaattttaatgacttttatggggctcctagtcccactattgttataacactcggaaatttcttaatagaataagtcgatcttgtatttctttgtcgtggcttcttatgggtgattttaatagttttttacttgggataataaaaacaatggcaatactagaaatggccctttggaattctttagggacttattgacaaattccatgttgaagctcttaattttcaagggcctaggatgacctggaacaataaccatgctacaggaatgtacatgaaagattagaccggaccttagctaacaaaccctggttgtattcctatcctaatgcttccctcaaatctcgatttctttggctctgaccatagagccattaacatgaaacttgatagttcttccccaaatgttggtaaggttaaaggggacaggagattactcttcgagaatgtttagttgactgaaccaaactgggaagaggttatccttaaggcttagactcatagtgctaactctagttctctcatccaaagcccagcttccatacaggaagcttgtgctgatcacctttcaaactgaaagcataagtgtttctttgggttcccgaagaaaatttccattgcctagaggagcctcgagaatgctagaaattttcttgacaactctgagtaaaaattaggaagttgtagacaaatttagatagtcttgtttctaaggaagaaacctattagaagcaatgctctagagttaattagctccatgtcgggaacaaaacaccaaattcttccataggtttgcttcgaataggaaa

SEQ ID NO: 243201 - DNA, 624 bp, Cannabis indica
aaacataagggggttttgccaccaaaaagaaagataagggggttaagtgtataaaaattaaaacataagggggttttgccaccaaaaataaagataagggggttaagtgtataaaaatcaaaacataagggggttttgccgcaaattgctcaaaaattaatcataatcacatcacactgcacgattcagatttctcggcatttctggcatggccaaccctgagtaattgtgtcttgggtagaaacaaaattattgaactctttttaaaaaaaaatgtggtattttcaaaaattgttaaaaatatatgtaattttaaaattaatttttttattttgggctcttaagctgggtgggtcctaagctgcgcctagcccaccttagctcaccctgaccctactttgtagttagggataagttgaggaatacctcttttttgtatccattaattaaaaatatcttcatattttatttcattaaaatctacccacttttatgagtgggttgcctaatatatccttaccttctactaagtgtagtatatgatttacattaatttaagggatataatagagacatcatctataaatgtgggtttatcttaaaagaatatagaaatgaaagtaa

SEQ ID NO: 243202 - DNA, 972 bp, Cannabis indica
ggcttttcatgtagctagttcaaaagataaaaattccttgcatggatgagaaaataccttataaataggcacccatgttctattggtcggacgaatttgtttctaactaggggttttgtgtgaaatatagcccactaatgggaaaaatacattattttaacattatttggacctattgggcctagctggtgaggcttaattcctaaaagtgaatgttgtatggttggcaatattgttgatagtgacaggtagtgtacaacgtcattgttgaacacagtattgagaaaagatatgtcagagaggtggtccaattctcaaaaaaggtacactcttttcgtcgtaagcctttctacaaatagatgaaggggacatatccttaaatttctcaggatcatgttagaggtgtgactcatcagcaactctcgggactccataccatccctgacacctttctatcttcccttcttctatggcccctaggggcattccatctgatttaggattttttaaagaatcttatcgttcttttaagtatttgtagttgtgtcctagaaccattcattcaatcggattcataagatctgtatttaaccttatacttggcaaaatgtcactacgtttagtcttctagggcttgtttatggggaaattataccaaatagtcccaaattataggacgacgttagtaaatgtccttatttttaaaaaattttaaaaaatgacccttttaggctatttattatttatattgtcatttgccacataaaaaaaaacaaataatttttttcttatttttttagaattagaaacaaattacctaaaaattaaggcatatccaaattagttttgttaaattcttttttatttgaaagttatcgtttttttaaaaaacatttatgagttgttgtgggttgttagtatatagattttgctatacagtatattatgttttgttgtatggtatattattat

SEQ ID NO: 243203 - DNA, 998 bp, Cannabis indica
atgtatattgccttgatgattttttcccatattaatctcctctgattgtggccgtgtatcatgctgctcattaatgctaggatattctctgtgatgctcctccgattgactttgtgctgaaggatttgcttgccgtagccatggtgaggcagtgagaaaattacttctcttggggggtgccttcatgaacaagacgtaaggcttaataatgttctcaggatgtgtgtcatatattgttggacaataattctctgaatgtcccattaagccacaaataaaacaaaacataggaaccttttcgtatttaaaatttgcccagaaaaactcaccatcgcgtttgcggaattttatcctccgtttcaacggattaacaagaggaacaactactctaactcgaagatagtcacgccaaatgccattaaaattgtttggatctgaactgatgaaagttcctatatagttagcagccttgtagatcacctattccgttttgaagccagtatggagatcgtgtatttgcacccacatgtcaagagtttcaatctcaatagttttaggattgtcacctaccttcagttgtttgagaagcaattgctgttagaattattttaccagatcttagatttactaacaagtatgttatttaacatcctaaatatgaaacttctaaaacgatatgaaataaacacatataaagtataagaaaccttacagtggttgcagcggaatataatgtctccttccactcagatctctaacccttgtatcctttctgtagcagagtatcaccaagatctgagtccgaatctccttctcttgaatctggattcttcacagccttacacactatgattgagtactacttgatgtgtgtgggcactcactcattcactataggctcggtttagaagagaggaagagagagagaaggtggtttcggctagggtataggagtggaggctcaaattttatctgaaggaatgagatgcatcatcttt

SEQ ID NO: 243204 - DNA, 397 bp, Cannabis indica
tatatgtcaaagttcaggggacaaaaattctaatgcaaaaaatacaaaccacaaccactgtaagggatttcataagcagcataagaggtagtatatcgtaattagtacatttcaatatcagtctcatataatttaatttaataaataatatgagaaactgctaactaattataagacgttgcatcgatatggtgatggattccgaagtgaaatgaaagaaaataattttatttctattttctttagtttggttacattttaaattatctgaatgtaatcttttactattttggtcaaataactattccgtttcaaaatagaaagaaagaccattacaatgcaagattaaaatttttaatttttttttattgcattttaaatttcatttcattctatt

SEQ ID NO: 243205 - DNA, 2422 bp, Cannabis indica
tggaacgtgttggctccccaaatgtatggctttagtatatatgcgcgtgggaagagtgagacagtgagagtgaagagtgaagaggaagaggtgaccagacggtgactttgttcgcatgtgatgctcttctcttctgttgtaccattcaaagttttccaccctctatcatgaccccccctcccctcctaatcctacgcccatctatatattcaaatttatttatttatttcttttttaaataataataataataataataataatatctaacccaagggcaaaagccaaagggcattgatagccttacctgccctacctcatgaacttactacattatcatctgagaacgacaattatttatggttggactacacattatccaattggatttggcttttgctaatgtcactttatcaccattccacatatcttccatccacttaatgtactttagttaggcctaattgtttgtaacaagagtttgagtagaatctaagttacttttgtaatttttactaatcatatgtgcataaaatatatggtaaaagtattacacgtgttggaagacagtattttaatttagatgagcatacttgattaaaaaattataaccttaagttatataatttaagtgcacgtttcatcactcacatatacatattaatagaatatttattcctaaactaagatggtggtatgtatccaatattatattgtatattatttgtgcaatttaatatttacctacaaatttaatttaataatttatacaaaataattacagaaaaatatattgtacattttctaaaggattgaaaaaaaaaataggctatttttttaatgatcgtgtgcactgtaattttttaagacaattcatatatttttttaaaaattctaaataatgtacattatcaaaaataaagttcaaataattacttaccatgtctataagagaaaaccatcttagttcaaaaaaaaaaaaactaatcacaagtacaacttgcataattataaaaataaaaaagttaaaagatactaatagtgtctaacaccctcttaagtgtcaatattgctattgatctaataaaggatcggatcacatataatttgatataataatttttaagaaatatcactaaccaatcacaaaataatatatttggaggtactaaaaatcattagtgcctaataacattgctcttataaaaaaaaaatagattaaaaactttttctaaacaccaaaacaaaaaaaagatatattgaaacggtccaattaaaaattatactatagaattactcaacaactactaaccactcaaaaaaaaaaaaaaaatcacttcatggtagggtctagctaataccattcctcattaatttttagtaaaatattttcacaaacatgaagccagataatctagtccaatgcagaatgacacaatttatgtactctctatagtctacagctctaccaagtggtttttttatgcagttggatcaatcaaattcttccacataaaatatggacctcatgtactcttctaattaataaatacttttgtttagttttaaaggaatgtttataatattgcttaaataaactcaaaaagtatatgaacttttgtttgttttttaagactgaattaaatattttttaaaaaaatagtgaaaatctcttgggtgaatacaatggtataactttaattttctactaacacatgggtgaagtgaagtatgggtgttattggagaatcagtgaaatgtgggactttcaagttccacctctaaaataataaaaaaacatttattgtttccgatattatttattaaaataatgacatttagaatgttggacataaagaaagattgatcattaaagtgtataaaataatatttgattaattaactttctaagttcaattataatattttagatagtttgcatggaattatgggattcttattctctttgtttgggtcctacttgggatcatcacatccaaaaatagaactactcaacgtttgttccaagacaaaattatccaatttttatcataattttatacatactttttttgcttaaataattttatatttattgtggtgcttctttcagcggccaaatgcccaagacaattttgtccacaaatttagattttttccaaattaaagtgtcatagggtccttttcaatatcaaagccattttcaaggttttgaggtcgttaggttatttattactcttttatattattttattttttggtgattgtaaaatatgcaatttgttgtattattgactttaaaaaatagacctttgttcctgttaatcaacaaagttctatcgaaattaatttttatataaatcaaaatgtcaataaggtatttttgtgtgttaagtatattaaaaatttgttttattatttt

SEQ ID NO: 243206 - DNA, 598 bp, Cannabis indica
gactaagactccaaccccgaaccaaaactcgaacccaatcgcgtccaaggatcccagattcccaacccagaccccagccttaggacccgaacctaaactcggatacgacttaaataaattcaaaaaaataaaaataaaatttacaaaatatacttttcttttttgtttttaaattgaaaaaaaaatgattatagatatcactaattaatttttagtttaataattttttaaacagatataactttttattttttaatgttaaattatacatatggcgctatgtggcaattagttaagtagtcgtatcatcatcattttgtttgtcacgtttgatgaaacttgacagaatgaccaaattaataatactctaaataatttaggaattatttaaaaggggttaaaaaaaattagggacacaataatacatatatcatagtttgagagaaaaaattttaagagtttgtttggctttataacttaaaactcttttctattttttaaaactgaaaaacagtttttaaaaactaataggggccgtttggcaaaattttttaaaaacagtttttttaaaattaagttttaaaaaactggaaaacag

SEQ ID NO: 243207 - DNA, 3089 bp, Cannabis indica
atctcatcagccagatcctttaactcagcaaaaacctgaatttccacatcatagttagaatcataatggcgtacatcagaattttgaaacgagcttggatttgaataaagaaaaatcaaaggtctcccttattagtacttaaaactacattatgtacatttgacaacctcattgaactctcttaatagttatgtgtcatggaagaattttcgtccaatataagtggtttcccatgattagagaatgaaaaagtgtaacaaatatatttttgtgtgtgctaatatgctaattttcatactgcaattaaacgaatttcaccataacaggggtaactagtggtaatataacgatccacgagacattgagagactagttatgtacatattcaaggaagcccattaaacaaaattttataaatcaaatgacaccatttagtcaagttttggaaagtacagcttcattatgatgttcagaagattagaaggtgggttcccttgtaaatattaggaaaattgttcaatagtaactagtaagtaagcaatgttttcagtcatttgtattttctccctctcatatttcttgtccttgtagtaatgcttacgatttaggaggacaattttttcaattaatatttttcgaaaggcacattaacttgtacaagaattgtgcttaccatacgctgctgaggtgtggtccctctttcaactgctacagctggtgtcgttgatggcagaccatgttgcatcaactttacggcgagtgatgggagagttgacaatcccatatataccaccagggttgtatcagggtcagctgcattctccgctacaaagagaggatccgttcctccctttcttgagtgccctgtgagaaacctgacactagttgcaacacctcggtgagtcaatggaattcccagctccgctgctattcctgaagcagcagtgatacctacaaaacaagaaacactatcatcaattaatacaatttcacttaaaaaaatataaatgttgtaactatagaattagcaaacaccattgtaagagaaaaaaacctctataaacacatggaagattatacaagagaaaccaaggaaggaggacgaggcaaatgctagaaaaacacaacgcgtagtgttttgccacatgcaaaagcaaggagatttcctagcatctaatacgaacttttgaaaagattctatatctacgtatcattttgaagttttgcattgcatcttgctacatgaatatacaatttccaaagtgttcctactcattttgaatccttgtcacattactagtctatattttatgcaacttataaaggaagaaacttttccgctgactaagacggtgtattacacaaggatatatgcttaaaaaataactgatataaaatataattcataaacatctaagctaaaacatggtccatagtgattccttgcaatgctctaaacttctacattccaaaagccaataattgtacggaaaatagtgaagaatttatagtgtaagagtttcgactaaacaatgaaatttattgaaattgaacacgactaagtacctggaattactttcacttgaattccttgttgttgcagaaagtccatttcctctccacccctcccaaaaacctaattgcaccaccaaaatgtaatgtagtgtcataacaaagtaatacagcacaattataaaatgtatatatttatacaataattacatctaagttaattcaatcaaatatcccataatatttgtcataacataccagaggatcccctcctttaagtctgacaacatttgcacctgcttcagcaaaactcaacagcaattcatgtatctcctcctaaaaaagagacccaatacacactatgtaaaaattataatatacataaaacattgtcaacaaatgaatttcgaatacacattcatatttgtacatctgggttttggattaaacagagaaatgagcattacctgtgtccggctatggtagccagcagtctttccaacatagagaagtttagcattagcaccaaccaaatccaaaacatcattagacactaatcgatcatacaacaacaaatcagcgttctgaatggctttgacagccttcaaggtcaagaggtcaggatccccaggaccagtgcccaccaagaacacattcccgggcccaaaatcgcccctgccactgccactgcctctttcacttttcctcttctctttaagcactagaagcagcttcttcagctccggtagctgcaaagcgatgtcgttttccctcgccgaagaatcgaaatcaggaatgactgagcagcacgaagacgaggaagaggaagaagtagtttggtcgtcgtgcagttggagttggtgattgtaaacccattgatctcgttggtatctctgaacggagtgcttttctgtaaatggcgaagaagaagaagaggaattgtagtgtagagagcaaatgggttggagatttgagggtgtgcggtggcttctgaaatgggtagaagagaaagaggatgagagagattgaagcctgttgacgagagccatagatgagagtcaattggtggcacttagtcttgtgatttgggggggtctgtaaatgctatatgtgtaatgtatatatacagagagagagagagagagagagagagacgtaagtggaagaggagtgttggagttgggtgagtctcttgggagggatgaggaggtggagttacctttttgggcttcgagggggacaacggacaatccttcttttgtcttgccacttgggtttctaactttctatcaaataaaaaatacttttatttttttcttaatcggctgccttttaattaaggagaattgttgttcggcactagtggtacttagtacttttaaatattgacaagtaatattcttaaaaaattattacattaaatgtaacggaccttatacttaattagattaatagtaataataatacataagagagtgctggtaccttttatacttcttaggatttttcttaagggtgcgttagaaagccacaatgtaattggatttgtgtgtaatttgatgtaattacacaatttg

SEQ ID NO: 243208 - DNA, 962 bp, Cannabis indica
gaaaacacagtaaactgtgtaaatttcccttttttaaatataattaatgttgaattggatatgatgttcactcttagttttcaatataataataacaaattataatatctttatattttaagactttcttaaaatatgtataaaagagagagactcctattatattttattcttgtaataaccttgatcaaatggttttttagaagaaaaaatgtatacgggcataatcgatatcgcatgcagttacaatatatatgttaagttggacaaccaaatagtctagaattatctcttctttttatttttcaactacatagaaaaataccaaaattgttcatcaagagtttcatatgaataaccaattagtagatttttttttttttttagttattacaatttgttcaaaaatgacgaatcaactaactgattcagagtgtgatccaaacataattttctgttagtggaaaaactagtgatggaaatttgacatgcggggacaggtatccatctcggggcagggattaccctccttaatgggtaatggggtggggcgggatacaattttatatacctgaagcgagtttgtgcagaggcaatactactcatcccatatttttgcatatagttttctaattattacctattaaagctatgggctatacttacaaaattgactattaatttgttctaatttactgtataataaagattttttaataagtacaatatttaattattttaaattcaatatcttgttttttatgtttatttggaattacattgtacattattttcttcttcttcttcttcttcttcttattattattattattattattattattattatattaatgggtctactcaatgtgaatttcgctgtcctgatctaattgattaagtggagccgggacggagatggggcataaatgagaaatggaaacggagttcgaagctgcacc

SEQ ID NO: 243209 - DNA, 8320 bp, Cannabis indica
agaacttggaccccgaacttggaccctgaaccccaaccttagaccctggacgtcggaccctaaccccgaacctaaactcagggctaggtccaaaaatccttggccaagtttgggatccgagtccaagtgttaggggttcaggtttgggtcccaagttcggtgtccgggtctgggtgtgggttaaggtctggatctgagatttgggtccgggtccaggttgggggtctcaggtttgggtccggatccaagttgaggttcgattccaggttctgggtttgggtctgagtccgggttcgggtctgtggtccttgttcaggtctggtgtccaagtttgggtctgagttgggattcgaggtatgggtcgaggtttggggtccaggtctgaggttcagggtccgggtctaagtttggggtccaggttctaggtcagggtctgggtctggggtttggggcttgggtccggtgtcgaagtccaagtccgggttcaggtcagggtcgggtcctgtgtttaggtctatgttcaggtccgagttcgagtccggtgtctaggtccaagtttgggttcgggtcaaggtctgggatccgaattcgggtcgaggtccgagttcgagttggggtccgcgttcgggtaggggttcgggctgggatctgggttcggtttcgggtctgggtctgggtcggggtcggtgtctggatccgggttcgggtctggttcttggtctagggttcgagtatgtaagcaagaatataaaatataatatgttagattaacaaaaatatttttgaaaattaaaaacaacattttgatattttctgttatctagtttttaaaactcattttttaaaaaatttagccaaacgattcctattagtttttaaaaattgttttttttatttttaaaattaaaaagtttttaagttacgaagccaaacaaactattgattctcattatttttcatttatttcgttaaatttctctactaatctattcaaattcggagtaataaaatgtgtcataaaatgaaaccacatgaaaaaatagaataaaatatttccttaccactaaccaaacaccacctcccatttctcaacgtgaatttgaactttcctaatctaagtattaattaattaaaacaatggaaggagtcgggttagacccgaatccacaatatacaacccatacccgccatacggtcaaaacaacagaacattccagaaccaacccgtttctactcacaccagaactctctggtcctctaaaccctttcctttcttttttatactattagagaaggaaagagagaaacaaagaattattcacacactcaaaaattccttctttccattcccttccaatcctttttttttttcaatggctgaagaagccaaagctaaaggcaacgccgcattctcctccggcgacttcacctccgccatcacacacttctccgacgcaatatctctctccccaaccaaccacgtcctctactccaaccgatccgccgcctatgcttctctccacaaatactctgaagccttaaccgatgccaagaagactgtagaactcaagcctgactggtccaaaggctacagccgtcttggagctgctcacatcggcttaggtcagtttgacgatgccgtttcagcttacaagaaaggtctcgagatcgacccgaacaatgaagccctcaagtctggcttagccgacgctcaatcttcggcttccagggcccgttcagctcccccgccgactaatcttttcggggatgctttctctggtcccgagatgtgggctaagctcaccgctgatccgactactcggccttatcttcaacagcctgattttgttaagatgatgcaggaacttcagaaaaaccctagtaatcttaacctttatcttaaggatcagagagtgatgcaagctcttggggttttacttaacgtgaagttccgtaattccactggggatgatatggatatgcctgaggcttcgtcttcgcctccatctgagaggaagcgatctgctgaggctgatccgcccaaggaggagaaagagcctgagcctgaacctgagcagatggaattggatgaggaggagagggagaagagggagagaaaggccgaggctcagaaggagaaagaggctggtaatgtcgcttacaagaagaaggacttcgatacagcgattcagcactacaccaaggccattgagttggatgatgaagaaatttcatacatcttgaaccgtgctgcaacttatttggaaatgggcaaggtatgttctttgctaaaacccttataatctataacccctgcatctcaattcgatttaatgaatgtatgaatgtattagctatcattttattagcttttggggtaccaaatttgtgtgtttgagccatttgggttatggttaatgacaaatgtttatgttattgtggtatcttatagtatgatgaatgtattaaagactgtgagaaggctgttgagaggggtagagagcttagatcggatttcaagatgatagctaaggctttgactaggaaaggtactgcgtttgcaaaaatggctaaaacctcgaaggactatgaacctgccattgagagtttccagaaagctcttactgagcatcggaacccagatactttaaagaaactaaatgatgctgagaaagctaagaaggagttggagcagcaagaatgttttgaccccaagttggctgatgaggagcgtgagaaaggtatgttgattgttgaccagtaagatacattcagtccttgttgactatttttatgttctctggttgctctgttttttctttcctcaattttctatgtctacaattggttggactaattttcttattgaaaggcatggacaatgctttttttgtgtgtaaattatgttgcttgactgattttatggcaaaaatccatttgtaggaaatgagtttttcaaacaacaaaaatacccggaggctataaagcattacactgagtctttgagaagaaatcccaaagaccctaaggtaggatcaactccaatgtctttatgaattgggctacaaagaacacaattattagcttctgttacgagcaagttttgatgaactgatgctgtgtttcttacaggcatatagtaacagagctgcttgctacactaaacttggtgcccttcccgagggtttgaaggatgcagagaagtgtattgagcttgatcctacattttcaaagggctataccagaaagggtgctgtgcaattcttcatgaaggaatatgacaaggctttggagacataccaactaggtttgaaacatgaccctcaaaaccaggagttacttgatggtgttagaaggtatggcatgcaaaagaataagcgcaaacttaaacacaaacttgcatatgattagtagagtttgcttattaaatgccgttggaaattcttttgttacagatgtgttgatcaaattaacaaggctggtcgtggagatttgactcctgatgaattgaaagagagacaggtttagtttcttctgaacaattattctcttagggttgattcttattgaaaagacattatctttatgatttatagttgtgttaactttgtttgataatgttgcaggccaaaggaatgcaggacccagaaatccagaacatcctctcagatcccgttatgagacaggtacttatacttcgaaagtttctttatcggttactcgtaaattccatgctaaatttgataggggactaagaggtaattttgggatatgggcaggtattgattgacttccaggaaaatccaaagtctgcacaagaacacaccaagaacccaatggtgatggccaagattcagaagctggtcaatgcgggaattgtccagattagatgaagtaaattatccaattcttatgaaccacaaagagaaaaaagctttttcattattttatgtttgtactcttttctagtgtgaattcgagtgattaattgtccaaagctactcggttgaaaaattttgagatccttaatttgtttcacatatatcgcttagaaatgttggttttaaactcttttaatcactctagtctcttcgatatattttagttattgatgcaggttatttttctttgcattacaaaataaatatcggttcacatacgtatcattagtgttctcaatgagtttagagggcattagttattataatatcaatgaaaattaatggtaataattaaaatattaaccggaaatcaatgtttatgcaattattctgccgccaatattcagtgatgatttttaattaatatttaaattcgaacagatatgaatacaaaaaagaaaattataaattgaatgcgttgatgaaattaacaaggcaaaagtagtagtatcccaatgaattttccttcgaaagatgagatctatgtttatctttgtctacgttgtcctaatcgttattatttttgaaagttgaaatgcaagacaaagtactcaaaagaagagaattacgttcattattcttagatgtgcattcaagcaacccttgcctttacttagattaacctcatttttataaccttaatttatattgattctcttcaaacataatctcataaagccatatttcttttgctaaaatgaggaatgacatgaatttcaagcatttactagacacacttaaaaaagaatatcctataatacatcttttgttctcttgtttgaatctgacatgagagttcctgatacaaaatatgaaggtgaaaaaaacaaactatgatttgccaaacaaaattgtaaactattattatttgccaagcatgagaaaaagaaagatcaagcggtgacttcttgctccttggcagcagcaagctcattttggatgtgttgaggcacaacgtcgaacttggctaactgcatggtgtaggaagcacgccctttagtcattcccctgagtgtactaacatactgaaacatttctgctagaggaaccagtgcatcaaccacctgcaagttcaacccccgaaagctatgaactttcatgaactatttcaactaaaataaaatgagttttgttcaagtgaactttatgttaccttgagaccgccaggtttgtcgccgaaactgtttatctgtcctctcctggagttgagatcaccaataacatctcccaaatgttcttcaggtgtgacaacctcaactttcatgattggctcgagcatcttagggccagctttcctcatcccttcccggaaagctcctctggctgcaagctgaaacgccaatacactagaatctacatcgtggtaagaaccatctactagtgctgcacgaacatcaacaacgggaaagcctgctagcacaccgttgttcatacactcctctaaacctttcatgactccaggaatgtattcttttggaactgcacctcccttgatttcactcttgaactcatatccactgcctgcttccattggctcaaaccgaacagtgatatcagcaaactgaccttgcccaccagactgttttttgtgtatgtacttcacctctgctaccttggaaatgctttctctgtagttcacttggggtgctccaacattagcttctacctgcaaaagtgataagagcaagtgaggcgtaaaaataaaaggtagtattgaaagacaagattaagagatgaggaagaatatacaaaccttgaattctctctttaacctatcaacaataatctcaagatgcaattctcccatcccttcaatgactgtctggttaatctcttcgtcccgtgaaaaatgaaatgaaggatcttcttgcgcgagcttaatcaaaccagtagccattttatcaatatcagctttagtcttaggttcaattgccaccttaatgacaggatcagggaagtccatccgttcgagaacaataggattgtcgggatcacataatgtttcaccagtaatggtatcttttagacctgcaagagcaacaatatcacctgccaaagctactttaacatcctctcggctgttagcatgcatctctagaagtcgaccaatcctttccttctttcccttgtttgcgttcatcacatatgacccagcagacagcttcccagcatagattctcacaaatgtaagggtacccacaaatggatcagtcatgatcttgaaagctagtccagaaaagggttcatcatcattagcagacctctctattattatttcagggttgtctgggtcggtacccttcataggaggcacgtcgagtggtgaaggcaaataatctacaacagcatcaagcaatggttgaacacccttgttcttaaaggctgagccacataatactggcacaaaactaccgccgatggtacccttcctaattaacttctttatggtttcttcatcaggctcttctccttctaggtagctttccatagcactatcatctagctcaactatgttctctatcatttgagatctgtattcttgagccagctcctgaagatcctctggaatatctgtatactcaaactttgcacccaactcttccccggaccaaattatagctttcatcctcacaagatcaacaacacctttaaacttatcttcagcaccaactggaagctgaatcaccagtggtttggcacccaaatttgtaacaatcatatctctggttctgaaaaaatttgcccccatacgatccatcttattaacaaagcaaatcctgggtacaccatatttgtcagcttgcctccacacagtttcagattgtggttcaacaccagcgacactgtcaaacaagcatattgcaccatccaataccctgagggctcgctccacttcaagagtgaagtccacgtggccaggagtatcaattatgttaatccggtgcttgttccaaaatgtggttgttgcagctgaagttatggtaatccctctttcttgttcctgctccatccaatccatagtagctgttccctcatgtacctctcctattttatagtttcttcctgtataaaacagaaccctttctgtggttgtggtctttcctgcatctatatgagccatgattccaatatttcgataatctttcaatggcacagctcgcttttccgctgaagctaaaatgacaaaacaaaacaacaaagtttatctctggtatttgagaagaatcatccatagaccaattacatttttcaaacattctacactatccagatcattaagttacatttttcaatatgagacagaaagtgaagcttggtttgcaccaaccatcgcaggctatacatactgattgaagtttatatccagggaattaactgtaaatttctttccaaaaagagaaagagaaagagaaagttttcagttacaaactagaatgttggcaatggatgaatggactaatctactccatacgatggtggcttttataaagggctaatgtgatgaaacatttgagctatttggactttgatagcatgttaaggtgtatgagttctaatttaaaactaattgataataaacagagtatacataggcatagtcttatacatgtactaatatcatcacattaatgatacgagacactctctaacatctaacatgttaaaattttgatattataggcactctgctagttttagtcttatcaagaacaaagcaaacaaaaaactgaatcaaaattaaacattttaagtactttacacgcacatttcactatcaaactccatgaaataaattgaatttacaaaattcaggtaaagggtgtttgaaaaacacttcaaacaatcaaaactgaacaagaaatgagtgaaagaaagaaaggaaaacaaacataccatcagcagccatggcgaaaacagataggtttcttcttcggctttgctgggttgaaccagtgagcttaacagcttttgagctgagacgaccattcccaaagaagtgggaaagagaagaggaagttaaagaagatgagggtcgaggacgaagccccagaaagccctgtggagaaagaatcgtggcaggccttctttgagaggcattgaaggtgaaattagtgagtgaagaagaagaagaagaaggtgaggccgtggtggtggacagcctgagagacttggccgccatgtccttcaagagtgagaggacagagtagtaaggtgtgagggtgggttgggttgagttgagttttggggataacgtccacagaagaggagagatataagagaggtgcttatcagtttttctcagctttcactttcgattctctctaataatgtttcggtcattttgagccccaagattgtatttttttttaaatttttat

SEQ ID NO: 243210 - DNA, 586 bp, Cannabis indica
ttttcgggttagacccgacccgaactactacgggttttaaatttttcggcttttttcggcagcgggtcggggcgggtggtcgggttttcagatttgcgggtctaaatgttcagccctaccttggacctagatttatacattattctatttttgaaagaaaatagaacaattctattaaaagcacaaagcttgaaaggtctcaaacaaaaggagctcacaaaattagataattaaattcataggaagacctgaccaccaaacatgtgacacatctaaaacaagagcttgctttgctaaacaatgagcaataatattcttagacttgttacgatgtcacactttgtcaattggtggaggtgcttgtaaaaatgagctcacctatgataattacaaggtgacttagagtaacttggtgagttacagttaacccaattcatcacttcataatgtcagccaatcttagtgttattggatatgcattctacgactggattttacactattcccctattagttccatttcttcactttaccagggacaaggtaacgtcattggatgtgccatctgcatgacaaagttatactt

SEQ ID NO: 243211 - DNA, 543 bp, Cannabis indica
atttcattgtgagagctttgagagaggaaacacggtgttctttgttctcaagtcaatacaatctaaggggagtaggctattactgaactaaaggggtcaaacctctttaaaaccttgtgttatttattgtttacatattttctctcaatttgattacatttcttaacgcttattagttgagtcaatgttgtttgttaaaagcgaggtcaacattttggtactttcattgagagcaaaaatccaagtttgttctttatctaaaatttcaacagacacacagaatggtggtgcaaacttgcagaggcttggttaaccagagtgacccattgttgacagatcctgccatgtcaactcctgagaatacaagggtcccacccgaaacaaatcccgagcagccaaacacgcagccacctactgtgggccaaggtgtgagtttccctctggttaggatcacaccacgtgtgcaagagagtgggaataccagttatgcagacaattaaagcactcccaatactggaatcccatccacaaccaatgcttaga

SEQ ID NO: 243212 - DNA, 559 bp, Cannabis indica
ccattataagtcttccatttgagattcaattttcaagccataagttagttgacaatttttcatcatcaatagattggtgtggtttgtgagaactatacgctcaagctttgttatttcctcacttagtgttgctgcaagattcctagacactccctccgtctaaaggacatcgatattcaccttaataacactcagttgattgccttctgaagaaagcttccaacatccatggttgaagaagtttgctagaatagccaaatacctcaggcaaagggagagagaaacaatcatgaagagaatatggggaacacatgccacgatagagtaacgcatccatcacctaagttggtgaaaatagtttgccaagaaaaattgtcccatcactgatgatgcaccccccaccacgaacaccgcaagatcttggtaccttgcgacattgccctggaaaagagaagcgaggatactctgtgagctcaaatgccaaactcgccactttgaagataaaataaacaatttctaccgaaggaactaaatgctggaaaatgcggtggctgccatg

SEQ ID NO: 243213 - DNA, 876 bp, Cannabis indica
aacctaaaaaactagaatagtgattttttatgtttttgaaatacatgactgacatcgttgcacgtgcaaacccaactgttaatcgtttgaagataagtagtaatacactacaccaaataagagttttaggcgcgacactatcgacactatcaggaacaacaaaattttgttcttgatagtaatagtatcaggcgcgattcatcaaagttgttcctgataaaatttattttattttaaaaataattaaatgattattaaacctccgttcctatttttttttttaattttactgttccaccgattcattttcctctttgaattctccaattcggtaagcgattccatgacagtgtagagattcgctgtgaaatccaccaatttctcaagcttcaccattttatgcacgatgttggaacaaaaatcaagtttcttcatattaatatctccgagtctcaaatcggcatatagaaaattaaacctcacaagctccaaattggtggtccctccggcgatcaagctccggtaagttttgtctttgtctctctagatctatatctatccctctcatatctctaacttagttccagctctagtttcgattttacttttatcagattcatatttttagatttcgctttaattaacctatggttttgattttacaggtatctgattcatgtttttagatttcaattcatttcaattattgattcaactctggtttcaattttaaaggtataacttgttagaaacacaatttacaaagtatgtttataactcggttggctgaacagtcttatatgagacagaaatatactaactgttaacttatgtatcgacgagaaactatgtgaatgcaagtgtgcatgacgaggt

SEQ ID NO: 243214 - DNA, 614 bp, Cannabis indica
tctctcaaaaacctcatcaccaagactgaggagaatggctgtgtgccttggcttcaatctcaagtttctttttcctatcttcaatcaattatatggcttcaatatcaagtgcctgatagatcccttagataactagaaaagccttcatttgattctccatgggctaaaatcatttgaactagccatccaaaccaggttatttgttgcttgaatctaattcttgaaagtttgagtttgattcttgaaatattaaagatgaatcttgattggttgaatgtgattcttgaactctaaaccatgaactatgataccatttgttgtgaatgatcaccctcaaaacttgattgttatagtagtaacaatattcaagaaaacacaattcaaattagaaccaatcacaaaataaaaaactagaacttagatgaaattagacaagaataaacttagcttgagaatgaataaatcatggatcattattgattgaataatcagtagtacacaatgagatatgtccaagaatacaacttaacacaatgaacaattacaaagaaatatctcacaatgagaaaaatcacctcaagagtgatacttccattacatccctccacccacac

SEQ ID NO: 243215 - DNA, 640 bp, Cannabis indica
ttcatttccagtatgcagctacattgtaaaggaaaaattgattacttgcccagaactcatacaacaatgacaagaacattgctttgttcgtattacttgaaaagattatttctcattgatgaaattctaacacaagacaatagctttgtttgagtagttgaaacacaagaagttgttgcttagggactcgttcctttgctactgacaatgtcgacatgcatttaccatgtaaatgagtcaactactcagtcatcataacacattaacacaagtttcaataactttgaaggtgacttttccaccaacctagaggagcaatctagttgataaatgaattaaatatgtagctcaccaccaattacactttccatttttttttggtttatgattaacaaatttggtgcttattaccaaaaataaataaataacaaggaggtccctgatcaaaacataaaacctaatcagtattaacgtagttaaaacgaagaagtgaaataatgttggagtgaagagttcttttttttttagtttgatgagtagagtaattcatgttcttactactcaaggatattcttctttcaccaacaattgaagtctttattctttctttagattcagatcactatttttagtatcctaa

SEQ ID NO: 243216 - DNA, 565 bp, Cannabis indica
agttcggacaggcctgaacaggcgaagggaggatccgagttgatcagaagctgatccgagctaatcaaaagcgaattcgagctgatctgaagccgatccgtgcatattaaggcccttgctccacctccaatactacaatcgaagaccaaaagaggcagagaaatgctcacccattacgtgaatcggtcggtccctaaggtgaacgagcaactagctggggcgaataacgacctgtctttggagctggttatgggaggagtcctaaaattagttcaaattttaatgtcctctctttgtacaaactggtttgaagatggcttatgcttattctcgagctaagtcagctgcagctaagaacgttgcaatttccaacacaagacggaagtggacttggccatgaaggatgccgaggaagcccgggttcaacttggggctatccagatagagttgggagaggtcaataaaaagagcttcttgctgctgagaataaggtggccgaactgaccaaagatctgcaggacatgccatccactgaacaacttgaagctgatattgcctctttatc

SEQ ID NO: 243217 - DNA, 1741 bp, Cannabis indica
atatataaaatccaatattaaataaaaatactaaagatattcacggtgcctgcctaacacttttatgagatgttatatatatggttattagtgtaatgtgatattgagtttttatttattttattctaataataataaaaaatcgttaactatttataaaatgtggtgttaggcctcataatagttatcaagtaaagtgggtatatcacattataatgctaaatgttattaatggtatacaacactactttatgaagtataacgttattgatgcaatttattatcaagttacataatattaaactaaaatatatatgagatgcaatattaaattacaccaataatacatctagtttaaagtagtgttatcttgtttggcaccatattctcttccatagcaatactttatacatatactttgaatgtgatatacaacattctcattacaattttagtttctaaattatggtatatgagaattattaaagagtatcattagtgtgtaataccatctaataagagaatttaatatcaattaagttctatatattttaatttaattattatataaaaaaaaattgctaactactcgtaaaattacagggttggccctaaactttaatgagttataagaaaaaaaattatgaatccttatttaaaaaaaaaaaaaaagagtattttcaaaattactaaaaagtatgtgtattttcaaaagaagaattattcttttaggctcctgaatgggttctatacacaaacttaacctgcctatatccaaaacggagcttgcataatactaccttgtaatggtggtgcctaattgatgctttttgtatattgcttatgcaataaaatgggtctgaattgtgcactacacctctatcatagtcaagttaatttgtgtctttatttttgttatatattcattttactttatcccaagagtgagatcacccttttataactttaatttcttcaactttttgtttcatcaaatatatcggacctaaataataaaaatatctttgaggatagtgatagtactaagagagattgaataggcattattatgaagaataaatatatataagcatcatattcatattcatattcttgttttttcaactgatcaaacaattctcttacctcctccatccactatttctttttctttaaatgactataaatttataaaaaataagtattgtcactattgataggaacctttttatttttggtatttgaaaaaaatccataataattatacaattttcgaatttttaaaaatactttacagtgctatccaattgcatgtgtgccttttattatatatatattatacacatgcattaactattttcgaattatgtttttcgaaaatttataaattatttagaattttcaaaaaactaataaagtatttactactataatgtaaattatcatataaaataaattgagttataatttttctaaattaataatgaaaaatgaaacacccctaaaaaaatatttgatttctatacatatatggatatatagaaatttctattcactggaatctattttattttaattaattccgagttgttttttgaatgcctatagtatataagttcatatgtatatatatactaggtgattgttacgtgccaagccacgtagtgttagttttatttaatattttagttttttatttgaattaataattaaaatagtataattatttgaacgatttgtt

SEQ ID NO: 243218 - DNA, 1588 bp, Cannabis indica
taagagccattcattccgtgggtgtaaggacccaatagaggcttgaagcggaacgttacaaatatactctgaatccatcacatatcattaatgagtatgaggccattcctcacctgtaaagaacaacatgtatgaatcttagcaagaaaataaaaggtgttaaggaatcgagagatttccgtagtcaaggtctgtggtagaaccacaaaaaaatagtaggctagttggtaattagagtcaaggatgtatatgaaatatcctcacaaagaaagattttaggacaaaatttctttgaatgggaagattgtgagaatcaatggaaaaacagcaaaagaaaaaaataaataatatatataatttatttggtgggacgcacaaatgactcttattcctctcctttctttctcttgtcctcgacgtcctcttcttttcttttccttatcgacgatgcacaaccaaaccaccacaaccaagcttagatctacaaccatttggactgccattttcgaaatgcagcggagctgcacgaccatcgaacagtggtaatctcacacctcatgtttggtggaaattagagctaagatgcactcatatagtggtgttaagttttgacgtcgaaactttgagtcgatagtgtgacaaactccagcgaccatttgatgaatggttggtaccgttggaatcaccgtcatgaggagaacatcacctactaagtcattttggtcaacttagaacttttctgtgataaaatttttggtgtcgacgctctttggaagcatttttcgaggggatcaatggttattttgatataacaagttgtatctatgatccactcatcagtgattgttaggaacttaacttgattattggacttgattgtatatgtgttgaatagcattagacacattcccatttttttatgatttataaatgctgaaagaaatttaaaacttaatctacatatttttatgaactgttctggggcactgagtgtcaaatatatttgtgtacaattatttatgcaggttatgatttttgagtttattcaaattataatcgttatgctattgtattttctaaaataaaaaaggaatatggcttttgttattcttatttacctgcttttagttatattgatcattactgatgagaatcatgtgatcatgatttgtgcaaattgttgtttcacgacctagtccccctatcatcataggtaaatcaggtgtgcacccacctgttcgggtgtccagaaagtcattcaatctaattacaaccgacctatccaatagaattggatatccaatcataattagatcggatcgggtgtaaattttgaaaatttaatcggattgaatcagttgttggatgagacatccgatccaatagataaccggaccaatccaaaatccaattatcatccaatggtcatccaattatatttatatacttttaaaatatatttataatttcatatattaaaaatattttatttaaaaaaatatcttaattgattttattcttattcacatgcataaatgagattaaaagaaaaaaaaacatttaagtctaaaatattaattctcatctt

SEQ ID NO: 243219 - DNA, 964 bp, Cannabis indica
agtcagtattgggatcttattgtaaaatccaattgattaaaacttttttacctgacggtcaattgccaaggtctcgtgacttttgtagttagatcctcaaatgtcagggggcacggtcaacgacttcaccgtcgaccctccgatgcttaagtcagtattgggatcttattgtaaaattcaattgattgaaacttttttacctgaaggtcaattaccaaggtctcgtgaattttgtagttggatcctgaaatgttagggggcacagtcgacgatgcttaagtcagtaaggtgaaaagaatatgatagaaattaaagcttaaatttaaaataaatttgaaagtttagaaatgatactgtcttaggtgaacagcgttccaactgtttcttatatcacgtccatctaatgcttaaagtttgtaggctccttgtccgactatccttgagatcttgtaaggtccttcccatgtcggacctaattttctagctcctgcttctctcgtattttggtaaactttccttagaacccaaccttcaacgttgtactcacgaactctgatgttcttgttaaaatgttgcgctactttatgttgatacgctgcgacccttatcaatgcttgttctctttgttcatctaatgtatcaagcgtgtgagccatattctgccagttttcagcctctgttgtgtgttcaaatcttgtggttgggagccctgcctccgcgagaatgactgcttctgtcccataagttatggagaaaggtgtttccccagtggaagtctttgtcgtcgtcctgtatgcccataacacccgtgggagtttgtctgcccatcttcctttggccttgtgtagtcttttaaagatgccaccactgtcttgtttgttaattctgcttgtccattcgattaccgatatctaggtgttgagaatgagagttgtattccccatttattacaaaagttttgaaa

SEQ ID NO: 243220 - DNA, 879 bp, Cannabis indica
atttttaacttttaataaaaataccttaatggtttgagatttatttaggtgagagaaagttactcttttaatagggaatataaatgagtgtgtcaattaatataatcaattgcataccaagctgtatttttctcaccaacctatattcagttactataaaaatcctacatttcttgaaatcagcaataatttaaattagaaactaaaaaaatatataaaacaaaatcaatattaaaaagaaatttctttaataaaaaataaaaagaaatattatcatatataataatgaaaaaaataataaacaatatttatatagtaatactaaatattaatataacaataacataatttttcccgccatacaaaagagaaataataacataatttttcccaaaataaatgtgaaacggtaacttttttttaatgagtatatataaaaaagaaactggaaagaaaataaagagggaatatataaaaaaataataaaaatcattcttcatatatttgacctgtctagattaatataattaggaaagtcaaggtcatcataccaaagaagaaatgatttaattatgtgaataaaaatttgaatactataatattaccaaaccaaataatatacagttataatgtgctagcttatcctttgtatcaattcttttttgtacagttataattcactatataaaatataacatataattagttcactgtaactgttctatttagttcactatataaaaacattcttcttgatcttcttctctctcggtcttatcgtccaaattagctacactatttagctaatagcttgattgttctcctgggttttgagccttgtggtctgcatattatatatatatatatatatatatataa

SEQ ID NO: 243221 - DNA, 630 bp, Cannabis indica
ttcgagaaatttctttgattagcaaagtttgcacaatatttgaaaaagcactgtagcgtgccttagcgttagggcgttacaattatcttctttggaaatatcataatttggctccaatatgaatgtatagctagaagaattgaatttattaatacagctcggccagcatatgagatatttctcgaactccaaactctgattcttgctgtcattttctccaccaatacttcacattctttgcttgagattctcttagcacatataggaatgccaagatatttgaatggagtctctttcttacaaaaacctgagatgtccaccactctttgagtctctctttcttccataccacagcagtatatggcagattttgaagggcttggctccaatcccgaagagcaagagaacaacttcaaggcttgcaacatgcaaaagatacttctgaaatctccatggcagaaaagaatcacatcatctgcaaaacataagtggttaaggttgagatctttacatctctcaaagtatttaaactcctccttgctcccggctttcttcaggattcttgataagtattccataccaaggaggaaaagcaaaggagacataggatctccttgccttagccccctg

SEQ ID NO: 243222 - DNA, 565 bp, Cannabis indica
gttcggtcccagctctacccttcaacttagcctcacgcttaagttgaatgagctccttctcctgctcagaatgctcatgagcatactggttggctcccgcacctcccttcaatttagcctcacgtttcagttgaatcagctccttctcttgctcagctcccttagcctggccagccctgaacttcctcttcttctccttcaccgaccaggtgcaaaatctattggataaagtccgtactccacaaagttggcctctgaagtcaacaaggtgatattccgagcgtcatccgatagctgaataatcctttgagctctgtccctaagagcaagcgtgaggggtggacatcaatatatagggatctgctgaaaccgaggataagtggtgcccattccctccaccatgtattactcgtcaacaaaattcccaatattgctcacaaccttgtccgtggtgctaatcaaccacttgaagtctggttgggagaagcagaagtatcccaacctgccttacttgggggtagacttcaggtcaaaaaaccaactgacctcatgcagagaaggcaca

SEQ ID NO: 243223 - DNA, 1230 bp, Cannabis indica
tcctaattagccttttatatataggctttaagatcggtctttaagaatcagcttccatattactccaagataatatgttcagaaaatactagacactactcctaccaatatgattactgagttatatgagactaataacttaaaaaaaaaaaaaaaaaaaaaataacaaaacataggtaccttttaacatttatgaataaatacaaaagaaaagcaaaaccggcactagtcttcttcttggggttgggtaggttgagtgagtcagtctcagtctcagtcacacatttgaatatttaaagcttaaagctttttcatggaaggagacgaccagaccatttcaaatccaatgggtcttcgctatcattatttattacatcatttcaaatccaatggctcttcactttcactttcactttcagtaagaacaacaagaacaagaagaagaataatatggcctttactccacaatcagctgccgagaaagctgtttccgttataggctccggctacgatatctctaccgatatcaaattctcttcttgtaaattgggtccttccggctccagattgatcgacctcgacctaacccacacaagagacctccttgttccttctgggattcttcttccccatgttcccacctccatcagctgtgataaaggggaacgcaccagattttgttcccatgttctttcttttaatcaggtcattttcctattatctttcctaaatttcatgtttgtcaaattatgttaggcagatgaagaagaatgatcatattgttgtttttcatagcaaattttgattaaaaaaacctttgatctttctgtgcaaaaaccaacttgttacatgtattttcacattagcttaagcaacttttgaaaaattgattgaattgttggtttgttctattgttcattttcttcttcagaacattttttatattattgcttcaaatgagagagattgaatattgtgttgcccatatacaagtagtaaagtttacaattcattctcacttggtcaaacaatatataattttaagagtacttttatcactaccacaacatgtctattacaccaattcaaaattaaaatgttatgatcttgttaatagaaggatgatacaaggagtcttgttacttatatgagaggatgcaaatgttatatttttgtttataacagttctgttaaaactaaacaaaaagtgttagataaacacttatataa

SEQ ID NO: 243224 - DNA, 489 bp, Cannabis indica
agttctaaccatatgtaataaataagaggtagttccagccatatgtaataactaaaagagcataagtcaaaagctattcaatagctttattgacaaatgtggcaaataacaagttctaaatctcttgaaagttggaccatatatttgtaacttcaagataatttgacatttgagtcaaatccaacaatctccaccttggcgagaaaaccaaaccaaaactgatatctccacatgcgccctaggcactataagtctgagatgttaatcaagttcaagtagtgttgaaacttgattcctataaccacttttgtaagcatatctgcatggttatttgtagtcccgactttctgaagtataacatttccttcatcaataatttcacaaacaaaatgaaattagacatcgatctgcttagtgcgaccgtgatggacttggttgtttgccaaaaaaatggcattctggctgtcgcagaaaacctccacgttcttt

SEQ ID NO: 243225 - DNA, 734 bp, Cannabis indica
taagaataatttaatttagttcagaaccatggtttaaacggattctattttggattttcaaccaatgggatgttataatgtgaatgatctataaagtttgcaacaaagctcaaaagttaaaatgtaacataataatatttatagttcatagttgtatttttttaaaaaagtaatttaatcgttttggtaagttaaatgtgttaggtaattaatatgttaaatttcttttttaagatatagatatattataataacaaataaactatgtattttgtaatttattacgaatcacaactaaattatacaataataaaccgttcaaattaattggatcagatggtcttacagattatagtctatagtaatttgaattgttgtattttgaatttaaactgggttttgtcaatctcgatgaacaaccctaacacaattactatatacgacctcaactaatggctaatgtcttgtatgaatgttattttcttggcactctttttttttaagagcattgctataaggcatcagtgatgtctagcactttctcgatatatcgcgttgtgattggctagcgatactcactaaaagttattatattaaattatatgggacccgaaactaagttggagcaataatgatattgacacataaaaaggtgttaggttagcaattttttttttaataggattaagttttctttgaaaaaattaattactcttttggtgtagtgttaattc

SEQ ID NO: 243226 - DNA, 944 bp, Cannabis indica
ccactagcacgtcaggtatgtcaccttctacatgggttttggactatggtgcttcacactatatgtctctgcattctgcatcttttatttcttcgagtcccacatcatctgtgcctgtcatgactactgatagtactcccatgccagttgttagtattagtcctgttgtcagtttaatttttttgcttcttaatgtttatcatattcctaatctttcattgaatcttgtatatattggtcaattgtgtgattctggttattcagtatctttttcttctacttcatgtcatgtgcaggatccacaatctcggaagatgattaggacaggccgtagacaaggtggattatatgttttggatgaactgagatttctagtatatgcaactcccagtgttaatttatcttctttttcgtttctctccttcgtcttcttagtttttatttatggtactctcgccttggtcatctttcaaagtttcgtttaaaattttagcttgtaaaggaaccttaggaaattttcaacctcatgatatttctgattgtagtggatgttatttggatttatgacctaaaagtaagtaattaatggataatatattagaaaatatataaaataaaattataagataaatgatacattaattataatagtataattattaaatatttgaaatttttttattcaaatggagaaggtataatcttgtaaggatgtacaagagaattaagattatacgatatgaataaaaaagtcagtagtgtattaaagtaatgagaatctttaatagggaactgctaaacattgtttactatacactataactctagtgtgtgtgattttgattcagatcacatatgtggatagacatgtagtaaaggtgctgcgtataattcgattatgcatgattggaccgatatgtaataaacatatttcattaacatgt

SEQ ID NO: 243227 - DNA, 966 bp, Cannabis indica
attatttaaaatatatttaggtaaccttagagtttattttcgaaactaatgagttgtcatataatataataagctaccatttttatataccaattattttatctacctttttgttactttaaaacttatgtttttatttttaaattatattaaattaatttattattttaaatacttttaggttactaatatattttgcttttgtaaaaatatttatgttacttagtctatttaataaactaaaaaaaatcacataacttactggtaaaattggtaaacatttaaattgctaattagtaattttaaagtcatatttttaattacctttttgagtttacagtagaaaataattacttttcatacagtataacaaataaacatagatatgaaatagttttatttagtatactttatagtaatatttaaattaattatgatttcgataatatatcaattggttatttttcataaaatgatctactttaaataaaaatatcaaccgtagataatataatctaatagtagttaattagtatatgattggtagtatgtgtaactcaagtgtttgttttatttttaaaaattgataaattatatgcttcccacatattaaaatgaccatcttaaataatagattatgattgtaattttcttaaacttaactgatcaataatataaccaaaataaattttcaaattaaataaaaaagagatagaagaaacttaaaatatgtattttcacttaaaaaaaaattataaaagaaacttacaatatgtatcaacatatataaaagggggaagaattgctaaaagagaaaagtcaaaagaaaaataaataaataagaagtggcagacaacatttaataaagggaaaatgaaaataacattcggtactattaattccaatacggtataaaattagtaattaatttaaatctgttataaatattaataattatgtggatgt

SEQ ID NO: 243228 - DNA, 1196 bp, Cannabis indica
gaaaaaagaaaaagaaagtgggttcgatccaaattggtagatttgtcggccgataaaggtactgggcccaaattgaacagtgggtatcttgtaagtctatagacatggacaacaaaagccattatgttcaaaggttttgtgttcattgttgggcctcaaaatgtgtacagatggctccaaattttgtatgttctatgtaaatatttacataaatatggtactaaaaagctagtttctcgtgaattagttgtgcatgcacttagactagatagttaattgcacttagactagatagttaattcttaatttagaaaaaaaaaaaaaaaagactagtttatatgaagggaaattttcatacgtggacaaaagggtataaaattaacatatataaagttataccggaaaaaccacttttatacggtattcataaattaaattacataaaatacagtgtcatcatcttagacactgtcgatactctttgcccagaaatgttttttcggagaagccattgttgttggatgaaagtttctgaaacaaaaaatcaacaacacaatgaaaaatattaaaaaacaaaaaacttgcctaatctattagttataggttgacaaaaataacaaaaaacatcaacaaacgtcaatcgatcgataaaaaaattgcaatagaataaatttgctcaaaaacaggtatgaaacatccgaaatacaaatctcaaaattaactgagtaagatctatacaacataacctaaaattgtcatttcaatgttgcagatcatacaataaagagttgaaaaattattgatcggagttccctactaaatccaaatttatctcagaggcacaaaactcgaaatgaatagagaaagatgtatactacatgacataaaattgttgtttaaatgttgtagatgatactagaaaatgacttaaaaattattaatcggagctccttatcaaataaaaaaaaaataataacaaaatattagattactacttaatattagattactacttaatacatagattaatttgataattactaattgaataatatgttgaggattgcctactcatgattgaaaattttgattctaaaaaattaaagaaaattatatataacaatgaatgtttattgttgattaattgtttaatttctgtaattcatttgaatgttgaatatattcatgtataaaat

SEQ ID NO: 243229 - DNA, 843 bp, Cannabis indica
tacttactctccctcacatttcttgcagtgtttaccattacggcaatgtaagttactatcacttgccttgatatatcttttttcatgctaataattttagatataaccaataataataattaaatttgggtcagaattggatgtgttgtactgtatttggggcaagggaagttccacaatgagacaacaaagacattggagtacgttgtagaggaagcagagtcagttgtgaagagtcttgagaatgtgtcaacttatctaaatgcttctaagaatgtgggagtggctcagttctcactccctgctaatatcaaacaaagaatcgacagtgttgagaacaaaattaatgcttcttctactattctccaacaaggaacaggggacaatgccaataggattcaacattttctagattctgtgtcagtaaaatctatctatacataatatattacatgttttacaagtttttgcaatacactcttgtgtttttacatgttaattttaaaggtatattttatgatgtgcaatacaggagagtggctcttattatattctcagctgtgatgctgttgtttgttttgtttggttttggtaagcttgtactactcaataaaaaatgttgaccatatatattgtatatgtttgatcttgatctcataatttgattgtgattactacagtgctttcagttctgggtattcgttgtctcctacatgtgtgagtgataatcatttttatctcccttaattgtttacaccatgtttaattaggaggttgagtaaataagtagtacaatgctattttttacttataaaaaacaaaaatcatcttactctttccttc

SEQ ID NO: 243230 - DNA, 3467 bp, Cannabis indica
tttatacatataaatttctaacacaaagagcataaaaaaactctagtttggctagaaccacccacaccaccttgggaggacggtttccaattattcttgggagggctcggggaagaaatagggataagagaatctttgtaatctgcataagagtgagaaatatagtcaatacattgattcacattatccaacctgttattatatacattgtcattccggacccgccatatcatatctatcacaatagaggcataaaatataaaaagaattatccatcgctttataaacatttcggcgccaaaaaaagaagggaaatggtctctccccaaagttcaaaattgaaatctccttccatggcattctgaatcagtttttggcgtcagtcatggaaaagggtctgatatcagtggaccggtggactggagagagccaggcctacttcctcactcacctccattccgatcacaccaaaggcctttcttcttcgtgggcaaagggtccagttttctgctcccgactcaccgctaagctcttccccttcaaatttcccgagttcgacctctctctgcttcgcattatccgaatcggttcatggcattccatttctcttgtttcgccttccagcggttccaagaatgttatccagtttatggctatcgacgctcaccattgtcctggtattctttatacgatcaaattggattgcacagaacctgtttgattaaagtcctcaaacaatttgttgagaatatgtatgaattgagcttcatggacactaaacatgttaatataagcaggtgctgttatgtttttgtttcgtggagactttggatgtttgctgtatactggtgattttcgatgggaagcaactagtgacagggctaagatgggaaggagcatgcttctcaatgctctcaatgatgctgcggttgacattctttacttggataatacatactgcaacccatcatatgatttcccaccacgagaagttgctgctcagcaggtgtgtcttttcaaatggtactatatgtaggttgacagattacgcacctataaggtcctaaccagagctaaatcctttatttgcaccttccaaactgaaggtttaacattttagctagtttcttggtttgctgatttttagttttgctgatagtgattagcttgccaaaatacttcaaatatagtgttttctcttatggacatggccaattgttttagaactatgatatcttatggagttgattcctggaattgtttaagcacatttattgaaatgtattggtgtctgatttcttgtcgtaccaatgaaaaattaaattgggctttagtatcataagcccatggtgacctgcaaaataaatggagtattatgatcagaattacaagccacttcttaccaattgtagtaatgggcatgcacttacaggttgttgatataattgcttctcatccggaccatgatatcatcattgggattgattctttggggaaagaagatcttttgcttcacatttcacgggtgcttaagataaaggtttgtatgagtcactcaatgaacataactactcttaattcattcattgtcacggctatgtgaacaacattttcagaaagacaaacaaaaattgtattttctcaaattaatttatgtacttttctttttctcttgcttgaagtttgacttgcagcagtgtttcctcttttgggcatcgtgttttaaacatgtatcgtgttagtacagtacttagtagattaaggggccttgcaatgaaaatatgcctgtacttgttaaattttcggtctgaagtattcatttgtttgagttgttaattaaagttacaagtgttcactctgtttcttgttctcttgctcccagatttgggtatggccagaacgcttgcaaaccatgcatcttctagggtttgatgagatatttactactaagacttcccttactagagttcgagctgttcctcgttacagctttagcattgaaactttagaaggtttgaattcaatgcgaccaacaattgggatcatgccatctggtcttccatggatggtgaaaccttcagatagaaaggaccatctttttggttctctactaactaatcggtacaacaaaagtaaatgggctggaaatgaaagtgtccagatgaataagccaaatggaagttcagaatctcccatcaggcttcataaatacatttataccgttggttactctgatcactcatcatttcatgagatagagaagtttataaagcttgttcagccaaccaacatgaaaggcattgtgtcatcatcatgttgctatgttgatccgatgtactactttggccgcctttgcagggtaaaccagccaacccaaagcttacatcaaaagcaaaaaaggaaagagcgagatgaaataactttggggactaaaccaacctttggcaggaattttgttacagaagttgagaggagaagaaatagtgtgaaggttaaactttcaagtgtacaagcgaacagggtgagagcatatagacgagtaagatctggtgcaaagattgtagatgatgactgtcctgattgactaatgttcacaaatttctttcttcataatgtgtattcttcagtttgtaaagtaattactggatttataaatcatttccataatgcaaattaatagtactttgtgactatcgtgcccatattcggtaaagaaattgttcaaaatctaacatgttttcttgtaggtgtggcaatggagttttgattactctctttagaggcagcttggtatcttctagaaagtaaaaagagatcatacaagatccattatggttctcaaatatatgcaccgtaaagaacagctcaataaatacgtaaaattgttaggaggggcacggagaaatgttataaattgaaaatgcacaggttaagtggttaacaattgaaattttaaatgttgcatttttttttttttcaatttaatttaagcgtttaaatattacaattatattttacctgggactcgaacccaggacctccaagacacacacccacttatggccacttgagccagccaaatattgcatttgttttatacatatatattgcatatgtactaccggggatcttccgtagcagttaaaggggaaagagagccagttggcacctcttgttgccaactagaactggtttttgtagtttggcctggtttgggtcctttttaatacagtttgttgttcataagaaaaaaaaaaagtggaaagagagcccctaataattgccacacctgtaagtgattaataatataataatttgttgctttcaataaaataataataataataataatttgttatttggtaatggtacgaatactaagatggtgtgttataaagtaattaatgttataaaataatataaaataatataaagtaaatgagaagaaagaagaagaagatgaagag

SEQ ID NO: 243231 - DNA, 1034 bp, Cannabis indica
aattacacggttaaagcagggacacatatacttagtattttcgtgtccttgctctgatttttgttgtactttactcagaccaactcataattttcttaaatagacaagtccattattttatacacactccaattcatgctttatttttttattattatttttatataattaatgagataaatactaaattatatatatatatattcttttttgtatagtttcaattatttttataaaattaaatactcaaaatattagttatagttttatattttttaataattttaattataaaattataatattatgtattatatttaaattttattattattttaatttaatttttagtcgattttgacatatagcttaacaattaaacttgaaaagaatttagttattaattatttattttaatttaaaaatatatcttgtaattaattaaaatatatgtctatattttttaattttttttagaggagcgattgcttgcccttaactttttttagggctttgtccatgcgtaacgcgagttttcacccagtatttgtttaatcatagtattgtatatcatatgtattgaaaaattctaacatacacacaaatatgggtatctacaaatagtaagttgcttataagattagagattagagaggttgttgagaaatccacctctcgaacatagcaaagcattctttgggattgaactctggagctgtatgacctcctccctgctccaaaccaaaacaatgaaggttatactatttgttatttaataaataatataatatatataaaattaaatttgatagatcatatgttcgagtttatattatatgatatatagtataattatatacatatataactaatttatgaagagttagaaatctcaaaatagaaatgttagagtttatagctattggaaaatgtttggaacttatttatatcatttaaatgaagttttgaacattggtatgaagtttgaaacattgatgaaagagttggttcataaagaagtttccgagaaggtc

SEQ ID NO: 243232 - DNA, 557 bp, Cannabis indica
ttgaaatgaatagatcaacacatatcatttctttttatttttagttgtcttgttcctgaaactcgagctgtcagaattctgttgttttttagttttctttttttgtgtttttaccaacatttttacgaaatctagcgacattcgagtatgctgaagcttagggatgacttaattgtcacaatatctttgggacatgtagtggctaagttcacaacatgggccaatttatgcttaccatgtacaatttttgcgatatttgttgatattgtttactacatgtattgatagtttagagtgttatatgttggttaagtagggagaattttgtcaacatattgcaatgtgatgcgattttcttatcgacagagtttgtgattttttgcgacataacttgcttcttgacatattattcatcaactgattttttcctttttttacagatttaactatttttgtgattgtactgtatgatgaggtttcgaaagttaaaggttttaactagatattcaataagacaaatagtacaatgttaacatttgaggttgacaatactctaa

SEQ ID NO: 243233 - DNA, 643 bp, Cannabis indica
ttcagccgattttaaccaaacacttggactattataaatcggaccatagagcaatcacagttgaagttattcctttgacgcaccaacaacctgaagttaagaggctctcacggttcagatttgaaaaattatggctgtccgattctgcagcaaccgatatcatccatcagacttggcaacaaaatttacaaggtactgcaattgacaatttctgcactaatatagaggcatgctccagatctttacaacaatggcatcaccataaatatggcaatttcaagaagaaaatcacagctgctcacaaagaggtagaacttctaaacaaccaacaagttcggaatgatgtttcaatgtgcaatcttaaaaaaaatggaggatactcttgatgaattgctatcccaagaagaggtttattggcaacaacgatcaagaattgattggttacaatgtggagatgagaatacaaaattttttcatgcttatgcgtcttcacgaaagaccaacaacacaataaaatccctgcataatgaggatggtgttgcagtcacttcaaagcacgggatgactgatattattttgcaaatttttttggggacttattctctgcttcgggtacacacacagaagctttgcagcaggtttt

SEQ ID NO: 243234 - DNA, 508 bp, Cannabis indica
ataaatataacttttttttaaaaaattaaaggtaattatccctctataaaattgcagcaaactcacactcactgacaccccattacccatgaaaggtagtaattaatcccgggtgggtccatttaggaagggtacccatcccgagagtcaaatttccataacacaaatgacacatttggctgcgaggagatctagttgctctcatttaattctaatccataattgtagttgagaaatgttaaatgacactagtggtgcctagcacttttttatggtctaattaagtattggattccacataatttaatataatagtttttaagaagttatatcgctagccaattgcaacgtgacatatcgagaatgtgctaggcaccactaaaacttaatagcaatgctcattttaaatatatcaattctttctttctttttttctaatatatatagtgggggtatatatatactagacataaaaatgaaatgtagtagattaatgtggaaaaaacac

SEQ ID NO: 243235 - DNA, 562 bp, Cannabis indica
ttaaaataaatagactaaaatatgttatatttaattaaaaaataaataattaattaatgaaatagcaagatagttattttttctatacctgtggtatttttctagacatattcagttaaataaaaaattgatatttaagttaattttattcaagacacttaaatatttgatatttttctcaagaaaattaattaaataggaaaattatatttttgttgaaagttaatttattaattaattttagaccaatataaattagaataatttttaaggatttattttattttattttatataaatttcgaaaaatgtatttaatttttagatacattagattttgaatttagttatacatatatatatatatattaaaaagttaaatttgagttaaaaattaattttaattaattttgggccaacttaaattaagtaatttttataatatttactgagaattaatactaagattgaaaataattttatttattttcagatcaatctaagtataattttataaatattaaactaagatctatatttagagttatctaaattagtaatt

SEQ ID NO: 243236 - DNA, 3422 bp, Cannabis indica
cttttgttgtcctctatttaggtaactcctcagcttcctaagattcatcatagcaacaattgagtttctttactagatgctcaaatcccagatgagctgattcatcttcttccctaactcaacatcatgtgctgtgctgttagctagactcaaccaatctaagaaatccttctaaatctcactctactgacgaatgatctcctacaattgttgaggtgaatgaattttccccaaaatcgcttcctcttcttttcttttcacttggatcttcaactctaaaatccctaaaattgtatctaaggatctcatttgtatgactctatccgaaaaagaaggccctgtcttcttattgttggccttccatgtatctttccccacatttctttttcctttagctattgtcatcgttgtttccatcgaaagaaacgaaggaagagagagaaaagattcaataaagtattttataaattaacttatgctttctacacaatattttcatgacaattcatcacccttcaatacttagatgtcattatacattatatatatcttaccacaaaaggaattttaatctaatatatgtttcaaatattttgttgcacttgtaattactttttttcatactcttggtaataaattgcttgaacaatatttttggcactagaaactatacaatattttcaaaattcagaagtggaacctcatcaacacaattacatatgtagccacaatattttgtattctttcaaaactagatcaccttaattggctttagaataattaatttataacgagttcgcaaataaactctatctctgaacaatttttggatcacaaaatggaagcaagaatgatgccaacttcggttcattccaagaatagatctattttcaaagatgcattatgccttttttttctactagtgaacatgttgaagaggatgacctaatcatgtatattcacaatggtctttgttcaaaatatgtagtctatgatggttaatgtaacgcctttgctttaagcctccaatgggcagccacccacaaacttattagtttaatacgtttgtgtttgtttttgattacgtgcagtagaagggtgttggagaggagaatactaaaaaatttatataaatctaattttcatgaattcagtaaggctctagaaaaccataacaagaacgagatatgatagatctaatagaggataaaataaataactattatttgtgcatactgctgatacagtccgaattcaccacgagcaagttcttcttttctttgaatgcttccaaaattctataactacttgtcttccaaactatggcagtttagaaagataaataggacgagtggtcttcctttttcaatggtaaattagatcacactttggaagctcagatgatgagtgtgagatctttttagtagaaataaagaacacaaagattgtgttcttcactatagcaagcaacgcaccgaagggaaagagataaagagaattctcttaatttcgatctaatttttttacagtgaataacttaaccctttttcagttctgtcaagtctttatttataaagtttaataagtgacaagcaagcaaaccctctacttgtcttagggtataatcttgggggctatcacacatatataaagatcaatacaatacagtaataatgtttaaaaaaaaaataaagaaaagaacaatatcattataccactggaaataatattaagtggaaacaatattgtgattaaaaatttcatgaactactaaaaaaatttgtgaataaaagtattaattataattttttttaactaaatgtacttgtaaattagtaacaattattttatatttaatataatattttagtaacaagtaatattttattgtgacttaaaatgatattcgttcacgaaaaaatatttatattgtgaatagacaaaatatatatagcaccaattttttaaatgacatactaaattgtagttagtaggctttccattaatttgcaataataaatatgtatagtttaactgtcgttatagtaggcttgaatctttgaatccttttttctgcaccttaaagttaacaaatttatgaaaactagtacctactatcaatatgtatcatcatataaaaaattgtgctgtagtttttgtaagtgtcaaaaatagagatatccatccttacctataaatacaaaaatattgtccttaatataaaattttcgtatacatctatctatgtattatggtgttttaggtttaagatttgaatcacatatcttactctataacatttcattctattactctcttaacatacttcatctattatatctagtagtttccaatattcataagtcaagtcttagctttataaagattctaattaaatactcattgtttcaaaattttcgtattgtgcacagttggaggaaatttgtggattgtttggtaaacaaggtgatgatcatgggcagcacaatgttgcatatacccaccaatcagctgagcaagtgcaactcaatttagagcctttgcgacacaataatactactattgcattgcagatcgggtacgtaataagattctttctcttcatctcatagagatagtatttctctatacaataattttgtatcttctggttaattaagttgtcgtcaatattatttgaatacagtagctacgatggtactgctaattcaagaatgatgagtggtcgtggagaaaatgtgggtgcagccccttcaatgaaaaatttgatggctttcaattcagtagaccacgaatgttttgatctttaaggccctaaccgatggagctagcattactttttatatactatccgtttcatgtcttcttaattaatataatgtattgttcgtaaaagagagcacagctatctttagctactcattgggaattacatatatgttaaaagatttaaatattattatacaatatatatacatttatttatgttatctatgtagtgtggagtcatttcatcatgaagtagtactcttacattttgagggtaagttttgatgataagtttaacttttaaataaggtctaacaattttgctgaaaaaaaaaaatctaaaatctaccagtatgtatatcaggccagacctgaaataaagtgggccataagaaaaaaaaaatatttttggacccttatgttagaaaaatatggtatttttcaaagtcagtaaaatatataattttaaaaagggaaaaaaaaaatttaggacccttgagctaggtaagccctaggcacaggcctagcccgcctatgcccagggccgggcctgatgtatatgtataagggatatttacacacggtactgttttttttataaaactttctttttactgttacacgcatatatttcttttttactgtataatcta

SEQ ID NO: 243237 - DNA, 3178 bp, Cannabis indica
tatatatatatatataaagaaatctaatattattctgtgagaacaacttcatattgctcactgacaggacgaaactgtgtataagttgcttgtggataggagtcccatcattattatataggaggttataaaattaataaaaccttaataaattgtgatcataaagaagaactatctatgcttaatttgtactattgaaggagtgtgattttgaaggaacaacactataattgttcttgtggcatttgctgagtggaaacaatttcttatgatattgtttatggtcacacagtttcttctattctatttatgatatttcagaaattttagtgctttcagttaattagattcatatgatagacccaggattggtaggatatatgaaataaaaagggtaatgagctagaatctaattgtataaataggagggtaagaaaaatgaggaggtcatgataattgtaaggaattgagcagtagctcttgggagaagtgaggtctctcaaagcctcgtgttcttgtgtgttataattttaacatgcattatcaactataatatttgccaagttatttctactgccatcttttcacaattttctttatgactttgccaattatatctcttattcattgaagaccctagctggggcacaccatcatattactgttatttggtcatactatgtggcttgaaaatggtacctttgtgtaatctaaacaccgtgacttaattgtctgatattgtaatattgcttttcaacaagataatacatctgatctgtttttaccctgtacagcttggccatgtttttgggtctgagttcttgctgaagttgtatctagccggtgcagtagctggttctgtcttttatttgatgcattctgcctttttggcttcctcgtcaaaggtacagttatacttgacaagacatgacacactctcacatgcatgttgatgcacacacagtcacctccctatacgctcaaatcagaaatagccaagccatagagaagaagaagaaagtctggtattagtgatgtatgaaagacaattacaaaatacttttcctagcttttcaagatagccaggtatctccctagaatattatttaccctgtacaattttctcaatgccctacataaaagaataagactttctatttatacccaactcactaaaactgaccccagactaatcacttcctttgaccagtgttgccacatcagcagttatatatatatatatttttctttatttcttctagagtacactttaagtggcagtggcacacatgtgtgtgtacatatgttaactatggtaaagtgatattgggctacatttttgtagaatggttgagaaataaatagagattttggaaaagaataaatgaaggatagaatctctgctaacactatgctgatattcaatattttgttggataaagtggtgtccgctcgttaccgctttctttttcaataaggacgttttaagattttagtttgcagtggttggcaacttctaaacatgtttgaggactcatgtttttagtttctattcacagggccgacaaccatggatggaccctctaaaagcaccaggattggtatgctttttacaacctttttttaaatatattttttagttagctttgctagctgagcagcaaaatgattcagatacttttgttttgattttgtatttataccaaatctgaagcctgcttagaaaataagtcaacaagagcattcaatccaccagtatatttgtcaaagaaacaactgatgaaagttaagatataatttttttttttacatggatctacatttattagcaattagcatgcacagtttatacatcaattggttttggatgagtaggagtgtcatctggcaactctaaagttatctgctgatcatttgtgcttgtgaatttagggggcaagtggggctgtcaacgctatacttttgcttgacatattcctctacccaaaatccactttgtattttaacttcttcataccagttcctgccattttactggtaagattgcttttttatactgtgtttacactttctaaatcatggggaatcttatgaaattgttttggttgtttatctttttaggggatctatctagtaggcaaagatgtcttggggatgatagaggtatttcctgtcaatggcttttaaattgtgtatttactttcactgcttgtgtgagtttagttgttgaagtgtaacactttgctccatatcttttttcttttcacttctacctttttttttttgtttattattatttgtgtgtgtgtgtgtgaaactaagacaataggtgaatgggaaggaacaaaagcgaaacatagaatcagcaaaaataaatagtctgaaaaatgttataatttcatattgaaaactataatgttaacttcactaaacttctagatttattacataggatattctttttttttttttacaaaggtcatatgtagaaaagtaaactcaactagaacgaaagcttagctagaagatagctagctactgaactgaacaatgatagttgataggatatcataggattttcttaaatcccaggtttgatacatcatactgatttacctccctttccatcaaccaattcaccaacctacaatggcaccaaattgagaactttgcgttactttacaatcttgtgaacatattattacgtggatcagtttgggtgctgttatattctttcagggagacactccaggatcggcacatcttggcggtgcagcagttgcagctttggcctggacgcgacttagaaaggggcgtcccttctaattttaattatatttctaaatttatttgtcagctctgcagattcctgctttgtaatatttttttggtcaatcctcctaacctaacactaacaaggacatctttggatatatcccagtaaatgacgcttccatgcaagctttttcatgatttatgtgagcttccagtgccctttgtaaagtgagacgctgaaccattactaacactggaagaacatacttaaagggaagaagttattttattatttgctaaactttgcgttacattattgcccctaggtgatatgttgtttggtaattttcagacagttagtctgagttattttcttagtgagttgcagttattttcttcttaa

SEQ ID NO: 243238 - DNA, 9185 bp, Cannabis indica
ttacactattacggaaacccaagaactcaattgtatggtaaccgggtagctgcttccccgttaaaaatcatgtgaatattagtttagaagatagttaaaataaacttacggcaattgcaagtcaaatgatttagcaagccacaaggttcgccatcaggtgtatgaacagggcacaggaaaccccaagatctgtaaattcaacgtaaaacaattaacgaaaatccaacttgaattattgttcttattaaataaaaaccacacacatgttaacatatcaaaacaaaagcatatatgcttactcaggtaacagcttccgcacgctggttgtacgaagtcccgcaaaagaagcccctcgatgaaccgcacgaaaatgagaaacgaaacgtagataattaagcctctctgcctgaactgtatagcctgccctctaaacaaaaagtagaatcccttaatagcaattcatattatagtttttataagtaatgcaaatcattgaactgtagaagcatcaccaagaagccatacctgctgcaaatctaaaccagtctgagtcataattcttccggtttttaaaaggttttcaatagctaaactgacttgttttgccggagctttatccataaccttctttacttgagccactgcaattccaaaagtgccatttgaagttaaacacaatgaaacaacacaatttttctgctttgtaagaacaaccatttatatacgtatatgcactcgtgggacattatactagaagagagataggtaaggcgaaagcacatacagtcgcccaaatcaaaaggtttgccctttttgtcgatctcatcttgaagaagcttctttaccttggacaaccaatcttctaatttttcctacaaaccacaataagcaatgaatgagtatggtagagtttcaaactaatgttccagaaaacaagctgccgggccaatttaatgcaccgatggtgaatataattcgaaatgtaagatgtaagaatgaaaattcattattcctttcatattttcatttgacatttctttccaaataaagaggcattaagttcttacttaccttcaaataaagggtaatcaagtgaccagggagtaagacttcgtgattttgcagggaatcggggttgtctgttactgaagtctgatcgatgaatgaaaaaagcttctgcgccataaaactagaaacgggcaagaatttaataaattaagaacaagatgcaaactttaaaaagacaatgacgaattgtagctcacatcaacaaattgaacttgtcgtgattattatcaaggtgaacaaatatgtagtccttcagaacagcatttgcaatctgcacaggccaaaaacaagattacaaacatgaaccgaataaaactggaaaccaaagctaatagtattgttcgttccgaaaaaacaatacaaggctacagatacttacatcagaatagcttgcgttttcaagtccatgcataataggtttgaaatgctctcctaattgagagaaagtgagaattcacagagttaacactataagttataacaacgaaaacactttgaaaagataaaagattagaaagacacaaaagaatgtagaaagtaccaatgtgctctagacattgaatacgattaaaaaggtccaaatctcgaacttcatctagaataatttgtgctctttcccccaatagctgagtcccaacaacaccttttcccttatcatacttctcattatagcagcaggtcaagctcgcataaatttcgtgatcagttgtgtcaataagggcctgcacaatgcattattagacactcgaaaatttttataacattagaagtaaagcaaaaacatgacataaaaatagtagaagcataaacaggaaaaagattctaacctttaaaacaatgccaacgggaagcaagtactctcttccctgtaccctgtaaaaaacgaaaaataagtaagtgcatttgtacatacattgtagttgtattggaaagacaaaaagcttgaattctttacttgagtcaaacctaaaactgctcaccagaatccaagtcttgcacttccatttcgaaggtagtacaatttgattgtcactgaagattcatcttcccttacacatctaagggtcaaaatcaaaaaatcaagcgggtgaacaaaaatcgaatatcctttatagatgtttgaaccaaattttagttacaacaaaccaaaagatctacttttaaaacatcagaaacttaaaagatgagggcattatcatgaaaggaaaaccttataataactgctttatcagtatatccttctcgccgatcacgaaatgaactacgaacagtactcattggctggagaaattaaataccaatataatgttaaaaccaaaaatttcttcatactaactcaaattttcgattactaaattaaagaaaaaacaatactgataataatcattacaagaaatcaacaattctcatcaaaaggctcagtggttatattataaatatggcaccaatccaatcacaaaaagaggctaaatgcatgatgaaacagattacttacatagttcctttttggcattattatgagtcgaacgactctttcaagcccattcatgatgaagtaactaagaaattgaaagaaaagattaacgattagacaggtaaagcaagaaatataataaaagaaaaaaaggtaagaaagaaaaggcacgagaagactacataattgatgaaatatataataataatgaacgcgaaattagagcgctgaactagtttcttttttaatgaaataaaatctaacagcagatatgggacatgccaataattccaagaagactagagaaaaaaataaatccttgtaccataccccaagttcattttaaagtacatataagcttaaaatactcacccacccatctccgatgactcttctttgtatgaaactaacttctgaggatcagcatgtctcaagtggcaaagctttgactgcattaaacaaaaacatcttatcaaaagcatgataagaacaataaaatgaaaaacacaatgcacttcaaatatgactaaaataattgtgtaataggcaactatggattaagacagaaagtttttcggatcctattttagttgcttacttctcaaattacagagtgttcctaaaaacatatataactaataaaacccttagcccaattatcatgtaaagactaagaagctaatactaaataacacaaacctttagcattataggcatctgcccgaaattgaaattgtctcttatagcaactcctttattattatactcaaagcaaacttcagccatgaactttcctgtataagagattttagcctgccgacactgtttaaagaaaagtcattaaatccattgacacttatgataagtccaagatgataacatatgcacatttatatactctacacacaatggcagaaaaaatcttacttcaaaagggagaagaggctccttcatcgttttcaacatttgttcctttaccggtgcaaataaatgagatttccccagccatagtaagtgagaagtcaagaataaacaataatcgcataatcgcataacaaaacaaaagaattaacaagaaagtccttttcttttttgtttcccccggaaaccaagatatagtgaaaaaaatggaaactatattttatactatactggagtgtagcattgtcagatagatttaacataaaataagaaataaaaatatagagaatgagagtgatcaaaaggatattcctgaggctggtcttagtggaaggatcatagactgtgataggcttaatgcaaagtagtaatgtatccaatcctgcttcaacaaaatgatcaaaggactgtatgtgatgtctaaacagttcctgtaactcgtcgaaattgcctggcgtgcccatatccacactaactcctttttcagtaaagaaagaaaaaaacagtcagctaaaaatctttaacaaatcccaatttttcaacacaaaaattcaatctttcaaactacaaagtaaaaagattccaatacagaaaaagacgggcaattccatccatcctaaaaataaaagcaaaacttatataaacaagcttagctctactgtaattcaaggcatttgtacaaattgtcttaccttacattcaactttaaaactaattcaaactcaaaatgacttgaatcccacaaaaattgactaatgaactacctatgaaaaatgagagtctccaattaatccataaaaatataaatacataataacaccgtgaagaatgcaaggaaggggtggtaaagtataaacctttattatcggtttcagcaaaagcctatctaattcaactctaaaactaatttaaacccaaaattacttgaatcccacaaaaattgacgaatgaactacctaaggaaaacgaaagtcttcaatttatccaaaaataaaaatatatagaaaaacaccatgaataatacaaggaatggatgtaaagtataaacctttattatcagttagttacttgtggacgaagaatgagggcaacagccggcgaggaagggaaattgaggagcggcggtttccggcgagagagagagtagagaggtaagggatgaaaggggtttatttagggtttaaggaacaatttattgttttgcagtttggaccgttgaaactattttctttttgtttttgttatttttctaatattacatttacacccatggttttgttctatttttacatttacacccctattattttttgtttctctttggcaaagtgatagatagaattgtccttaaataacttattagtagattaaaagattaaatgacatttattatccatattttcatatggtgacacgtgtaattctaaaagcaattacagctcggatacttcgagcccaatagtagacccaaatagaataatagacttggtccattatcgaaatcaagtcttccatatgacggacacatgactcgtccaagtgaagtactcctctagcatagctcgtatctagaagactttagccaaagtgtttgaagaagtagtcaaataacatccgaacatccaactctatatcatacttattaattaccagatcgtatatatcagaacttaactttcaagatcttgttcacatattatatcttcccaatataaaaaaagaataattaagtatcaaacattaaatttctttattatctattctcaagaaactaaactccacacactcgtaaaatgacaccaaacatgtgtttggttttacattatcattcccaaaaattaaacccccacaataaacaaacacattataactagttatattttattgagcattgttattaggtactttaaggtgtctaacatcatatcgatgtgatatattatgagtagttaacagtttcttatattaattattaaattaaaatatgtgagacttaatataaaatctaagatgcttgtagtgcttggtaacttaagatgtccctttcttaatatttctcacctttttctaatagaaagttttttttattagaatatctctaattattctctctaaataatttttacttaaaatagggaaattgtctttaaaaatagctctaactataagaaaaggaaaaaaaataagccactacattacaatgaggaatggatatagttaagtattaaattattatctatgtgtttttttattggtaaatttaaattaatttctaaataaagaataaaaatttaataatctagaccaattagagactgtcacgtgaatattaacttaacacttaatgaccaagtagctacgtaagtttgagaaatataacttaatattatcatagccaactcaatggtaggacagtggggacctacgcttaaggcccctaccaagcccaaaaattctttaacaaaaaagtcttaaatttattttttacaaataccatgttttatattttaattattatttattaaaaaaaatatagctatttttttaaagaaatacctaatttatttgtttaagatattacatttaatattttatttaaataaaatacctaattatgttttcaaaatactacattatagatttttactacaatatataaaaaaagctcaattagattttttggcccaaagcccctaattggcttgaaacgggtctgtgtattatgaccgtcaaaaattaaatttaagtatttatctacaaccggcagataatttaagtatttatgccacaagttattcaaaaattaataaatttaacaaattataaagataagagattttgcattgttaatctcatacaaaatgaaataataataataataactcgaatggatatgatatgtagaagatgccgacacgatttatatttataagacattttttaatagaatatttataaaaaataaatttgagagaaaagtctaaagttaaataaagtaatattccatttacaaaaaaataaaaaataaagtaatatattgtcatcatttatcaatataaataaacttttattatattattttatttggtttaatctcatttagtgactactttcactttagaaagactacattttttaatttaaatatttattttatgaagtattaaaaaattcaaaataattttacaaaagctatggattagactttttattttgcttaatgataaattgaactatttattttctaaaaaggtacaaaataatactctgaatttattaaaataaaagttaataataactcgatgtagagttgttacgacaaatttgagtatatttttacatatattcatgttagaaattatctttaagttagttctattaagaaaattatcgaaaattgaatttaaaatttaatttgttattttacaaaagagatagtctaattagtaatttttacaaaacacaaaatttaaaataatattaacccttattaggttatttatgagaaatatattattaaattgagataattaactttgcaaaaccaaagaaaaaactcacaataacctcaaatcaaaagagatgaacctttcaaaacaataattaaattattttattttaaaacaattattaaaatcaaattaaataaaaagttagttaataccattttagatcttgtattttgcaaaagttattaattggatgttctattttgttaaataaaaaaaatacaccatgtattttctaaaatggtactaaataggactcctaaattaatttttttaaataaaatttaataataacctaatatagaagtgttatgacaaatttaattacatttttttacatctgttcttgttaaaatgtaaagtcaattttatcatttaacaaaaaagaaagttcaactaataacttttacaaaatcaaaagatataaaatagcattaacaaaaaaaatggtttggacttaataaatgaagtgaaagaagagatgatgagtacatctactatctatctgttaaaagaagccgccaaagaagattatgacatttagttatattattattattatcattaactaaagttttgagtacaatagacaacttggatatgaataaatgctatccaatacatatccaactttcatttgtcaaagttggcaactttgcctaattaaatagtacttttgttgttatatatatataagaaccattaccaaaagctcaaacaacacacaaattatcattcattcatgtcttcctcacccaacaacaatagagccttaatggctctctcattattcttacatcttttcctaattagtctttccattacacaagctcaagttcctcaaaatgctacttttcaatttgttaatgaaggggaatttggtccatacattgttgaatatggtgcagattatcgtcctataggcattaacaactcaccatttcaagtatttttctataacactacccctaatgcctttacccttgccattcggatgggcactcaacgagctgaagcgcttcgtcgatttgtttgggaggccaaccgagacaatcccgttggcgaaaacgctacactcactcttggagttgatggaaaccttgttctagctgatggtgatggtagagtggcttggcaaaccaacacaaccaataaaggtgttgttggccttgaactacttccaaatggtaacatggttttgtatgactcaaaaggtcattttgtttggcaaagttttgattacccaactgatactatattagtgggccaagctttacgagctggagctaaatacaagcttgtaagtcgtctctctgaaaaggagaacaaaaatgggccttatagcatggtattggagcccaaaacacttgctctctattacacaagtaagaactctcaaaggcctttgctttactatgacttctcatcatttgctcgcagcacatttcaaaaccctccaatgaacttgacgttacaagctgattctgacccttatgatggttttgcttacgacatgttgttttcacccttaaatggtgggggttacttatttacaagacccaactacaacagcacattgtcattcttaaggcttggaatagatggaaatgttagactctatacatactatgacaaagtggattggagagcatgggaagaaactttcactcttttcgatagacaacaaagtcggggttgggagactgagtgtcaattgcctggacgatgtgggacttttggagtttgcgaagatgatcaatgtgttgcctgcccttcggagaatggacttttgggttggagcaagaattgtgagcctaaaaaagtaaagtcttgtaaatcaagtgagtttcactactacaaaattgagggagttgatcatttcatgagtaagtacactaaaggtagtgcaatcaaggaaagtgattgtggcaataagtgcactatggattgcaagtgtttgggttacttttatcacaaacaagcctcaagatgttggattgcatatgatttgatgactttaaccaaagttgacaactccacccatgtgggttacatcaaaacacctaattaattaattactattattattattattaaatttaagtgtgtgtagtttgtagtaatgcttatttgggaataaagtgtatccaacacatgttgaatagtttgattgaatatataatttgagtcttttgaatgcatgattttcattt

SEQ ID NO: 243239 - DNA, 3029 bp, Cannabis indica
tagtcacaacacaataataataataatttataattagacacaccattttctttttaatcacaattttattgtgacgaaaataaagatttattatagtcatataatagaataaaaagtatatggactaaaataactttattatttttattttataattataaaatattcaaaagaaggaggaatatagacctttaactttttttattaaagtattattttatataatagattgtaattataatatgactttaacatgtaatcatcattacagtaatagattataaaaattaaaatggaaaaataaataatataataggatcacctaaatattttcataatatacatcggtacttcagtggatctctctcggagttagaataaatatatttttgaacttttctttaaaattaaaagtgaatgttcttgcatgaatctcaactatcacttgttctgattgtacatattaatcgttttgaactaaaataaaacttatcttattcactctcaataattacatcttagtctcgagaacataattcagacaaaaggaaaatagaaaagtttgtttggtttggtttttggagagtacatgtagatacattattggattattgactcaccccactagccaccgttgttagtactgcccaaacagattgaccaaagtaagaaaaacactaattacaattgaccctaaagaaaaaaaaacatgtacactaaaaaagccgaggaaccgtgtgcgcacgttagaaactgagtactttcttgaccacgtgattatatgagaggaaacatcgttgagtcttgagggtgatggagggtgcgcaatgcactatattataaaactattaatttatagtgttttaaaataacattcacgtgtatatatagatttatttattgcatggatgacttttgactccaaattaatcgtacgtgagccaacaaaaatgttggtttttaccttccaccacccttccttttccacgtttgctccactttatactatactcaactcaacaacactatttcctatatataatatacaattaatcatgactaaattaaaaaaagtaacaaactttcataagtactacgaaagaaagatactgtttatagatgagtattgttattagataccagtagtgcttattattttctgtcacgttgcgattggttagcgatactccctaaaagttattatattaaactttatgagactcgaaacttagttggactaatagcgatattgacacataagatgatactaggtgctactggtgccctttactcgtttatagagatatatataatttgagtgcatctctggttttgtgccatcacatataaaattgaggagtattattagggacttatattttaataaaaaaagaaaaagaaaataaatgtattttaattataattattttcattagctaataatatttaatgagatgcttagattgacatatatatagaggttataatagatcggacagtacggccagctatattgagaattcaagattcgttcgtggccgaaagctaggttgaatatttggtcattggttcatatatatatatgattgagttgagtaataatatatattattattatttcaatgtataatattataattttatatcaatatccttccattattaattatcttcattattaatccaccaaaaaaaaacagaatagaaaattatatggccggctaattatgtttattttggagtaagacagatgaagattaatagaacataagacttatagagcttgagattattaatcatatatatattaaggttgcccctattgttttaatttatatatttatttatatacattgcaaatgttaaatatatccttattaataataaatattgtttgtttgtttgttaatttgttcttttataatatatttgccttccttagttaggctgtatatatccatatatacgtacatgtttcttgtttttttgtttctttaagtaaaagtaatatatatttatgtatatcataattatgtatatctcaaagactgcacaactatcgttatctttaatattatcatatatactttttcttatcaacggatgattatgattgtctggtgtgtatatatatatatatatattatatgtacgtctctatatagtctatatatatacttgtaaaatgtgcatatatatatatactaatatataattataataatatattcaaatatatgtagacaagacaagttcactttttttgcggtataaaatttggttttgagcaaatattaaatatgtatatatataaatatattaggtattacttgtttagagttatattagaataattattatttacataataataaaattaaatttaatataatttaattatatttttttaaatacataaaattttaatataattttaaatttatctataaaaaattatatttaactaatattattaaacaataaaataaataaatgagtttagatattttaaataatataaaactaattagtttactataaagttattaaagaaggaaaatgaaataatgcaatcactcattgcttgctatgttcagcattgcagagaaacatttattgtgcctatacctgtcactactataaaaagcatatttcccgtcaatttttaattgacattaaaaaaaattttgtcggttcccccaaccgatgtgtatgctgtagacgcaaaaaatatctgtatttgtgtcgattatcaatcgtcattttaaattattttcgtcggttttcaacactcgtaaacaattataaaaataatttttacacttatctcgtttataatagacacactaaatagacacacaaaaaaaaaacttcaaatctgagcctaaataaaccaaatttaagcacaatcaaaaacaaaaataaacacaaatcaaaaccaagacctcaaatattacacaatataaatacaaattgagaggcaatgagagagtgctagcaacgaagataaggagagagagagagagaga

SEQ ID NO: 243240 - DNA, 4845 bp, Cannabis indica
ggaatagccattccaccaaaatggttgaaagagcattcaattggaatgttattccaatactttaaaatgcaatcaaacaaagaaatagaataaaaattgtttcctttctattccattccatttcattatctccaaccaaacaccacctatgcaacactcaactttcatataatttggtctcatttcttgacccaaatcacccaacaacacgcaatactgcaagtggcaatctcacatcaaggcagagttttccaacttccatttgttttctatcttcaatcaaccatactagctatccaactttatttgacttgtacattttcttattttaattagttgaaaacaacaataataaaaaggatttttaaaaaaaaaaaaacaaaacaataataaaaaggacaattaatagtactattagactttgtcaacaccgaaaagaatagaaaaaataaatgtattaaactactgaatttaatgataggtgtgaaaatattttcaaaatataacatgattcaaaaatcatgaccatgcacacttctaaaatataatcatgcactaaatagttctaaaattaatatttaccaaacaaatttgtgattttttatttttcaatctgaaaatttgatctgtgtaaatcttttaatttacttggaagaaagtggatcccaatttgataaaatctacttgacaaacttttttcatcaaaacatgaatgtatatttacctaacactcacacacacattcaaaatattatgtaagcatagaaaaataaagtctaaatccaaccaagtaagagcataattcaatcgagtgaccacatcgaaaataaagcctaaattcaataaagcatagagcatcaatctagtatagaaaccatgcataatgaattagcattaaaattaagcaaatacccaattttcccatcaagagagcagaaaaatctgaactcatcagttttaaaaatttaattcaagtttaaacttctacaaacacccaagacaattatttacacctacactatacatcacattatttgaatttacagaacatatatttgaccgaaacaaaaattaaaccaattactaacctcgtatgccaatttccaatggtgttggacagtgggaaagtgatgaccttcacagtggttccgtgctcgtgcagcacggcgacggtgactgacggcggttgttcctctgggtcagtcgacgttcttagggtgattgtgggtgatcgaagaaaggggctcggatgggagagggatcgatggtcggtagagaggagaaattagagggaaaataagaagtgaagaaatgacaagcttttttgtccaattataaatttatgagcataattttctaatgttcatcaattgtataaattaaaggatatttttaatcatagatgctaaaatttccttagagaaattcatgccaaataaaataatttaattaacaacagttgggctgtacaaaagagaaattctcataactatgcattcagagttcaaaaaaaataagtctatgcaaatcatcttaatagaatcttacattttagactgaagatgttatagcatcctcaccttagcaaaccaaagccactttagccaagctgatgagaggagaagaaagactgtcaaacaaaaaatgagcagtactactccaccaggctaggctaatttgattttaaggttggagctcctacaagtaaacaacaagggtatatacaacatttgaaaaacaacttaatgtcaacaatctctgtataagcaactcaatgtcgaaattttgtactaagcaatacaaaattcctaccctttcccacattgtcttttttttaatacagcctaccagagcattcaagtgagccacaaaagcaacttttcttcttgatatcaccatttgaatcgcgaacctcatctattgtgtaattgtaatggtaagtcaactccttcagtggaggaatattctccgcagcgaaaagcattatgtgagggattctcttgtcctggtgatcatacaggacgttttgggcataaagatttgggttgcaacaatgattgacaaatcttcctatattgccatactcagctgcatcaatggtaaaacttccttcctccgcagcttcgcagggggcagaatgtgtgtcaggctttagagtggaaagtccaccccaaagtgaattgtcattgtagttattcccaatatcaaagaggtactcgtcgttaccagttcgttcttcagcatccttctccttaagaagctctcctatgtattcgcatataaaacttcctgatggaatgaagttcagtgatctcacaccccatcccataagattcgttttgaagacttcaagctggaacttgataccatgttgactcactctattatgacaagaaggagggcacttgcaagaaggaccacactcataaacaaggggcttggcttccacaatagccccattaaagttaaatgggatttcgcctccattcttcacggcacaagagcatttatcagaatctgagcatccagagatacagtcacagccctggggagaaggagggtggtaccaatcaggatatatcaagctagttgtgtatttaaatggtggaggtttgtcatcgtttatggtattcacagcacatattggaattttctccttccctcctgaaatgtcatctacacagacaccttctcttactttaaactttttactcttcttaacttctttccgagcaagctccggttgaccagggattctcttgagctgaaacttgaaaaccaacttaccatgtgaccctatctcttgccaggacttttccaccaaataaagcccatcgtatacataagtcttcgattttccatctgaagactcacctccacggattaccctaacaggattcttttcatcaatactattcttgagagcaagatttccccgttcaagcttctgatcttcaggttctttatctgaattcatcacatttcctccttggccagtgtaaaccaagacatctgaattatccaaatcatcataatagcctccagatgcaacaatacttgttgcaagtatctttccatcatgcttcacataatctattccaccttgagttggtcgatggagaccaataatattaagctccaacctgtactggaactcatcaccaacttcgacaccggggacagctcccaaaattttgcctgtgtttacacatttgcctttgtctttgataatctttgcagctatacaatcgaacctcttcttctgtttctcttgctttgacttagcttcctcttcctgcaaaagcttccgacaaacagcttggaacagacgcaaagtctcccttactttatttcgggtaacagttccactattatcatgatcattactacttgaagtaccataatgaagaggaggaacaaatacatgagcaccacgtgaccttggagccacgtgaaaatcggactcattaagcttgagagaatttttcttgtcctgaataactagctgacctttcccttgaggggaatctggagaaatcatctgtacagactttccttttaagtcattttcatcaacccttgacctggcaacactcttctttttatatcttcctacatgagttatgttatcaattttcttacttttgattccactcctaccagcaggcttagtcatgccagaactctttccccgcctccaaggacaatgtgatgcagccatcaaaccttgcactactaccctgtctgatgtaagatttactgcttgcaactgattctcagaagtaactgaaggcatttcatttggagcttggccttcagagtaaacaaccatctcctgacacaagttttcttctgaaccttcagcgtcgccatcgtctttctcaagcactgtctcaaactcatggtcccaccagtataacgcttcttcaaaaggaggctcattactattttcctttttccccttttcctctattctctcagatgaaactacacatttattcttattcctcttttcttctacagcattctcctctggttcagatctaacctcatttctggctactttagaaccattcccttccaattctatattgtcagaatctccatgtaccaagtccttgcttccaactttcaaagcagtagtcacagcagcattaactatttctgtcaagaatttatcatccatttctagttcagatgcctcttgacaagaacttcggttcttcacagaagagagtacatccacagaatcttttggtttaattgtgtccctggttactttcatatcattcaaaaccgatttatttctaaacaaatctccatcttcagcatcccctactgtacctgcaattttcttcactgtctctgacataactttttcatttgcttcagattcaaacttctcttgagaacttatgttttccaaggaagcaagctcttccaaaggcttctccttactacgaggagaagcatttattccacaaaatttagggaagtctcggatggctgaaactctcctccgaggaggataattcctagacattgttttcacaaaaccatttccattagggacagatctgaggccattcatttgtacaccttttgccgaatcagatgttccattttttaggccatcactgcttccttccttacaatttgattccaacaaagtatccatacaaggagtgtctatgtcttcagtaactaaaagagatgttccattttttaggccatcactgcttccttgcttacaatttgaatccaacaaagtacccatacaaggtgtgtctatgtcttctgtagctaaaagagatgtttcattttttaggccatcactgcttcctt

SEQ ID NO: 243241 - DNA, 1578 bp, Cannabis indica
aaaaaatagactaattttttttataaacggtgaaacaaataaagggtgcatcaatacatctattttaaaagggtgcattgtagaatcactcattattttataggtaaatagttaattttttaatatttaatatttacaaaattataattattttttattttcgtcaatacaaattttgttaagcataacacatataatgcacaaattctaaataattggatctaacggaaacatataatactagttatttctaaatatttttttaataaatgtaaagtgaaaactttactgataaaattagagaaaaatacaatttaataaatatttgatacttatacttctaaaaaaattattaaatttctgttgcttacaaactaaaaattttgaaatcttataccatcatttactctaattttaaaatataattactaataagatctaatattttaataatactatgagttgatcaactaaaataaaataatactatcaattattattatttttaatgctaatatcaacattctacttaaaaatagtaatctttcgaacactttttgaaacaaattcatcaactaactcttgatattttgctatctccaaaatatcatttttaatcgctatcaatgctataatccattaagctttttttgaaacatgatagactgcaagtaagactttaacaactttaactttaaaaaatttatttctacatgagcaactgacgtataaataatcaacaaaattatatatgcaataattttttttagaaaacaatctatgcctttaaaaaaaattaatatgtgaataattctcattttttctctaagtaagatttgttttaataacttcaactctacacgtaattcattcccatcaatatgagattgtttattatattttaatgtcttttcaaaatgactacaacaagactttaaatttacattgtttaacgattgtaacttgtcagtttataaagtagaaaaaataattaattctaaaaaattctttatagatgaggtatttaaattttcatcaaattattttctcttcgaattgtgcgcctttgagaaaaaattaaatcgatattcatttcaatagtaatttctttagcattattcaaggcattataaaaaaaaaatattaataataaatataaatataaaacaaaaaacttattaacatgaaaaaaaaaatagattaacaacttaccttcaaaaatatataaaaaaaatctcatgaggtctccttcaaaatctaatttcaaaccctaaaaaataatatccctagtcaaatttctaccaaaacttagactatttatcaaaataaaacacaaatagcttacattgataattctaaacaaaaccttataaacaaattgaagaaaaattatctcgttcgttgctgctagttcaaaatgaagagtatagaagataagtggagaagacaatcgagtgttgggcatttttcatttgactaggctatcaagccttgctcgacgtggcacaccagcacgtgctgttcacatccagcacgtgctagatgaatctctttttaaaaaatttatagtacactctt

SEQ ID NO: 243242 - DNA, 1809 bp, Cannabis indica
ataaatattcaagtatttcaataaattcataaacaaataaatcagaacaattcaaaatctcaaatcaagaaaattaaaagtttagatttataatctttacaaatatgaaaaacttaaatagatctatctatcattgttgtctgttgttaccgttgcttagttactgaattcttaaataaaaaccactaaaatttatataaaactaatatttacgtggctcgccacgtaactctcatctagtatataattaatgcccaaatgttcattaactgatcgatcatatatattagatatggtcccctaacttccccttaatattcaataacatcattcaaaaccttgcatccaaatttaagtacatatgtgtatacatgtttgaataaaaatcaaaatgtatatgatttaattgtttatatttacgtatactaataattgagatattatttagataaggtgtatatatatagtataatatgaataacttaatttattattttggacaatattgaataagcatatacattatacacacatatatacttatacacaagacaacacctaggcaaacaatttcacatggactgcctaccaactgatcatataatattattggtatatatatgtgatatatagtttcagacatatacatttaattcctatatatacattctttgaatttgttaatttcttaataaaataaaatagaaccttgatgatgatcattattgtatatatatgtagaaacaacataatacgtacgctagaattgatagtctgatgactatatttgatattttttcatgcatgttaatttgttaattatatattggttcacattttacatacgagactgaattttataataacaaaaaggtcattgttgatgggacgtattaatgttaaaaagtatgcttgacaatgtaaaataattaaactccctatagatggacacaccctgaggcaatgtctgaaaatgtcatcatcatcaatatatatccatcattattactattattattattatttgaagaaggaaaatgccaaagtaaatatattaataattaatgagaagatttatgaatttgaaagtgaaaagatcgattaaaaggagaattgaaaatggaatacatgcatggtgaacggtgatcactaatgagttaatttataaaacacatgtgacaatgttggaatgtcggcaatgtcgttttttgtattcaaagaatctaattctaaagtcaaaaagaaaattcaaaagtctgtgtacgtactgtgtaagggcttaattaattacaattagtaaaaatactcaactataaaattaattaatgtataccttcttttacactgcgcaataccggtaggctgcacaaaacttttcatggctttgcatgtgggtttagttttgattcttcattgtgtccagttagacattaattgttaattgaattttcattgcacttattaccctttttaattgaaggcaaatttatctccctttggatatataatatcattattaaaaaaaacctaattatcgtgtaaattaaaaatagcgtgatcagttgaagaaattattgaaaatttgtcttagacatccttgagtagcttgaacataacaaacttagttccttttatttgacatatgctagattgtctcccaatttcatattccttgttggaactatttatgaaattatgtaaaaataaaaaagttaagtgtgtgagtaggaatctcacatgggatagaaacactttatttaaagtgtatatctagtgcaagtttgagatataggtttgggccccaagggg

SEQ ID NO: 243243 - DNA, 7144 bp, Cannabis indica
caaaaaaaaaaaaaaaacataaccaccagtaaaaattttgttgttttttctaaaatgaaaaaaaaagtcatttttatttacgaaagtccacaaactacccttccaaatggttcaaagctcagtagagtaggtccctttataaaactagaatgaccattttatccagttaatgcctataatttttttcttcagtttagggtcaaaatagtaatttcagtaacttagtcaagcacttaagcggtcatttccataaaaaataactctttttttccttttagaactttttggttctcaatctccgaggccaatacaacccattattattcattcgctgttatcaggtggtggtggtggccgtcgtcgtagccgaattcaaacctgaaaaacccttgatagcttatcaacccagatggtcttatcttcttctttcctcaagtatggactttgaagttgaagccctagtgcttggagctcagacatcgttctctgttttcacgctctggtacgtacaacttcaaactctcttcaccttttactttctcctttgcattttacaccgttttttttggctgtcgatgtttctgaaaatctttagtttcgttatcagattgcttttgcttcatctgggtcagtctctctgtctctcttttttgtgtatttgccatttttggaactttacatacccattttttctattaccgagtttgatgaactttgtttctggttgtttttatatttttgggtttcttatcactcgtaaacagtgtttccttttctgggtattctatttctcatcgttatttttcttattatttttttacataatttttttttccctattttaagctgaacttgagcttttgatgctccgttagtagcttaagaattcgttttgagagttgattattgcgataaccatgattataatatgctatacgaatgcttttggagctattactgtcttggttatttgtgtggtgcttttagttaattctttaaagtttagctattattggttttgactcattttgaattatatgggggagaatattgctgcttcttctgtttctggtacaatggttttgtttgtttactctaagtagtaatataaatatataaatatgggattagttaactaattattgctgatgcctttaaagaattgaattttggttttgtatatatcatgtgctaatgcaacttctttgtttcttactttatgtttcatggacccagctacaaaattgaaaatataaatagaaatacaggggccaacgtatttgcatgtattggattctgtttagctgttaaaatctggttgaaaacggcaataaagaaccatttccttcttcttcttcttttggggcaaaactagctttccaaattgaactgttgtagacttgtagttccttctaatgattcttattgtacttgtagcttctttctgtggctaggatgaccttagttacacatatgtttagtagttttgtacattgtgcagtggaaaccaagtcatgcatcatgtaactagtacttgttctgttgtttatccagggggttgtcctatcgagctagaatgtcccagtatattgtggttcttttatgtaccattttttgtcttgcaacatgcgatctgtgttctaataatggcaaacaaaaatcagcacaatatgaggcttgtaggtcttatgaagatcatttgaatgctgcctttcaagatgttagttcggagtatggaaatccaagaccgtacttaaatattgatagcatttgtactggttcacaagcattttgcttcccttcaactttgcaaggtttgtcttctaacgatcaccagcttgaagatgctgcaattgatgcttctggtagtcagtttgatgatcctataactgtaggatcagctgaagatactagggaatcgaagaataatagctggtcgatggattatggcatgtttaagttatttaatggaagaactgtttcttgctctttgaattcaagagaaggtactaacaagttatcatccattcagttagatagttcaactgaaaatgatgtttcttcttgtaatgcgcctttgcttaatcagaagagcacaagttctaaggctgaagtcaacattgagatagtgaaatctgattcttttaaaggttcttcctctcgtcatgtagaaattaaccctgcaatattggattggggtcacaagtatatgtatttcccttctttagcatttttaacagtggaaaacacatgtaatgacaaggttttacatgtctatgaaccttttagtactgactcacagttttatccctgtaattttagtgaagctttgctaggacctggtgaagcagtttcaatttgttttgttttcttacctagatattttggttcaacctcagctcacctcattttgcaaacaagctctggtggtttcttgattcaggctaagggttttgccattgagtctccttacggaattaagtccttagtagatcttaatgcttcttctggtagaaggtggagtaggaatttttcattgtctaattcctttgatgaaaccctctctgtggagaaagtaactgcatgggtatctatttctttagggcagacttctgtttacacagaagcaatttgtagtgtcagaaactttcaagatccagagttgctcgattttccaagcatcgatgattggctgcttgtaaggagtggtcaatttggtttgccactgatggggttgaggccccttaggaactgggagattggtccacacggcactgaaacttttatagaaatagaattctcagttgaatcaaaaggaaaagtttttggtgcattgtgtatgcaattgcaaaggccttcacaggacaagtttgacactgttgtggttcctcttgaagctgaactgagtggaaaagaagttcatgaggtatcgggatctatttcagcatctctggaggtattatatccatataattccagtgaagctgtagttgctatctctctacgaaatggtgctcctgtccttgtgaatgttgttaagatcgctgaagttgctgaaagtaaagtattgcatattagatacatggaaggcttgctactctttcctggcagtgatacacaagttgctgttgttatttgtagtcatatgcgtgattttccgccagatttacctaacatgtatgagaactgtaaattacatgtactgacaaatgactcaactagtcctcacattgaggtttcttgccaggaaatattcaatgcttgctcaagaaatttggaagaatcttctgttggatatgaagattcttctgttgaaattggtgaatctggaagtagcaggacagtacccttaggcaatgacttgagtacgccatcagagaccaaggtttgtacattctattctgtgtataggttttaatcttatagtaatatctctaaatgtcacattacgaaaaaaaaaaaagaagaaaagaaaagatatggacttatcttctcttccaaatgttctatctttatctagagtaatcttgatttaattttactattcataacccacatattggggtagcaggatatataaagagcacatataggaaatgttagctagttctctaactggggtggccgaacggttgtctgacaagtcaaaaaagaaatgaaagaaaaggtataaagaataagagagaccaagggaagaaccacatggctagttttttgggggaaaggataaatagcttatagttgttggacaatgaaaaagatcagacttttttacttagttccccccaagaaaatattattattgatttttataatatcatttgagaatactgtagtttgtgtgtgtttttttttaaaaaatggtgtctactggttctaagatatggaatcttggaagttgcatctttttgattgcgtgggttgcagtaacatgcatggatggcatgctcatgttaatttgcttgttagtttttgcctcttagtactgtcatttgttatcatgaccattatacattgctgaatttgtgtgttgatgcaggcattagaagcatcagatgctgacgaattagtgctaggaaactggaaatctcaagggactagtggtggcatgtccgtgcttgttgataatgaactattgtacccaatggttcaggttggaagctttcaagctaagtggatctttgtgaacaatcctagtgaagagccagttattatgcagcttattcttaactcgggagagattattaatgaatgcaagggcacagatggtcttatacagcctccttcgtcaggtagtttggttcacgatgaatctaatattccaagcaggtatgggttttcaatagcagagaaggcagtgacagaagcttatatacatcctcatggtagtgcatctttcgggccaatactttttcatccctcatctcgatgtgagtggaaaagttctgtcctgataagaaacaatctttctggtgttgagtggctttctctcaggggatttggaggttcactttctctacttctgcatgaagcatctgagcctgttcagaatatagagttcaacctcagcttaccgatttctgtcaacccctctcctttgggtatctttgctaacatggaagacacttcttattcctgttcacagccgctattgaaggtgctatatgcaaaaaacactggtgatttgccattggaggtaagaaaaatcaaagtgtctggcaaagattgtgaattagatggttttgtggtacacacatgcaaaggttttgctattgaacctggagaattgacgaaggttctcatatcatatcagacagatttttctgcaagtgtagtacaccgagatctcgagcttgtcttggctactggtattcttgtaataccaatgaagggtaccctcccaatgtttatgctcaatgtctgcaagaaatcaattttctggacacgctttaagaagtacactacggcgatatttgtcgcagcatcgttgttgcttctgatgttctggttcatattgccacaggtgttaaccttgggctcctatgactgtttctgcaagagttacaaaggttccttggccactactttaagtacaggaaaatgtcctcgcggtcttagccttggaaacagtaaattttctttgttctccgagatggataatttaattcccaagtcttctcctccggcgtgcatgggttatcctggttatcaagtggggcagcctgatcaacggactcaatatgtgagaccgattctggaaaatgataaacaatctaatgatttgtcatatagaagaaaagagagagaattaccttcttctttgttgtcacaatctctacatattaagaattctgacatacaagaaacaccccaacctagtaatctcactatcaatatcgagaaagaaaaaggaagaaggcgacgaaagaagaaaggtgttggcaacaagttgacagcactttccgaagtttcgagtagtcatagtgggaactctactccttcatctcctttatctccagctgtaacaccgaaatatctgtggttactacaatcacaagatgctgcggaacaaagtattgaaggtagaaatcatccacactctcaagtttcaaatcaacaacactctgacaaggaaattgttacaaaatctatttccaaggccaacacattggagtccaaggctattgctaagagcccgtctgtctcaactcagcagcagcccttggcgccaagaaaaacagctactcctagacctgtgctattgtcctcagccacatttccttctgctggtaggcctgcaccgacgaatatgttgcactcttctccatttttggcttcaagctctcccattgctgcgcatgcgcgagctcctggatccagactcgatgagcagaaaaacatgaaagcagaagagaaggcttccattggggacaaatacacgtatgatatatggggtgatcatttttctaggcttcatttgatgggtaagtcaacgaatatgtcttctctattatctaaggctagggaagatgattatgatagcttctttgtaaagggtccacagtccttcatgaccaagcctcaaccaaaattttcaagtcaccgtcaagagggctaataataaagtatgaataatttattatattttttttttgcttttcaactcatttttagactaagagtagagtaggttttggccttgcagcataatatttagacaaacacatttaaaaaacttggaatagaaaaagaaaaaatgaaaaaaactaaaaaaaaaaaagaggcttttaaaaaatacactcacacacacatttgggaatgaaagaaatggaatcaaagtactacaacggaataatttatgttttgtttggactaagcatgcaattgacattatattaaaaggatgcaataagtatgtaaaacaccatttgataatttagaaggaaagtaaatattcaaaggaaaataaatttgataatttaaaattatgaataatgtattgaaaataaaatagtgtaaaggacacgaattggtgtgatctgatgtgtgtgactctaaactttacatttgcatattaagggtgcatcacaacttagggaaacttacttacattacaatccaaaaattgcataaatcaatgtaaatgtcaataagcaaatatagaaaggcgaacaatgaaccttcaaagttgaaaccatactactttttgttattgtgtaatattttgatgcaaacactactaagaaatataactaaataagtgacttgtatctaataggcaattttggacatcaaatttataagtaacagcaacttatctgtaattgacaggagtagttgtacaactcttgccactctattctctcttcacctacaactttgctttgtggataggtgcaattattattagaaatgccaaagagtatttattatgcctaaaactctaaggtgtaacggatttttttttttaaaaaaaaactctaaggtgtaatattgcaattaaatattatttggttctataataataattatagaaaatcataattatttagaacatcttcaataataacaccttttatgtgccaaaagtttcatcatcataatatatatggaaaaatcatcatcataatatatttatatatag

SEQ ID NO: 243244 - DNA, 1545 bp, Cannabis indica
cataactagtttcacactggatgtatgggttcaagtgttttttttaaatgactttatttttaattgctggttacttcttctgttaatgattagatttctggaacggatggtttacttgctactgatctagtatatttgtgcaccttatatttgtgctcctttctacatttaaatctgttccgatatgcaattcatgcacacttttattgggtgatctacagagggaagataaaaaaaaagtttgtgaagtgagatatttatttataatttatgttaggttagtgaagttaattacaggaattattgtttttcttagtatgatttataatggactagtttattgggactgaagcagaagcagtgaaattcattgtggctacttgatacatcctgaaatagtaggttgaattataatgcctcaactagctcctttgtggtcttgtctatttttgttgttggataatattcatttatgtggattcgaaccctgaataatttacctttatcaataataaaaaaaaacctgagtaaaatttttacaattttatgtaggagaagagaagtattgctgtctgacaacaatcttaatgagttcaaaggtataatacaatatttactctatattaatatagctattttccttgttgaactcccacttgagtgggtactaataaacgttaattgcattgttttgcaggctgagttaccaaatgacttcatatggttacacgtgcaccaaacatggttggatggttgtggggtaaaacaaccagacacttggttaatttaaatttttatttcaataaggtcagcatctaaatatataaacttgaataccttcaattctatatttgctgcaactgctgccgtttatttatttatttattttcatttgattttataaacagattttgtcatcgatttaccaatgtcatacttgttgatgtattttatgtcttataaatttgataggattccttgaatgagaagtaattatgtactgcagtttgtttctggtctaagctatgtacttgcaactctgcagaatcagaagacgtaatgacttttaagattgatttggacgggcaagtcagttgacttatttctagaagtttagtaatgaccacagttaataattgtactctaataaattgcaaaaatatttacgaccatctagtgcagatatggtctattatagctttaagagattcaaaagttccataactataaagtttgggagaaaagaaatagtaatgcgaatggaatacaaactaaggaacaatttcaggtttacattattagttcactcttaacattttgactttgttcagtgtggctgccacttttttcatatctgtcctatcttctggtgctgtgttgcagaataagctagagccaatttcactatggcagatagacattccgttctaagcgcatagtgttcctcttctgccctatgacttcagttattgcatgttgaaatgaattttcaatcctttgttttaaattcatatatctccattgaacatttcatgagttgccttt

SEQ ID NO: 243245 - DNA, 2449 bp, Cannabis indica
agtttgatcaagtgtaatatattaatgagtaagattatgctttatataatagagatggtatgtaaggaaaatggaagttggttcaagtggtagttttcattgtacttatacggcagggttcagtttcattgtattttgttagtttatatactgaaatctgttttagccatagggttcagtttcattatgaagtaaagtgtcataaataagttactactagtcaaagggtaattcttttggctagttctagtaatattaaagttgggttatagttgcttattacttgttgtatttgtagataatggttaatttgaaaattttctaataaaaatttcgtttttggtttgtgatgcattgtttcaagtgatatttcagttttataggctgaaattttaaccaactaaacttgaaacaacacaacattgttctagctaacttatttgtcactatgagtagttaaacacaaatttttaaatcttaaaactaaacattgtaaactaattatgataaacctgaataatataaaaaagaagagagaaaaaaaagaaaagaaaagagaactggatgatagctaaatcatgaactcttatacaaaacaatacaacatgccactttttttattaaaagtgtttattcttttgtacctgttggggaagtgtatgctgcaacaaacaatctttgtgaatcaaaagtaattggtcatgttaaaactttgccaaaaaaagaaaaagaaaaaatcttttcattttctaaaaaattcacataaagtccatatcaccttatctaagagtatgtttttggattatccatcatagtagctctttcaaatgttatttttatatcaaatgagcaacctgtggcaattaagcacatatcaaacatccaaaccttgcagatttgaatggttttgtccaaatgggaacctctccaaatggctttttggtatttacttactgacacttaattatgtaaaagtaattattctatgtttcttattaatgttatcatgtttgaattgaagcaaatgaaatgttgaattttgagtatgacaaactaggaagggataataaggtcttgtcaagtcaatatttttagtacatcataagaaatgatcagacactaaaacaagatagacaaaatttaaacttgacaacatctaagaaatccatatctgcgataagttctggaatttctttccctctacttaacctgaactttgagatgcagaattcatacttgattgaaccatattatgaaaaagaaaagaaaggaactcaatattgtataaaaaaatgaactcattctattcttttagtatcagtcttccatgttagttttcatttgtttttctctttgtttatattgttcaattctattactattattccaacaaagtctcctataaaaacaaaattaaatgccacaaattgagatttaagtactggtatcactaaactattggtattcatttacatcactctttctaaactggttagtttcactacacatcatcctcatgatataaagagaaatcaggctcatctggcttaagaaacttaggcatctttaagctagtggaagaagcattagtagaagggccagtggcttgaactttctggttaacccctcttctggtatttgcagcaaatttagaagccagaattgtggcaccaaaattctgggcattgctagctctgccagttaaaggtgtttcactttcactcatctcaaatatcccaccctcctcctcttcaccctcttgtcctgaatttcggttatagtagtaagagctctcatgcatagctagctcctttgccatcttccttttcttataccttctccaagcagcttgtataaagcaagcaccccatgttctccaattgtgagagtaatacctgaaagcatgttgaagtttcttgctgtgcattcgcttgaactgacccgaaacaaacttaagatcctcagctctaagcgcgaaagcttcaacctcagtcaatgctcgaactgttctagtggaagaaggtaagtgcatactagagcttggcatcaaggcccaagtaagtaactcttcaccacaaaagtctcctggtcttagagttatggaattgaaaaacccggatctaccaccattagtagttgagctctcgagttgtcctctgataataaacaacatctcatttacaggatcatcctcttgaagtatgtaagtgccttggatactcagtgatgacactaaacgctcacatatagcatcgagaagttggtcatccatttgtgaaaagaagggaacctgtaaaatgattgacaaaccaagagctctgttatcataatgcaaactatcaatctcagttagtattatattgttagggagcttcttagcttagcttgaggcatcatttttgccatttatgttttcggatccagagaaattagtgcatgtttggcatca

SEQ ID NO: 243246 - DNA, 5474 bp, Cannabis indica
ataacaaacacccctgaaaaaatatttgaaaaaaaaattatactaacaatatgtattttcgagcgtggagattaataaaagtttgtaacaagaatttaactataacactcctccattataatattataataaatatttattaattttttaaaaaattactgcttctaaaacagaactggagaaattagctaaaaattattataatttttttaaaaaaataggtgaaataacttctacaactatacactttacacttatttaataaagaaaaatgggagtagcatcttaaggtatcttagcaatggtctctttgaaaagttttaattatttttttaataattaattaattgttgttaatttttttaattatacgttggcgctgttgctgtcagtgtcaggtgtcaatctaaaatcttacagcaacaacaaaagagtccgagtcccttctttctttccttccttctctttcgtatggtctctgggtcgtcgtcttctccttctcttccttcatcatcttcgtaaaactcattatcccatgatatacagaactgtgtttatactagttttaatttcataaaaagctagcccactagaacagaaaacccatcaaaattcttacccttttacaaccccaccattactattgaacccaacgccaaaagaataagatagagagagaaagaaacaagctttcttttggttatatatgattttttcaattgggttctgacccttttgagctctctcccgattcacaaactgggatttgtttattgggtttttgagtttatattggtgaagaattttcgggattcaatgtcgggtttatatgctcagaatttctcatcagctacgggtacagctaccgccagagctctttcaccacatataagaaccccacctgatgtcgataggtgatttctctactccatgatgattaagatgcatcctgtatggttgttgatttttcactttccttccccaccttccattcttttccttttgttcagttcagtgtatagacgtgtgtagatggatgtatgtttatatataatacctatttctttgattggtttctcttcttttctagtcagtacttgacagaacttttaacagagcgccagaagcttggtccgtttgttcaagttctccccatatgtagtcgactcttgaatcaaggttgggatttttctgattcagattttttttattattattattgtaatttgatttgattgattgatgaattgcttcgatataattcttaatttttgttgttggtgtgttataattgctttgctcatcaattttggaagaggttccattactctaatatgtttatttatatttccttcactcagttgagacgagttcacacactatctagccatgactactagttaaattattaagcatcgtatactaagtttttttctattttgtttcgataaagaaactgaaaatattattgccaatcaatgtcttgaggattttcttttcatcgagtagatagaataattagaagaaaagaaaaaaaaaggaagcttactcaatgataacaataagagctttagatggggactaaatggccccaacacaacatatattaggatcaggattaggaaacatctttatgttaacctcattaagcactccttgtagcggtgaggacagactggggttatgtagagggctcgggttcgaggtctggtgctgtcatttttgtagctaatctaatgtataaaatgactgaaccctttttctccattttgaagttgacttgtatataccatattctttaatgccatgaactgcttcatcttctgtcatttccattttttatctgtctctgttgttgtccaaatatttttgtgcttatggggaaaatggttttgcaaacctgtttctcaatatgcaatggtttataaattgaatgtttatacacttctgactccttgtttttttctgccagaaatattgcgagtttctgggatgatccccaaccaagggcttaacgactatgatagaatgcaacgtggaagccctagccctgttggttcttcagatttattgccaaattacaggggaacgagcattagtagctggcatgggctgtcccaggatgtaagtattgaaaatctcaatgttcacttatttttttatgggtaaaaagtgtcaatatccaatgtttcattgaactttggagtaagtgttggaacatttgttgtgacactctagcatcctcatcccatatcttatttcctttttgttttcaaggtaaaagaaaattctttcagttttccccctttttacctaacaattattgtatagatagattttctgatggttccctactaaatccaatatatgttaaagattacatccttcattaggtgtgaggcatagctcgccaagcgatacattttgtcagtggtgagaaccgattaacctgtttaataattagtttgatatttgattctgcaaatgtccatcgctggagtagttggttatatctagggttagatttcctctgtttaaatggattagcctgcaattggtctcctctctggtctatgttcatcattatttgcatttcttcactctgctactgttcgttttctatctacatacatgctaagaagtttgtttaataatgtgacagagactaagtggacaacaaggaatgaacatggagtggcaaacaacaccaccgagcccaagttcctactctgtgaagaggatactgcggttggatattcctgtaggtaacttcccaaatgtaagtcatgttatgtaatccgagagtgcaacatgtgacactgacctctttagttgttctatcttatgcttgagggacaaatcattttttgaaattcttggtgtattattagatgagatgattagatccttcaattatttttaatggtactaaaactgctatatctatagttcaattttgtaggccgacttttgggtcctagaggcaattccctgaagcgagtggaagcatccacaggttgtcgagtttatataagaggaaaaggttcaataaaagatccagacaaggtaaaacacaaacaatcttccacaacattttttctgtacataaactgaaattgaatcccattacattgcaattaatggtggctgctttatgtttttacatgccaaattgtggcacttgtttttctgctttccatgttccatttataattattatttattgcttttatttctttcaaatcattttgagcatgtttaggggtattcaactctgctaacataaaagcttttttgtctttaaaaggaggagtccttaagaggaagaccaggctatgagcatctaaatgaaccattgcatgttttgattgaagctgaattaccagccaatgtcgttgaattacggttgagacaagctcaagaaatcatagaagaacttctcaaacctgtggtatgtctcaatttttcagcatgtctaatattgaaagaccaccacctttcggtggtccaagattttattcgtgttgtttgttaattttgaccatcttcgttgctacattttatgacctctcatttgtttgtatgataaaatttctccttgttgtcaattacacacaatatatagctgccatctttggcaaaacaaaaaattccagctttctccaacttgatattctcaaagtagaacaaatagtgcatcatactctcagcccgactttaaagacaatgtgtttgtatgtcagtttccacataattactttcatattttaatttcaggatgaatcacaagacttctataagaggcagcaattgagagaactagccatgctaaattccaacttaagagaagagagccctcgaccaagtggtagtgtctctcccttgataacttcgagtggaatgaagcgtgctaaaacatgcacgggtttgtaaactcattcaagttgatctcatcagttcagccaatgcacagcttcaacattcttgccttgacatatgacccttgttgtatatcaaatctgcattgctgcgaaaggagaagaaagcgtgatgagtaatggaatggtgagcttctttaagtgcaggttgttttcctttggtaacattaacatataagatttacaagggaaaggagaaattcgtttgttacagctattgtggttaagtgcttgtgtttaaagaaatataaaagtttatgcatgttcaaacattattttcttagacttttacctccatccaatgttgacattgttgagtacatatatgaattctttaatatattgtttatttaatttttcacttgatggcagttctcacttgaaatagtttgcactttggttttcaacgagtttatatcattaccgtttgtataaaatacacagaagctctatcagaaatcgaagtgatttcggttaaggtaaaactatattggatgtcaatttttatttgatcagatggtatttattgtatttcattctattgtatagcaaactttgattttgtattctataagttatgtctgtctagcactaatcatattgtgctgtattaatttttaattttctcactcaacatttactcataattcatttttctctcttcttgacatgattgtcgatcatcactttttctctatccttttctttctcttcttattttgtttctttgtaatgaagatataagttttggtcaaagtaggttaggggcaaggatatggacgagtttgggattgggatcaaaggtcagtgacataagcagaacgaggataaggttggtgtaagtgttgggatgttattcgaaatgggctcatcttaggggatcaagttggtgtcaaagatgagggaggtctaggttggtgttaggttgagaataatctaagttaaggtgaatatttgaggtagacatgacatatggtcattacattggtgcgagcaacgggtctcgtatatttaaactaaacaccgatagctatatactacgtcgtaagatgttagacattctaagatatcttttagcatttccctttagctaagattggattctaaaacttaagttaagagcacccaaattacaaatagttgtagtaagacctaaaagaccgacctagaaaatcgctcgaaatctttctaggtttagaaatttagtcttgctcttgattcttgaatttccctactggagtgaaaaaataggctatcataaaattggcaaagagagaaaggaaatcaccaagtctgaatggcaatcacaaccacgatatactatagatgtacaccaagttaatgtcgaaaatgatctttgaaccatcttcgaagaagattcttcctgttcaacttaactgaacttggcctggcaacaagaatttggaagactcagtatatacaaagtaccgtatagtgtgttgttgaaccaatcaaataaactcttgattggaaagcaaaccaaatctctagtgcaaattctttttttaaaaaaaa

SEQ ID NO: 243247 - DNA, 4225 bp, Cannabis indica
aaaaaattgataaaaattacaaatcaaaataacccgaaaaaattataaaccgtccaatctcttaattgggcgggttgaaaataggtccaacccaacccgcccaattaaactaaataacccgatcaacccgactttggattttatttttttattttttactttttagtttttatatataacataaatgattaaatatataataatatacttaattgttagtttcaaagtcatatatagtgttgtgttttggtggaatttgatatttttaatttattttttttttaaattttattgactttgacttagaaaaaaaagtttagcctttttaaattgggtgggttacaattaaattttaacaacgctagtttttgattgaattagaaaatatatagaacaaactgcgatgtacatcctagtaaaagtagtgttgagaattagttatgtttagttaaaaagcaaagacacaatatggctgaagaaataaaaaaaatagtgcgtatagtgattatgcaaaaccaagaagtagcgttttagggcagggcagaggcaggtttgtaggccggtagtcgaggagtgagtgagtgaatgtgatgtgaggctggtgagtggtgtggcctctggagagattcaacatgaatgacgatctggacccccaaagcgaccacagctccgactacttgtctcactttcagccccaaacccaagcccaagcccagccccgccgtcccagggggttcgcagccactgcggctgcggctgctgctgcaaccaattcagcaggcgccgttccttccactgctgctgccgctgctagttcagggcctgccaagggtaagagagaaagggagaaagaaaaggagaggacgaagctgcgggagcggcaccggcgagccatcaccagccgtatgctggctgggcttcgtcagtacggaaattttcctctcccagcgcgtgccgacatgaacgacgtccttgctgctcttgcaagggaagctggttgggtggtggagacggatggcaccacttacagacactctcctcctccatctcaattggtccgtacgctttattatttttttcttgtcttttacaatttcgtgttcatttttctagcgaattatattatactgagtttgattcatatatgttcctataatggaattttgaatttctggtgatacactgacaattgcatttgtatttatttacttttattataagcagttagcgtatcctatgaggtcagttgacagccctctttcgaccacttctttaaaaaattcttctgtgaaaggaacattagattctcaaccaccttcggctcttagaattgatgagagcttgtctccaacatctcttgattctgttgtaatagcagagaaggagaccaagaatgaaaaatactctagtaccagcccaataaattcagctgaatgcttagaggctgatcaggtaatgttcactttttatattcattatgcataatatagtatgagtatgacgatgcaagatactagcagtttagtttcacaaacaaagttaatttctgcaccataagctagtaaagctgccatagccctgttattgaatcttttccctttttaagcttgcaatgatgtctcagttgctttcttttgattgtggaccacattattgaagcaaattatgttacaaatgttctagaatggaatgagagaattaggggcaaaagtttacgacttttttttaccactcttcctaattgtcattattagataccacaacacctgtttggtgattgtgctttatgtcggattatcctataatctactgttgctagttaaaatgaagttagaaattatttaaggtttttagtgataccaaataggtccattgactccaaatcaatcagtgcatattcttctattttactttgtttggatcatctctaagttctctcatacatgggttatgccttgacattaatagattctgatatcaaaatctgtcaggataatagatgtattgacaatagaaaaacaaaatgtagctgtgtcttccaagtagagcctggggctaccaattatctattggaatttatttaatctcctaacagatgttcaataacaatttaacaatggtcaagtcataggcattttattatctttgagatgtatacttttcttttagtttgtgtgtgagtatcactaaatgtccttttcctttttcgcttcaaataaatgttcattttgaaattgttagtctcttgcttccttttttttctctttccttttttgtttcaagaaattatattgcaaacttcttctgattaagcgcttgacttttacagcttatacaagattttcgctctacaaataatgggaacgattttacaggcacgccatatgttcctgtatatgtcatacttgctgtaagtgtttgttatttttacttctttaaaagtttcattaagcaggaatttacctttttttttcttccctctggtagactagcaccgtcaaccaattttgtcagctggttgatcctgaaggtgttagacaagagttaagccatttgcagtctctgaatgttgacggggttgtagttgaatgctggtggggtattattgaaggctggagcccacaaaaatacatttggtctggttatcgagatcttttcaacataattcgagagtttaaactaaagttgcaggtaattttgcagcattattttacacttatgctttgtttatgtgagcatgctcatagagttaatcttagtggattgcaggtatgtacaagtaatttggctttaaatccttaattgtgctttataattcaaaacccagaaatccctcaaattcacttgatgggcccaagtttgaaaactggggataccttcctaacccaataatatttgaggagtagaaaattatatcaattgttaagtaggtgtctgatacaaagttacaaacaaggtgagtagaaaagttttcttgaatctttattaataaaagaacaaaaaatacagctccaggaattcgagaacttggaaatctcccactaagttttcactaatttacacaaactaatccgatgcctgagtgaggaattaacatctatatctattgataggtatctaggagagacttaggcctaactaaaaataaagcacagcccatagcaataggctgagttggacatttgaattaacaaaataccatatcagcaatatatttgattaagcctaaaaataacagaaactaactgagaaacacttgataaaaattactaagctaagcttctgcttcctagaataggttaggcgaatttcaggtctaaaaatgcttaggaaagactcaaacatgagactttgaaagagtaaaccacgggattgatcgtttgagctacccgagctaccctcaaacttactatttgatggggattgttgtgagagtaaacacatgattgaccatttgacctatgatacacaatttttacctcatgcgtacaacgttgttatagcaaagttttaattctaaaaagattgtcgaacccataaggattgattattaaatttcactaattactatactttttagttttatgctttaattagagaattcaaagtaaataatgatcaagaatgaaataataaaataactgaaaagtaaacaaataaacaacgattttaattagaaagtaaagacctaaaacattgattttcttatttcaaattatgaatttcaatttaccaattatctcaatttaaattatcatttgtagtttcaaaaatcctagtgtaatcaattaacctctctcgagtgatgatagaagtaacttaattaaccaacaagatatctctattcaatgttaatcaattaagcaataataaagcaatatgattatctttaaatgaaactcattgaattagtggaatctctcaatctcatatttttcttatgtcttgcaattctaagtctaattttagattaccctctcaagtgcaaaattcaaaatctttatactaaataatgatgatcaagcattaacaagatgataattaatacaaaattgcataaacaaatagtaagaacagatatgggaataatctaaaatagttccatcaacacttagttcataattataaacataataaccacaataatcatgttcataattaaataactaaacaaaagaataaagaagaagaagaaaaggacactaatgatgatagttgatgatga

SEQ ID NO: 243248 - DNA, 5737 bp, Cannabis indica
taaaaaaaatatttaaaaaatgttaatttagaatatataaatcattaatacatctaatacaaaaaataataaatttttactttcaactcatgataatttccataaatactttagtttagataatgcttactttttatgttaacaatacatacaaagaaaaaacgaatcaaaacatcagagctttgttttattgctaaggtttcctccttttcttaaactgaacataccaagaaaatagctatgggatgaacagaaaataagaaactttgtactattccaaatgcaatcagggttacctgtccaagatccactgcagggttgagactttgtccacagtcatagataatatctgattgcagaatggaggtttctccagtcagaagatttatctcaacctgtcatgagatgtattcagtaacacagtcacagactaaatatttttcattagctaatgactggaactatcatgctgataatctgattgttagtaagatcaaggaactgtttcatgtttaagatttaaggagatatgagtgtttttgcaagactcacctcacttactgccgtgccaaagttcaagtattttaaggaagacatatcagggacatagtaagaaattgatgataagtttatagattctgagtaaccctgcattgaccaaagaccaaagaaaattgatcagtgattaaatttgagactaacccgaacacattaaataattccagaatcaccagaaagtttctgctgattgaggaaaataaacaaataatagtaccatgattaaaaagtttacaagtcaggagagacttatttatcttctatcatcaagagaaagaacaatgaaatttaagtagatacctgagcaatcagcatctgccatttgatagaatcagagccaatcgattcctgcagcttctctttaataggtgttaatctctcaaccaagacattacagcatagtctgactgccgcacagtttgactcagatgtagtgctccctgctgtatatcccccttggttcaaactcaatgtatcagcctgtatgactcgaactttatccaaaaagttttcagttccaatgattgaaccgagagcaaaagcagccgtctgcttcacctttgtccaaagcccctggcccagctcaattcctcctacttcaacagcaacagatccatctgatagaatgcttactttagctggagctgctctgaccgtcatctcgaccataattggtactctagatattcctcgttttttccatctattacacatattaaactcttctatcatttgagccctttgactaaattttgaagacacagctaccttatcccacattgaaggtaaagtatactcttgagcttcaccagcactatcttcataaaataaactaagactcttgtatgtgtgaagatttttttgtctaacagaatcaacttccattgagagaaaagatgcaacatgctcaattatagcttcagctacaaatgatccttgtacctctccaggacctcgcattgccgtcttacttgaatgatttgttttgcataactttatgtcaaaagccagagcaccccaatcatactttttaaatgcactcgtaaaatttgatggaatgataggacttgcatctatagacatgcctgcatcaattaatatttctagttctaaagctgtaatcttcccatctgacttaaatccaacactgtaggttattttcatcggatgccttcctcctgccattattgtatcagtttttcgatccatatatatcctcacagggcgttgtaatttttgtgctgcaagtgcacatgctgttgcaacctgaattatcacaatgtaaagaatgccttattttttaatttagttataacttataaaggagagataaaaaggcagagtaagcaagcttatgacacgccatacaggagagaattatcaggattatgaaatacttcctcagtactactcatcattttaacagcttcaaactattctaaagcagctatttgaattgcatttgggctggggattccctatcagaatcttcacaagatcttgctccaaactctgagtcatacacatacacatgctccatcatctaagtcaaatgaaaaagatatacatgttccaatccaacaagagttgcatatttattctaggcgacaaagaaataaccaagccatgaatcctcaacacagtcaagagactaatccgatggtagatccttctccaccaaatgtgtcaagtaatcttcacttaaacattgattctgatctagacattcctatagtattcagaaatggaactaggtcttgcattggcgacaacacaaagtagatgaatttgatcaaagaattattggcagaagaatttgaagttaagggtcttggaacactgagatactttctgagtatggaaattgccaggagtaaaaaaggtatttctgtatcacaaaggaatttaacccttgatctcctaaaagaaactgaaatgctagattgtaaggcaagcaaaactatatcgaacttgggtcaaaggaaaaccagaggacaaaggaaaataaaataccatcaattagttagaaagctcatttatctttacaaatactagactagacattgtctttgctgtaagtctagtgagtcagtacacgcatgacccctgccaaggtcatctcaatgctatgtatcgagttttggagtatttaaaaggaacaccaggcaaagggttattttaagaaaactctagaacgaaaagtcgaagctttcacagacatagattgggctggatcagttaatggtagaaaatctacgtcgggctacaatactctagtgtggggaaacttgataatatggcgaagtaagaaacaaactgttgttgcaaggagcagcacataagctgaatatatagctatggcccatggagtgtgcaaagcaatttggctaaaaatattactgaaggagttaactattgaatatgaagatcctatttaactttattgtgacaaccagtgtacaattaatattgctcacaaccgagcacatcatgaaacaaaacacgtggaagtggatcgtcaatttattaagaagaaaattgatggaggggttatcaaaattgagtatgttcacacagatcaaaaactagcagatattcttacgagggattgtttgaaagattatttgatttcctcataaacaagcttagtctcgtcaacatctatagtcaagcttggggggagtattggcagcaaggaaatcatattttcttgatttgttagcttattttattcgaatatttagtttccctttttatagaaaaatagaattaattttgtattaatgtataaaatcatgtacaacctatatattgtatcgttctactcaaatcaatatatcaaatcttataccaatgtcaaatatttttagagaaaggataagagaattttgaaaggatatcaaccaagacaagaataaataaacatctggggttatctttctcactgaagaaaatatcaaactcgtcaaaaagtattatgtcgaaagtaagcttacaccccaagagatttttttttacagtgtactaaaattttactcatcttcacagggatataagttaatcttaagagtgtaaacttggaaaatttcaatcgtgatttacaatttggttatcttaggaaggaaaaggagatataaaactgatactataataatacttacaggcatcgctttaatggtctttccaccaaagccacctccaacccttcttgtgataacacgaacattatgccctggtacatccaaacattttgcaataacatcgtgcgtcaattcaggactctgagttgaactgtaaacaaccatgcagttgtcttcatctggtatagcaagggcagtttgtgtctccatgtagaaatggtattgtgaaggaagttcgatctagtaagaatgaaactataagtttaatactgcactgaggtgccaaatcagtgtttatgcaacttgttcacacattcaatttcttctaaacagatgagactgcaataccttagcagatataattttgtggtcagcctcagccatgttttttgatgcatcaccaacttttttgggtaaacggaagaaggcacttcaaaaaaactagatcttctaacagcctcttcaacacataaaatggggggctctagatcttctactccataatcgaccactgctaactccgctgccacatctgcatgtttctgagtatctgcaacctaacaaagaacagatatcccaataaacgaagaagatttctatgcttgcaaacctatatagtaaaattactgtcaattggtgaaagccattacacatagaaatgcgtagtgggagttggagttaccacaaaagctagacgctgaccagcacactcagagagatcatcagcaaataaaggttcagtaccaaacatgtttgttgatccaatgttctccccaccttcagggatatctttaacagatataacatcaactactccacggggctgttggtcaggcttgaatgttaaatccttcactcgtgcaaaaggttctgtggtataaatgaatgctccatacaagcaatttggtggcgaaggaatgtcatctacatatacagcctcgcctgtgcagattatcagcataattgagacaaattagttgttaaggaaaaggaagaaatatctggaagcaattcaattagcagtaatcatgagaaacaagcataccatagttctcttgacaatgtaattattgaaagaaaaatagcatagaagaagaaaaacaaatgatacactgtcattcacaaagaaataagcataacactcaatatgaaatgaccttgatggacggataagaggaaatgttatagcacatgtaaggttaaatatgaattgttatattccttaaatttcaacatcatgttcacgtaaattaagatttcttcattgacagttataaacaacataaaaaatatggaagtctatcaaaacacgtactggaacatgcagaaatatagagggaggcacagtaaagatcattcacacaataaattaagttcaacataagtgcaagtaatatcaaggaggaaaaaaagaaagaaagagagagaacatatgcaattctatatgttttcttttttcttttttgagggcttccatgcaactaggcaagtcttgtgcaaaaataaaatgatgcgctagcccagaatacgaaccggaagcttggagggctgctccagattttgtaattggcttgccaacagggtaatattctggacttgtttcaataaactgcttccctgatgatagcagggttggaatttcgtcatgattgaactgattttcatttgccaacagagcatccttacatttcttcaacaacccatcagtagtttcagctgtagtatcaataaaggagctaaagaactcgaaaagaaaacctacagccaagcttgacctataagcaggacttgaagtgccatcttcaggaacaatggtagctctaaccaatttacaagcttcataaaaagcatcaacagttagtaattttccagctaaatattcttctgcctttctagctctgattgcatgtttagtaccataagcaccataagccaactgacagcgactcactaaaactccaccagaacttttacaaggagaaacttcagccaagaaagcagcattgaggtaaggcaatgcatttccaaggggtctaact

SEQ ID NO: 243249 - DNA, 2626 bp, Cannabis indica
attattaatcgtttcttagggctgatctatatgaatatatatttttttttctttttaaaatagcatgtataattatacattttcaaatcatactttttataattttttgtattttcagacctaaatctgggtgtgttactgttcacagtacaaaagaaaaaaaaaaataggcctggacagtataaaagaaatttctgctgtgtggcagtatttttgtaaagattaggcaaaaagtcagtacttttgtaagtttctcaatccataagccaaagcccatataagggtcggctatggacttccttggggaccaagaaattgtatttttattttctatttattttatttaattaattagaaggaaaaataaattactttcctatttttgagtctacccttttgttataaatacaagttttatgagtgcttattttacacatcaattgaatagattattatatagttgtcactgtcatctcttctctctcctttagaatttcgaattatgtattgagagaatagcccatactattcttcttggtaccttgatctttatgtaagactatgcagaaaaagttcttgtccatgttcaattgaagattcaggttcaataattgacaattcaacttaaaaaaggaataaggattagatcattgaacagaaaaagtcatatttcgttgtgcaagaaccactatatgtatgcaaaaaatcatatttaattctaagcttctgtatagcatgttatagaaaataattatttatgttgaataattattacatgaaaaataatatgatcctgtataagtattccaaacagaaataagaaaatatcacaacatacgtggtgtgtagcacctatatcgattatcaatttagagtttgaaatgatcaagggcttacctgagaaatgagataccagaggagtctcatttgaagaagttgatcgttcatcagtcaggagctttgtgggataacaatgccataagtctctaacactacactgaagaaagacttgaaactaggtcttgatcccccttcatagtatttccaacattatttctattgccattcgagttagctgcaaaatttgctgcatatggtttcatattgtacgatctcagagggttaacatttttgttgagaattttcctatgaaatttgtgccctagaagatatccatgtaatttgtaacatttagacatagattgaccaataataccatgctaattacacaccatttttgaacaaaatggctagacactcccagcaaattggctagaattagaccctgatgtagatttatcattctcagtaagaacattggggatctttgacaaacacctctgcctttcttcttgaatgatagatgcatatgccttgttgatgttggggagtggatcttgcattagaatctatgatttggcttcattgcaagattcattcaagccaaccaagaattcaagaacgcgatcctcatcctaatattcttaaattgtcttcatggcacaacaactacaaattagttctgccctatactcttgaatgagattccacatggatttgagatgagtaaaatatattgtaacactattggatccttgagaaagatatttttttgttcttatagcttcaaaaactcgaggagcatttttctaattgaatcgctcttcaagatttgtccaaatcgttgtgacattctccatatatgtgatgcttttagctatttcatttgatacaacatgtaaaatccagggtatcaccatattgttgccttaattacataactcaaaatcatcatcatcttcaccaagaggtagaagtttgccattaaaaaatttgaacttgttccttgcaatcaatgccactgtcatggttagatgccatgagctacagttctcacagcataagaatctttggaaccaaactagctctacgataatcaccattagaaagaaaatacagattccgaccatcgtcgaaaaaggatcgaacatttagacctaggacaaaaaattgatttgaggtctcagaagtgctttgagtatgaacatcttcaccttgagccatgagtgatgagatcgagaatcaagaatggagtttacacagatattgactctgataccattttagctaaaaaatgcaaaagataaaaagagaaaaggcgatctctgtgtattaaatatgaataaaaatacagaataacaacattatataactacatgcactacacaaactggtaactaactaacatcttgcctaactttcccaactttaaacacctcaacaactaatttgactaatcttgatgaaattatttttcattacattgcggatttgattagattgtatcgtgcaaattgattggatgagtattttatgaatacccatattttaaaatgcaactaaaaaataaaaattaatgggtaaatggcggtaaaatccccaaaactttcatgttggtttcacttaaccctcaaaactcaaatttgggcagtaaaacccccaatactcggatactgttagcaatttaacaattccgtccaaatttagctgttaactgcaatggtggattgtccacgtggcaccatattattggcccacataaataaattatttaaaaaaattaaaa

SEQ ID NO: 243250 - DNA, 2886 bp, Cannabis indica
acttctaggaaactaggtcaaatcgcaaatactctaactacccgtaataggcatactatcaacttatcataatatttctataaaagccactaattaaacatgttatgatatttttagccccagatcgagttacttcggcattgaatcatttaaatagtcgtgcaaggtctctccttactcttgtttaattaatgaaagtcatataagacggtctataggtcattgttgtctgaaaatgtgttagaaataaatccatgaacgtatctgatgtgtaaagtaatgcttttggtaactgactaaactaatcgtgcacgtatcctcccaagttgcggtaaggatttagcatttagccaattgtggtacctgatcaaccttcataatagtattaaatatgtcaagataatcaataggattagtcgtacctttatattttagcaactcaaagggtatgaaaccctttggaagccacgcttgccacacctccttcatgaagggcgacatcccatgtaacttgtaaacaagctttctctactgctcgatcatttttagagctcgcaagagatttccttgatcaattaccccttgttgaatagaattgctaggaggtactacttgattacaaggtggaactgttactataactatattggcaggtaccaccgcattatcaattgcagcaggtgtgtgtggcgagttaacgacatttgatgcattgttcaaatttgctagtggttgtccaccaagggggataccttgatcggtaaaacggggatcacgaggttcctcctctgtcacaattttggggagtctaggatcgtacgagaaatgcctcgttgaggtgatctctcaggtctcctctgtgcacatgatatctttcccctagccttgtaaaaattgaacctagccttgtataaatactaggagtatgattatgagatctcgaggatgaagattgagtttcacaatcatccaccttaagttgtgtttgtgcacgagtgcaggggttgtatcgattgttttcttcttcacgcgtccttcgctccctatatcgagatcgctggtttgagttattatcagcgggcccctttccatgtgtggggtcacgaataatctcattcaagttgagtctatttgggttgttctcatctaaatgttccttgtggttacgaggaattttagcacggtcattattatgactattattgctagttacctaattatctatgtgataatttgctgggacttgttgtggacatcgtgctagagttcaatttcttcttgcaatttttgcatgtagtgcctacatctcctcctacattggtgtgtactatgcagttgtcagttgaataatactatcagaagcatgggcaggtgttattggtggaaactaaccaactgtagttgccggtgttgagggttttctagtgtggcctaaaaataaaggaaataagttaagggaatcacgttagtatgccctactccttccatagcagcatcaacgcgactggttcttcctccagtaatgggaacactgatagtgccaatgctgacagttttgttgttgttgttcgtgtttgtcagttttgtagatattttgattctcctccaaaaatctcaaataaaaacgtttcccacagacgacatcaaatatttttggaggaatttagacaacacacaaaagtgcgagtattcgaagaaattaagaacactcactagcagttatgtgagtactcacttaaagttaagagtactcaaagtttggactacgaaatagacaaagcaagaatagaaatataaaaaagactagagaaatatagtggttcagtcaaacctcgatctgcttagtccatttttggtaattgatttcaggttagtttattaaatttagatcacacttttatatagaaagcaagagtttgttaggattacatagttgttattataataattacacagtttaattaggataaatgttcaaagaataaatgcaagaacaattcttctgttcttgtcttaattgcaacaacacgtgcgacttactcagctgatgtttgtccattcatattccaaacacaaaagctttggggctcggtgttattctcgcataatagacctttgagcctaaatttaatttatgaatgtcttcaatcatcttggatcacatactcagacattccatgtgttgacgacttagaaaatgcaagttcctgatgactcatcgaaaaatattcattcgaaccatacttatataatgaaatagtctttgcttgctgtgggagagaattacttgctcatcacttataatcgatatgcgcgatcagcattgatttcacttggtcccacttatcttttaccatgctattgtatcctcttgcaagtttgagtcatgcaaggttaactcttcgagagccatgttattgacacgtcatcctttttctttaggaaaatggatccacgtgtcaactttttacgagattgtactcgtatttttaggcaaaaaaatgccattataacaatattgtattgaatatatacaaacatcattatcttttattattttattgcttagataagagcatatctaatggagatgcaaatgagtgatgcagctgtaaaatatagctcactatgttaaaattctactctaatagtgtgccaaattgtgatgcaaatacatcatataagtgatccaaatttggatcacaacgtagaatgaaacaaaatttgcatcataataaatgatgttcttttatatttacaattatgacatttttaaaattttattattaatttttgttaacaagctccttaacattaaatgacttgcattattattattaaattttatatttatctttatattattaatattattttatatttttt

SEQ ID NO: 243251 - DNA, 7983 bp, Cannabis indica
aagtaaagctttcatttttctggacaataactagttacagttcaacttcaattataagagttaggtccacatactggtatgaacaaggaatgatttcaaaccaatactccggacagaattatacagtttactgcaaatcaacagttaaaaacgataaactacaagataaaagactctgcacaagatgagacaggtgaactatattttatttagccaaactcaagcaatagaaaacaagctcaaatttcaaaagttcaaatagcaactaaatgcatgaaaaggtatgaaataacaccaaagaagttataagataccttctgccaccattgatgtagagattgactcaaattgctttacaactagcagaccaaactcttcacaatgaatgtgacttgaaaagaaacaaaagggtaaactcttttgagtaaagacagtaggattaaaattatgtttctccttatgcatcttcaacatttactttccctttgtacacgctcaacagcagaggcactttctcattatacttggtcacatacttctccaagaactttgattcaacactttgtatcacgccacaaaagctgatatcttctagtctcatcaatcccttcgccaacaaaacttgaacaacagaacatctaggaagtgttctcttctcaaagttgtaaaaaagaacgacaggacagtttgaaatctttttcggcgaccaccccattttgttgactagaaaatccattactttctctatcttattttcagacattaccatgcaattcgggtgcatcttaaatgcattaagaatatcatcttcagaccaaccaaacctcatataagccttataattctgtttccaagttttcttaaaagtcttcctagacatagcgcgaatcgcaaacaaaaaagtgtacttctctggacaaaatcccatgtttttaatctcatccacaatactactgaatctctcaggcttcaagatcagaatctcagtaaaatgtttcaatgtagaagctatttgtgagtcagtgaaacctaaatgtctcaacaacccaagatttgtaatcacagattcccaatttttagctaaggacacccattggtgtttcgaagcacaaactgacacctcactaggcaagatagtcttgagtaagttaaaagtaggttcaatgttcttatccaagcttctatacaaatgatgaggatcagaagatataatactcaccacttccttcttagaatacccttttgagtagaaaaactcaaactttggcaaaaaagttttatttggatccgacaaaagagtctcaggccgtgtccttacaattttttgagatatcgtcctccgagaattcgtgttctctcaggaaatccagaacagagtcaggtctttctgagtttttgagccttaactttcgggaaacaacaatggcagattctggggacaacccacatgaattcacaaggtaagacaccgtaaaagaggtacctttatcagatttttccagaacagtggtcgcagatgaagagaagcttgcagcaaaaacacccaaataagaagttgagtttgacccaataactccatagctaagtagtgaagttctgaatcttgtacagagagtactaagcatatctaatcaaaagattgtggtggatcgaattaactacaaacggtgtgctttatgtatataaatgtggctttgttacctcagcagtgcgaggcagaggcagaggtagagccatgagcgagagagggaaagcgccagtgaaacagcagctttcatagttcattccacgcctgcagtgctgctccgagtgaaaaaaaaaaaagagagacagcttgtaattggttagctcaacattacaaggggattcatctaactctatcttaaaataataaaaaccaaaatactcatattgtttgatctgcccaccaaaaaattgaaactcattataaaacaattaagcttaaaaaagaaatatgttaaaagtagaagaaacaagataatatgaactttaatccataaatctttaacacaagctttttttatcctagttgaagaatcttaattcttaattctttatagcataaatgattttccaaccttttgcatgaaaggataatgttttatttataggttagagtcaggtatgagtgaacttggatgcggtaggatttagaggtgtcaattggatccactgatggggttaaatacaatatatattgactttgggccaattggtgaggcttaattcacaagataacggtcatccgtacgaacggagaccattcagtgatgtcaggtgtcgtgcgtagccatgttggtaccgagaatgtcaaagaatatgacattagacaaaaagatagttcattttttggtggtgtgcacagtcctgtgcctgacataggggacaaacccctaacatagtgggaccttgtgtttggaggatgccacgtaggatgaaatatggaggcttccaaacctctcttcggttacctgtattcggattaatcctgacagacctttcttcttctgggaaaagttatctttttcagaccaaagtagtccgatcttatcgtgtctgtaaggtgggcttacattcggattcggagtcgtagcctaacacctcttatgggttgatttattagcttaactgggcctaggattgagcatgctttggctaatatagggccttggaagtgtacacgtcatcaacctggaaacgcgaataactgttgattttttggtactaaattacgtacgcagcagaataattgtatatttgattatcaatgtaccatagtcccaaggatctctagatgtatgtacattaaatcaaaacataaattgcatggaagaaatacctcttgaagcctattatctttgattttttttcctaaattgtatcattttaggttgattaaaaactcatatcgtagtcttccaaatcaatctaccacacacaaaggaatagtgtgggctactaggataaaatgtatatgaagttcttgtaaaaatctcaacacatgaacaaaaatttttatataatagagaaaaaaatccttttggtaaaaattctttttaggctttcaaaaaaattacatgaaaaattctatttcaaaacttatgttcattgttatacgatatatttaaataaactcaataaagattttatttaattaattatttaatttaaatctatttattaaattatgtttgattgtttgaataaataatatgaccgaattctgttatagatatctatatctaataaccgattgagaatatctctcaaccacttgagaaaatatatcaactactttttaaattcaaatatttatcacaaatatggaattaaactcttactaattatagtcggggccaagtccgagtctagggtccgggtcacagttcgaatctaagtttagggtccagaaccggggtctggggtccgaatccagagtcagggccagttcgggtccagggtcgcaattcgtgtctagggtccaggtctagggtacagatctgggtctagtctagagaccagattcgagtcaggtccggatacaaggacgagtccgggtaagggttcgcattttggtctcagagtcttaggtcagggggctagtgtctgggtgcaagaccgggtcggggtgcaattcggtgttcaaggccagggctagggtctgggtccatggtcctagtccatagttagggtatgggtacaagtttgaagtcagattgaggtcaagaccaaagttaaccccaaaccctttgtaaacattataatacaagttaatacaaataatttgttaagtattaagatttatgatcgcaataattaatacaatataatattttatccaaacaaaatattatttgtttattaatacaatacgatctttatacgacgtactaaacgagcccttagacaatgaaataggattcaatattatttttctatgtaattattatttgactaataaaataaagtgtattacacgattaatagtagtaaacagaggtcataatccaatcagaccataaccatatgcagttgtagacataagaacattatatgaacaaaggcattggagtggagagaaagtatttaagttgctctctgtatctatgattcaaaagtacccaactaagaagagaacgtccccaagtcttctccttgatgatttttttgataattcttgtacaactcttttgtctctcacatgactccatttatcaaaacaaaactacacacagaaaccttattatttctgagagagtaaagcttccaaggatttggggtcggtcaccggagaactgcaagtaaagttttgacagacaagagcaaccaccttgtctgcagcagaattgttcttggccatgagagccacgtcactgttgttttcttcccagaattgcatttcttcagtatcgaaaggatcaatgtgaataacctaccaaggaagtaagagtagcataaaggggtaatcgaaatagaaaatagaccatttgagggcttatgataacttcaaataagagcgtcattactcactgttttattcggatcatactgagcatggacagtgcccagcatgttttcaaactccaaagaaggcttgtggccgagcaagacaatttgcttccttgaagggacagaaaccatatctgccgcacagcacatcaaaggcactgccattgccttatctttcagccttgtctcaaaaacagcctgtaatcattaggttttgaaacaattagcaaaagagcagagcttcaaaacccagaacatttcactaaatttgaggtgaagcaacatcaaaccagaagatgttctgcgttcttcctgtagagatcagatttattgccagtaaccatggaagccaatctcacgagattgatcgcagaaacagagtttccagatggctcggccccatcatgatcttccttcacccgcaaaagtacagaaggatcttcccctggggtattaaaatatcctcctccctctctatcaagaaacaactcatcctgcaacatgttttctgtcaaactaataccaagacagtttaaaatgttggtatttaaaatcaaacaccaattcttgcctgggtatcttggagttcagttgcccaaattagccagttgaccccaccaccaaattcataaatatccagcaaccctgaaattagaaatgcataatcatctaaaaaaccaggtgctttagctggcccatttctaaagctgtgttgcagcctccgtgtttgttcattgtaaagctgttttctgataaaagatgctgcccgttctgctacttccaagtagtccttaggctgcaaaatgtggaatgttcaagaggccaaaacataagtagatggcataatcacattcttcaatataacagcccttaaagccttaacttgagtacaaagactataataattttgaatatttaattccaacatttttaacaaatgtttgacccttgcatgctcactctcctgtttagacaaacacaatagcaataaagaaaaacacattcgcaaaatatattaccaaagcattaattcttgaacaatgaatacaaggacacacacacacacatttgagctctaaactgctaaaagtatctcatttctacaagccataaacctgattaacatgatccagctgaaagcagattgttacaaataaaaaacttctttcaaacttacaaaagacagaaattaaatctttacacagataaaaacttacatcacatccattcacaggaaagttgaatttagtgccctcaggttcacccttgagaatcttagaagctcttgcaaaagatgagattacaagtccattccatgatacaattacctagaacgaaccccaaatttgtatgagtggaagtaaggtagcaaaaaagctctaactgtaaataaatgaattcaagtgtattaaaatataacaccttgtcatccaaatgtggttttggtcgccttgaccttatttcaaaaagctttcttctgcattcaccaagaatgtcaagatattcctcaacaggcaagccaaattttgatgctagttcacccgtgcttttcctctcaatcagcacattctttccctcaaattctttgtgaggatcactcattctagaaaggtcacaattgcctgaagacttgatgtaaaagtgctcattgaagagagtagcatgctctccaagaacatcttcgacctaaacagatgatgtggagaatcaaacaagttagaaaggaacggaaattagacaagagcaaacaatgataatgggtacctacatagattatattaattatgcactctactgaagaaaatataaagttcggctagcttatattttccctgttggcactttttaaacgaaatgaaacaaagaacatgaggcaaagtttccgaaacaaaggtaaaaaaaagtaaaatataaaatattagccattatgtggtggaaactctggaacaagaatataaatcgtatagacatcataatatgaacatttcccaaaatcctccgaaaagataaaagacctctttgcttgtccagacatagaaggccccttccttttttcttgtagcaccttcaaattcagcactgtcagcatcctctgctgaaaatatttcaccttctggtccaatcatgcctcttctcaagtaatcaagaatatctcgagaaataaatgaataagtgatgtctttggtaataacaaaagcatccaagtaaacgttaacaagctgcccttgatcatacagcatcttctcgaagtgtgggactgcaaaaaacaggacttagcaatttgaagacaatgatgatttgcaaaagagtagaattgaaatgcaaaaaacaaatactataacgaaattaagtaacatcactcaaagaaagataattagaaattacactctttcatggattttaatgaggtggccatacagaaagtaagatttgagaatccctccttatactaaaactttccaaggtccttatattcatgcatgttcgaaattgtatgcttaacagccgcactcgagtaaataatagtaactgaccgtgccaacactcgtctacgctgtatctatgaaagccacctccaatgtggtcgtggatgccccctctagccatgcatttcaggctgaagaaaaccatctctaaatccttatttgcttcgaccatcttcccagcttcctccaacttcttggcccaataaagcatcagctgaatctcaactggtctaggaaacttcggggcagatccaaatccaccatattttgaatcatagttttcagaaagctaaaagaaatgaaagcaaataagaattttaaagacaacaaatacatcatgtcacaaggcaggtgtccaataatagacaaattacttaagtaagacataagagaatgacaggattagataaaattgaacaaaaaaaaaatcatgtgtttcagatatgaattagagaacaatgggaagattaatcctaccatgaggaacttagaattgatttaatactaataaaatattttatcagggaaataaaatttgtaactttacatcattcttatttagcataattataatttttgacaatagcatattataatttacaaatgatcaactcacttttttttcctctttagttttcttatccaaatccatctcacacatcaaatgatgccaaattaatttacaaagaaaaggaaaaaaagacaaacacaacttcatcctcactgtgtacaagttctatgtttccttttcagtgtctttcttttctagatcttagtaaacataggggaaatcttctgtactaataatgccttagttgtgtatttttacatttattcgctattttcttttccatgtttgatttgctttttcataattttctaagctgtaggtcttatgtttgttaccacagttttcctctaccataagtaaggtttcttaataaatttgggaggaggtccctcatgg

SEQ ID NO: 243252 - DNA, 6595 bp, Cannabis indica
ttttgtgttaaaagttttaatttaccgaaattagtttaaatttccaattcaccgccccctcttggaaacatatcttgggctaacacagattttagattttctaatctaatctaattcgcacaagtgtagatatctgcattttgcggattggattagattggattgtacgtattgaattggattgggtattttatgaaacccctagatagactgggctgttttatcctggggacaaccaacgaattctgactgcttgcacattcctaggcagtgttgcgaacatcttaaagagagcaacttagtccgcgactcaacccagaattttcattcggtactatcgttcttctttttatttttgttagcagtttaatcaatagttgttgtcgacagtgttgtggtggttgttggtattgggttgtcttaggtgtgtggtgaagggttgtgactttgtattttgggatttctatcatcgtcgatctttgactttggtgcgccttagagttccatactagcatttccaatcttgagcactccctcaagggcgatgcaccctcgcattgttttgtctcttttaccgtgtggtttttgtttgatggtgtgatttgtctagtcattttgtatggattgttgtggttgttcctggcaggtcgggcgttgttttctttgtcattgtaatgatgggtgtttatctcccttgtcctttgtgatattggctttagaccttttttgtaatctacttgtttttgttgttgttaggtcatttctttgtgagatccatgcatgtttacttatgtttaatcttttgggctttgtaagtacattgtatactcactttattttacttgttttaatttttatctttattttttatattttttaaaatatacccacttttatagatgatgttcccattagaccttttaagttactgtaaattatatgctagacttaaatagagagtgaaaatatattagacaattcactcataaaagtgagtatattttaataaaatataatatgatgatatttttaattaatagataaaaaaaaaaagtattcctcaatttattaaatatttccaaaaataaagtgcttgcttgagtcataatattaatagccacattttgtttcactattattattattttgtggtaattttcaagtttgatctgcgggtggccctgacaagtaacaatagtcaagacagaaaaatggcactaaatttggcttgaatctaaatttgatagaatataacaaagtacataatctcatttttatgcatgtactttcctttttattctctgttctctaatgggtttccctttcctatcctccattccatcttcaaaagaatactattgaagaaaatgcagtaatgaaagcctatagctaaacaactataaagcaactaatatcaccacctgaattcctttagaaaattagagtgtactgatattttgtcttcggttgccttgtattctcagtcacatagagccttgaaaccttcctttcttgaatcattgcatttctttgagtcaactaatatcacatcatcgggtgcctcattatggtcattggtaacttggtctagaacagaagactcgttggttttccttaagtttcctgagaaccttttgatgggattctcattactgtcatcagtaacttggtcagacacaaaagattcatcaactttccttgagttccccaatatttcatcatcaagatcctcatcatcgccattggatttccctaagttcacaccattggtcaaattctcattattgtcatcagtaacttggtctgaagcaaaagattcattggacttcattaagtttcctaatattccatcaacaagcttctcattgctgtcattagttacttggtctgaaacaaaagagtagcttttctgaggccgttgcttcctcactatgcttttcaaagaggtttgacctttgacaccggatgaaccagataactttgctgtgttttttgagaaatcaagtaacccatttacattttctgatttgtccttgcaactgtcacctcccttgctactgtaccacgaatcaagaatctgaagaagagagctaccatcttccgcccctctggccattctctccccttcagctcgagtcatatgtgatgtttctcctgaatcagataagtcatcatcggaaaggacaggctcatagtcaaattccatttgtttctccattgattcaacttcagtcttcaacaccaatccaagtttggaagtcgcagattttggcgatgcaacaggcccaagttcatcccacagcatgtctgaaccattgcctttctttgatgaatcagaagattcacaatctaaggctactatatgattggcctcttgtttgtcagggacagaagtacttttcacactcgtaatatttggggctttatcgaaaggaattacataaccagactctactttcacgccagacatgttctctaaaagagcagccaacttttcaaaaccaagcttctgtaaatcaagatagtatccatacttttcaagaaaatgttttctaaagaaacctaaaaaaaatcccttagggtgctctttcagcatctcatttacaagcttttgacagtcagctaatacctcatcattggacctgctgggtggaattgttttagtgaaaggtgatgaatctacatgagtagcattctcagatttcccaacttgagtgagtttgaaagggaaaacttctgaggagcattcttccacccatttcttttctgatattaatatatcaatcaagtgaagaagatcattttctccaaagagctcatgacttaaaggcccttctctctgaagattttgtgccaactgctccctgagataaagcatggacaaaaggttctattgagctaaaaggtagttatggtcattctttaacaacatagaaatcatgctcaaaatgaaacagccacaggggagggcaggagaagctgtctaaggtttaatgattgcttttatcaaaagtaaagaagattattttgtacggtattgacacagttcgtgcaattccaagcatctttcacaattattattagctttagactcccattttggtcgaatgatttgtataaatttttaaacatatgtaaatatcagaatgaagcaaggacgaaataacaaaatgaaatatatatatacattcacataggcaatacctggtcattgttttagagacaataagtgatcctttgggtgtcttcaaaaatgattccatactactccaaaatgagtccttcagaaaaagcttctgcttttcagaatgacaactaattgggtttagtctatcagaggaatgatcttcaggggaatttctccaaaatttacaccaatttttgactcgatcaaaaaaccctggcctatttactgttttgttctcataagcctccgaacttgtactggtgctattgtccattgccacctcatttgtggacaaagaatgtgttgaaggaaatactgaaacagcaaaagaatctgttgactttaaatgcatttgctcatgtttttccttctttgcgccaatctcagaagtagagtcatccactggagtagtatggcttttatcctcaaaacaatcagcagaagtacaagaatgatcttgatcttttgaagtcttattatcaaaaccatcacttttacttccaaaccatttagtccaaacttttcttaaaaaaccaacctcagatgtagagtcttgctctgacacaggagaaaaagaaccttcagattctggtgaaactgttttaacaatcttcacatctccaggggaaaaactactgtcagattctgctttattaaccatttccattgtattatcatccacaagaggcttttgtgctttttccaatggcttctccacatttaggtcagcaagtggagttatggattgcttctcaagtaattttggtaatgttttctttttttcacctacttttacagatttctcatcacaactcagttttgaaagagtattgaaatctttatcttcaatattattattaccaactgtttctgtgtaagcatctaaattgtccctagatgtttcaggagatttctggttgaccggacttataaggtaacgaccatctccttctgttttgattcttagaattttcttttgtgataaaaggaagggaagaaaccttttatatccataatagtctttacttaaattcatgccgcatttcgccaacttatcacgaagctctgtaattgagagtcctccaggatgtaagttcactatctgatgaatctgcttctgaactcccctgggaactggatgaggcttatcatctgtactgggctccagaactgcctttggagctggaagaggcttatcatttttactgggaaccggatgtggcttatcgtctgtacagggtgccaggactgcctttggaactgaatgaggcttatcgtctatactgatttcagatgattcctcaatttgtaaacacccacgttgctcaagatctgaataaggatcaagaagtggcactttatagtgtccgtaccaagaaccataaggaccatctggtggctggttaaagtattttcctgtaaggttctcaccgcgaagcaaatcatgccaatgccacatgatacttgcagcactacaaagaacactaggagcatgtcctggactggccagaagtatattgtagttattcattcttaaccggtgtaaaatgctagcaaaatccctgtcaccagatattaagaaaagatgtgctggaggaggattttgagaaacccaatacataagatttaaaagaagagatctatcagcactattcttcccacctgcactgaatagaagattaatgagaaccataaaaacaaagaacaccgtggctttgtagttgctcttcctgatccatataaagtaaaaatgatcatatctatttggttcaaatgttttaacaagaaccaattctgtttcaccagctacagtttgataactagagtattgccttacacaatgaagaacccaacaacagcaaacatagcctgcttagtcaaagaagctgaatctgcttaaaccatccggaggtataaaacattcggcaatgtagaataatcaaaatattatacttaagattctcacataatgcccgtaacatttgaatactcctacagcacagcataatatcattactcaatttccattgtttgtccatcccatataacatttaattccattcatatcaatgcaataacagtttacacagctctatatcttggtcagttaaattccaagggttctccctcagcgtaggcatactaaattcatatcaacacaaacaaagcaatatgacgatatggtagtctagtcatctgcatttcccacccggcatatctctcacactcgaaacaaacaacaatcggttcgtgattttgagaatagaaactaaccctgaggaatgtgagcgagattgatgccggtggctgaaagggcctcctgtttaagtctcgagagctgcaccatatccccaaaggcggtgatctcaatgggacccttaatcccactggctctgatagccgcagtgatgttgcgagagactttgaagacattaactcccgaagggacattgcaattctcgaagtcccaccagaccgagactctgacgtttcgggactcttcctcctgacgccttgaaaatggagtagaagacgaagaggaatagtagttggagagaagaaaaaaagtgggacgcgaagcagagcaagtagaagaagagaagagaaagagggttttgggggagaggagtctcatagcagaggagaggagagtgagttggggttgaggttgaggaggggaatttttgggttggaaattagacgagtagtgtcatttccgaaggaatgcagtgctcttcacctgaggaacacaggtttaagagaaagaagtcaaggttgtgcttaaaccctagttgaaaatatatttcattttttgcataattaaaaaaatgtagagtacataaataattaactttaattccggttgtaaataagttgttaagtttaattttttgcataataatatttaagttataattttaaaatttctgtaaattgtcacgcgacaatctttgattggtccaggttattgaattttttattttttttaaaaaaaatattaatttaaatttgtaataaaaaaaatgacatgtgcataataacttgacatttaatggtaagtacttacggaagtttcaaaattataacttaggtattaccgctaaaaattaaacttatgtatttatttgtaacggagagttaaacttaggtatttatgccgcaaattactcttatatattgttatcccaaattttatccacttaacgtgtcatgtccatgtaagccaagacagagtaggaatatagccttgtcaaaagcaagacaaagtctccttacaaggcatggcaaacccgtcaagcaacaagcgaaagaagttaagcgagctgtcaaggatttgcaccaccatgtctggccagccaaggggagtctataggctggccaggatgagcttattgttggaaattattt

SEQ ID NO: 243253 - DNA, 2448 bp, Cannabis indica
aaaaaaaaaaaaaaagaaagaatgttttatgctaattttttttattttattttttaaggtttattcgtttactggttttctcactggaagtggccattgggaccatgccaaagaacgtggaacaatttgttctccttttcgatgcaagtaagttatacactcaaaacgaaatcacaattctacccatgtctacttattctaaagtaggatcattttgaaaatataaggggtagtttagtaattgtaaagtgtcggactgaaacacacgcacgctggcgaggtgttgtgaattaattaatgagcaccaaagcaatctcagctaatgtcggagttccggcagaatgtgtctaagatattctcagacaatgtccggagtgcccctgtagtgtcacgatcgaaaccatccttaacggccccggaatggatgggtatatcgggaaatggagtaaatttatactcctcttcttatgattggtcaactcttacactttaagtctccaccattaataatcttaaaattcataaatatggggataatattctttaattgaaataatttcatgaaaagaagatacgtagaaattaatcaactgaaagtgatttttaagtattaattagctcataattgaatttttggcgtgtttaaaaattgcaggctttttcaggtcagcatcggcttttatgaacttgttactagcagcactgaaaattgtggccgagtactacccaggacgcctttataagtcttttgtcatagaccctccttctctcttctcctacctttggaaggtatttatttatttatatatttctttttttattaataatgttacatccagctgtaattaaattttatcttgtattatttttttttttaagggtgtgagaccgtttgtggagttatcaacggtgacgacggtggtatcctcgttggacttcgaggaatcgttggatttcaacgacttcacggcctacccgcgagcctcgtccctccgattcgacacgtcatcatcgtcgtcttcgatcaaaacgacatccaaagtcggggcgtgcgcttcgtcccgattcgccttcaccgtctcccaccactttgactctctcaaaccctggtacctcagcctgaccgacacgtcaatatctaaagtgggcccaacccacggcccaacaccactaggcccagctctgatctcaccactcaacgctcgctccttctctttcgcttcacccggtgcaagaactccactcggcagcatctacgagtacggcggcggctccgccagagccaaccggaagagcctcttcccttccacgccgcttccacggcggagctcgtgtatcggtaccatagacccgacccggaccccgaacgctaggacctcgaggccgacgtttctacaatcgccggcgttgttcttcagaaaggagtgccacgtcagcaagacggaaaggtctcgggagtcgttcgttccttttttgaagttttacaggaggccgtacgatgagatggtgtacaggtcaaagatgaggcccccacttggtggactaatctccatcgtatcaccacatctacgaaggcgccacgtgtccgtatctcaacggttctaattgtaattctcttatacaatgaaaaagaaagaaagaaaaaaaaaattgagaatgagtgagtgagaatattgaggaaaaaaaaaattaaaatagtacatatattattatgaaattaaagttgttgacatgacattaccgcaaataattgtttaattatttttgctcagttcaagtccacagttccacattgtgcattaaatttgatttgtgtagaccaaaacatttaattcttaatttgtaagaaaaaaaaaaagaaaaacaaggagtgagacgccgtggttggcaaggtgtgaaatggtgtgcaccatgtaccatgtctgattttgatcggtgtggcttaattaagaaaagtctacgttttggggttatgaaaggcaaagcatgggaattagatagcgtggtcgagacggtgaacattattattgcattggaagttcatatgggaaaatgaatgattcaattcaaaaattacacatacatagtttgtattgtttatttatttatttatttatttattatgaagtaactaaagagtgttcgaatcttttggacgtacttggttggactttttaaagattatatatatattaagatgacgcagtttgaaatacttcgagttttttgtaacgttgtgcttgtatacaagctgttttacttaaatttttatttactttatattataatattgtttttggtttcaacaatggcagagagagtcggtaggaatatgtgtcgggttttgttgtttgagaagtcaaaatgtacatcaatatatatgatatgaatatgaatgaattatatatatatttggcataatatttcaattgaagtaattcgaattca

SEQ ID NO: 243254 - DNA, 1447 bp, Cannabis indica
aatccttgtgaaaccatttcatcaaacagttgaaaacactcttggggcttcccatgcattgcaaaaccagatagcatagctccccatgtaacaacatctctatgagataactccttaaagacttgataaccacattcaaggcaaccacacttaacatacatatctaccaaagcagtaccaagagtaacactcacctcaccaccacaattcttatccacatagccatgaatccatcttcctttgtctagcgctccgagatgagcgcaggcagacaaagagctcacgagcgtggattcatttggcaaaacccgagaagccatcatctcttcaaagatgctcaaggcttcagcatacatagcattgtgattgtacccagatatcatggcactccaagtagcaacatctttagcttccatttcgtcgaacattgttctggccttatcgacatgaccctgctgagtctgacttaggtagccggatatcatagcattcttggcaataataacactactagcattgctttcatttgtagagattaactcagcaagaacaagctcagcacaatccatactccctgtgcttgcatacattcgtatgagcgagctgtgagtgtaattattgactgatatgccagccttgatcatcatgcaatggacttgcttaccttgacaaagagctttaagttgagaacaagctttgaggacaaaggtgtaagtataattgtccgggatgaagccattcagcaacagtttattaagcattaagagcgagctataagagtctttgatcagcatgaatcctctgatgatgttgttgtaggcaaacacatcaggagattgaattgtatcaaagacagacatggcatagttcatgtttgagactcttgcataagactcgacgagtcttccaccgttgggagggcgatttaggagtcctgagattaccaactgtgcatgaacttgtcttacctcatgaaagttgcagcacatttgaagcaaagccacagtaggaggaatcttatggttcacaacaatggatggaggccttgttgttaaagaagccattatgtatgtttctggtttcttcatctcaaataagatttagtctgtgattttgaactttttcctggttgggacaatcacagccacaagataccaaaatccaaaataagttagtggaaaacttagataattgcatttgagaccctttatttatagaaatattacatttttttcctggcagcaagactcccttatgttttaactcccttatcttttcttaacttaactagaatgaccactgtatatacgtgacagtcaaacttcaaagtcaataaaaatatgtcacataatatttaacggtactatttaattggtgtcttaaatgtacaaacaaaagtaagttaagagggttttgcaacaaaagaatgaaaataaatatgaaagaa

SEQ ID NO: 243255 - DNA, 5855 bp, Cannabis indica
catctactttatattattttatattattttataacaaaacaaactttattttctatttttaaacataaaaaacaaaagtgactttaaaacacaattatatttttcaaaaagattttttttacaaaatcctgacagccaagtcttttttacaatccacggtagtcctgcagagaagagaacaaagtatccctttgccaaaaccaactacaaaaaacaaggcaccaaaaatctaaagatgagtgtttttactatgaattggagccgattaatgttcatggtctctttcagtttttggtagtaaaatactcaaataagaattatattgataagtaacaatgacaatatataacatacaaagaaatgtggctgaacattgcccaaacagcacctgtggtgacctcaaaaaactatagacaatgacccaacattcttctaggctgcttgttttgaaacccgaaaactacataacccaatgatataaaaggctctttgaaaccttaatcacataacagactaataccttctctatactctccattgcatctgcattatgcaccatgtgattttaccaataaaaaggccgcagcagatccaatattgatgccccaactgggaaaacaaagcaaaattttacattttcaatagtaagcaaacttatgcttcaactgccgcaatgccttcttcttctgtagaatcgcctgaaacaacttcctctacagggccaagatctgaagattctgcttctgttgtttccttttctggctcagcatgaagtaacttctcccgaagcttcatagtaagttcttctgcagcgatctcatcactagaaagaaaccttttcaaagcatctttaccgtgaaaattcttgccatttaaattataatgtgacccggcttttgaaaggaatttatatttcaaccccaattcgatcagttctgatgctcgacatattcccttgccaaactctagctcgaattgagcatttttaaatggaggcgcaagcttgttcttcacaatcttcactaaaacttgactacctactgtctacaaaacatgatggaaacaagtctcagaattgaaaggtcctctttacaaactgtcaaaaggaaatgtgactaattaccaatgaacaaagtaactgacacctttttatcagtatcattagagtggaaaaattaatagaacaaatataattttaaataaacaaaacaggagagtttgtacctcttcacccttcttgacataccctgttcgccttatatttagtcgcaccgaagcatagaacttcaaagcattgccaccacatgtaacttcagtgggaccaccaaatcctccgaaagtactaattttcgacctcacctgtagaaaaatgtacagtttatggctacccatattattataaggaaaaactgttacccacaaccttcaatgaaactgcagcattcataatagaaaatcaaattgtagggtataagacttggttcacaaagataacaaggaacagatgcaagttcagcaatgggaagtcgagattccctgattccaacagaattcagcaatggtaagtgataaatgcaacaagccaaatacataaataaaacaaaaggccaaaaaagtaaagcctcacaaataaataccccaaaatttactttggattttgctcatctctgaagtaagctagaccaacccaaaatcaacataaatctgaagttcggtccttaaacaatgaataattggctcagcaaaatctcaaataagaactaagccaatttcttaagctggcacatgtgagctggttcgttattaaagtactgactcatcagacctctagacagacaaaaatcaaaagctcttaatattttaaaaccttggaaattggtgatctattgctcaaatatggctcatcgtttagtccaatggtgtgccaaaaattgatccaaatttggatcacaatatgtcatgatgcaaaatttgcatcacaataaatgcactacttttatatttactgtcatttttcatattttactattaaatttagttattttattaaattaaaaactttttacatttattttttattgttttatataataaaataagaataaatttatgataaagttattattttatttttatatatttttaataaaacattaatgaaacattaaatttagcatcaaattttgcaattaggcattggagcaagatgctaaaaattgatgcaaatatatcacacaaagttattttttgtgtcaaatataacaaagttttacattttccattggagatggtcttagtaaaatccagaaaccaactgcaagaacttatagtacaagagcacaataaggacagtattgaaacaaatagatgccaatacctgatttataaagatcaataatgtctgtgacagagatagagagtggctcagcttgcgaagtgcttggctcatcaatctggcctgcatagctacatgagcatcacccatctcaccatcaagttcacccttaggcactagtgcagctacctacagggcacacatattatctaaaaatcacattttatgacagaacaaagaaaataaactaaaacaaatgatgaaatcaacagagcttaataactgaaaccaaaatgttggtcagaacttgtttagaaagttcaaaaggataggagcatttcaaagaaactttctataatcatccatacccagaaaagcgttgaataacacatctaaattgtccgccagcagcatcaaataatttaagatggaaccaagaaaaattggaatacaaaagcaccttacttacactgtcaacaacaacaacatcaacagaaccacttcggattatagtgtcaacaagactgagcgcttgttcaccacaatcaggttgtgagagaaggagattctcagtatttacaccaatagcctgtgccagtgaaggatcaagagcatgctcagcatcaacaaaaacacagtaacctgcatcaaagaacatccagaataagaactgcattcaaagtaatatgtaacccaaaatataaattttgtttaaaagattcctttgtttagttgttaccatatgttacaatccagagattataactagagatttgactgataagcaatgtttgacatattaatacaacatatcatacatatacctgaattgatgaacaaataaagaattagggaagtagatgctgtataagattagatagtatatatatgaacaaattataaaattaagttcgcccagatacatggtaaaaaattatcaaacaatcaattagtatatcttttcaaaccaggcttctcatctaactccacaatattagacgagcacgaaaccatgagcacttgtgggagtaaactatgttttaccatttgagctaccactcttgggcaacccactaatgagtatacaatttagacaaactttaattctatggaaaattaaggagagatgtaagacagactgctctacattatattaatttctgtctatgaattacacagtaagagaactatttatattaggaaaatgaagaaaagaaaaggaaacatgaagagaaacagaatactaaaattgaaagtcaaatatcctagctaattaattcaacaaaaagatcactccaacaaattcatataaattaatatatacaatacagcacactccatgaaatttatcaatttatcatcacttatgcagcaagaaagattctcattcaaacataaatattataacctccttgcttctgtgcctctgcaatcacatgtagagcaagcgttgtttttccagaagcctccggaccatatatctccacaacccgtccctaaaaataattaaaaaaaatagcatatcagaagttaggacttgcatatgtagcaaagttcctgcaatactgtgtaaacctcatacaaatttttaactcctgataaggagctcatatgttctggcgactgcataaggtcaaaaacccagtcttataatccatatttgaaaatattacttccagaaaatcagtagattcataatcatcagcaaatacattacatagttccagcatatatgtcacaatgaagaaagttagtgagctaacattctttttacaaaaaaaaaaagttagtgagctaacataatgttacaatacttcaattcaaaattattgctaacgatgtcacaaataagtttttgaagtcaaataaatccaacatttgcaacaatatacgatgattactatataggagaataccttcggaagtccaccaactcccagtgccagatccaaagaaaatgaacctgtggacacaactggaacatctttaggagatgcagaccgtcctagccacattatagatccctttccaaatgaggacgtaatctgatccaaagcttgcttgagggctatgtctttctttgacatattttcttcaccggagtcacttccatcggacttgcatttccttcttccttaatacagacaaaattttaaatttcataatatccaagtaagcttaaactctgaagcagatcaaaacagtaattttgtttttattatcttaacctattatctgcaacagcaagaccaagacaaactagacaaagttatctactacattcataaaaaaatttgaaagacaacatgtttgtaatatcatcacttgttaccatattcataccaatacaaaaaatgccatacatacagccaaattacaatgtcctgtgatattcattatcaagattttaacatttcctgccatcactgaagtagtaagaatttgatagtaagcaacttgtttgatacattaaattaaattctaagaagagcccaaaggagttaaaaaaaaataatatgcgaaatgtttttcacttctgtcaattaaaatacatttgactcaaaatcttaaaaagcacaaggtcgctccttgacatattgtgtatgttcattccctcaaaaataacaaattcaaagggtcaccaaaataaaagtagtaacattcagaataaaatgcatatgaataaagctcaagtacctttggaagaaaaataacaaagctgagatgaagtccctagtatccctctttttaatacctgcaaatcaaacaagtaacaaatgagcgggaaaggaaaagaaaaaaaaaagttatacgcaaaatgcaataaaacatttcatatagaacaattaataatcattaaaaacaataaaaaaagaaagcatgcatagatatatttaatatagtgagaaacctcatgtgatccaatagaggtaaccaaccaaacagagcaccccatacattagaaaagcttctaaaacacaaaaaagaagcatttttcttctatttttctcaacataaagaacagccatgaaatgaaatgattacctcagtagctataaaagaagcgcgtttgtgaaaattaacgtcgcgaagaatcttcgccatggacagggcaacctcaaggctcgtcttctgtagtttattattataatttattattattataaagaatagagaaaagcagaagtttgattttatttatttttaaatatgaatgaaggatgaaaggttaggacagggaatggcgaagaagaaggagttttattagggttttgggtttttccctcctttctctcagtagactgaggacgctctttctctctctctgtctgtctacctgggcgcgaagagtcatgggctacttgggggctgtgtcggagactggacctccctttctttctggcccaacgtctcattgggtgtatcgctacatgggactgtgccttgtaaaatttttgaaaaaatattttttcatgttgcataagaaaaattttggaataattagataaggcactatttt

SEQ ID NO: 243256 - DNA, 6689 bp, Cannabis indica
aattttattctgagctaaaatggacatgtattgcttctgtacctgattatgttcatcctttacatccatcttttttgatatcaaattactatttgtaggagacttgtgtaattattcttggcaattaacaagcttgtcatatgattttactttcgtagcttgtatatctcccacaactagtttattaaaattctttaaagcccctttaagcatcttcaatttaataactaatttgtacattagtgtgccatagacctctctctgccaagactctaacaacacctcttgtaagccttaatgatgttgccaaaatatgaaacacttgaaaggtttttttccctatcctcaactccagataaacagataaaatatttggacaatgatcaaattgtctttccataaggaaaacgacttcagttatagtgtacatatctaaccaagtttgattagccatagttctatccaactttgattaaattttgtcacatgtcccttgcttgttattccaagtgaaatataacagtttgagtacttaacatcctccaatttgaaatcagcaatgcaatcattaaaacttatcaaccgtgtaaatttcactctattcccaattcactcctcaagactaaggatattaaaatttcccagcactaacaaggacagttaatgttcaaagctaatggtgttaaatcctcacacaaaacttcccttccttcctccttattgaaagcatatataaatgttactaaaatctttccttacataccatagtcctcacttccatattcataaattggtttgtacgaaaaaggaaaaaaaaaagaaaaggaaatttaacaaaaaaaaaataagagtattctagctaataattatcctccctcctctatgtcaaacattattagtagataagcacaagcctgaaaaaattataacatacatagctcttagctttgaagattttattttttctttaggagaacaaccaaggctacacgcaaagaatatatttcttttttagcctctattttttttcttattttgcttgatgatctcccatgatattccaactcatgattctatccatgattggtaggaggctctctctctccccttccttgtttacctttccatcccgtatctctcaacattctctatgttctcatagcacttcaaaagcatttgtcatttatgtaatgctggttactttcttctcgcttttccatccttttttttttcacagcttataaactatttgcatctatctcaattatttctttctgaacttccattggagctttatgaacatctattggagccttcccaatataaaatttctttggcacccaaacttgtattaaactttccttctttttgcatttgtgagttgtatgtcccaacccttgtttccacaatgaatcggcctccactcatactcaactataactttcacttctttatataattcatttgtgaaagaggtcaccgtaggaaattcttgccctattaaagcttctctcaaaactctggataatttagccattcctctcattgagtaatctggtccttttgcaaaggatcccattttgacacacaatcttgaatattgccttttaccccgagtatttgagatccaagttgtgaagttgaattaaaattggagcagaactgacatcttctttcttaaaatcaataatttgatcctaagatctcctaatatttgggcttttatgcaaaaaaaaaaaaaagtatcctcaagctaatactggatccttcagttctaatatatgaaaacaaattatgaacattattttttctagtattctaatattctccacttgatctttccacatttattgcaatatttataaaaaaccaatgtgtgggtgttctcctagaacataacacactaaggaggtttggaaagctacttctttatcatagtcaccagcttcaatcttaaccttttatccttcacaatatccccctgtcattttctccaaaactcgagcagagatttttaatgatatgtccatatcacataatatgaggagcatggaccttgttagaaatatattgatccttgtttcgctttctatagccatacagttcaaaaatcttgtatatcttgcattctttgtacactctggagagatgaattcaaagaaagaggctatgcttacaacaactctacatcctcttcactctcctgctcatcctcagtcgaaaaccacctcttctaatcctaagaccttctccatagatttaatctttctagagtctcgtggagtagaaaggcagtcgtctcttacaaacattgtagttttttccttttttccattgtacctcaatcctttagatgccttagaaccagatccttgagatgaattcttctgtggccagctacaacctaccatggctccatctcttgttgaagtctttgtcaaaaactaatagagctcaactttaggtttatctcttctgtgggtactattcttggaggaaaatttccgtgtcctttgttgtggtggtcaaggtcatcttcttctctgcagtttccacctaggtgactttcattgtgcccttaatttaggtttatttacgcatggttctctatggcagccgaagctgctagaatcctccttgtgatacccagctagttatgatatatgaggacttcaatgtgttggagacgtgttgaactcctttgcatgtttaagtgttaatggatgattctaagagaagaacacaggtaggactttattcttcccatagacaacaccaaaattttgatggtaaggactcgtcaacaaagttaaggattgaaaatcaaagtaatgaactaaagatgatgaagttataagaactttgaacaacttaagaaaatgaataggtctataagggagagtatgtaccttgtgttgtattggatgttcctcatacaaatgattttctaatccccttacaagtgttagaggggggctatttatacttgggctctaatggctctaggttacatgtggtctcaaaaggaagcaaactcactcattcaaggcttgtcatgtgagagggtacccttgcttatcaagaccacacacgcgagggggtccctcactcatctggggtctgacacaagagggggtcccttatttatctagggtctcacatgcaaggggggtcctcactcggcctcatgcaggagggtgtcccttgctccttccggaatatgcacgcgaggtgggaccccttactctattgtgagtatgcatgtaaggggggtccctcactcgtctttagtctcacacacaaagggggtctcttgcatgtctggggtctcaaacacgagggggtccctcgctcattcgaggtgccacacatgagagggatcccttgctcctctgaagtctcacacatgaaggggtccctcgctccttttggactatgcacatgaggggggatcgttcgttcaagtccaagcatgcgaggggcttgtcctcatacggtgtacatgcaggtaagccttctcatgtctatgtatttaacatgtttaattcaagaactgtggccatgtcaacacatcccatccattgattattgagggtgttaatttctcgtatcaaaagttatggtcaatattatttaaataataaaagatttttagtgttatattatttaaatatttagtatttttgtgcacctaaatcaatcataaaaatatcataaccttttgcttacccaaaaaggtagcttgctgatgtgaatactgtttttaacatgtgccacgaaggaaacaaccttggagccccacatccttaaagagggtagtgtaacctacacaatgggggcacttatgtaagcaccaagatccagctagggaagtcatttttgagtgttatccttcaacaagtaggtcacaatgacctcaaaaaagatgaattatgaagctaagaatatcacatggacatccctaagctcaaccttggtccagtacaagtaatgggcacccaagttcacatgttgtgccctgacttcaatcaggtttggttccaaactaactcttatgtgtaatattcttagccattgtactggtacacatgaaaaacatgtccatccatattttagactcaggagatgtgcctggaaaaacccacacctagagacaaaggtgcacttagacacccaagttgacattcagtcacgcaaggtgacataccagttagtgtttaggtttttgggaatttcattggaccccaactcctcaaatacatcaaggaataataccaagacatgattttttatgaaagaaatcctgaaggcacttccccatctttgaatgcccatgttgacactgcatctttggcactggttcaactttgctgagtaatgctcgtgcaaattagacaaagatgaaacctgatgtgcacttttaaccaaaaataagattggacatcaatgagaatttttttttaagtcttttccctagacctttgcacccattgtgggctccttgggcatttatgggcccccaggttaaagtatgtcaacctagggtgctttcgcacacttttcaaagaattctccctgtaatttttttttcatcaatattgtaaatacaagtactttttggaagaaaataaggtcatctaattcccaaatgaaaagctaggcacctattgtgacaattgcagagtcattgggatcccaaattgacacattatactcttcatgtggttccgttgcttaaaatgcaattttttctggagcatattgcttgtttttctcccaaaccaacatatgagacatggaatctaaataatgtatcatcaaagtggtgattcaacctccaggcttcacattgggctcccaggttgacatttaacatggagctcagtgttccatccgtcaaatggtagctctattccaagcatcgatcttattttccttctaaattaagatttgaacatcttaccaatttaatatatcatgcacatgttttacacgcaagcacggtgacacctacgtgcactagtgattacccagacatctcctgtgcgcaccgagagaaatctccaaaagacggtcaacaacttcaccataatcatagaatgaacaaagaattctttcacatcatttaaccacctcaaaatatggccacaactcaagaaacatagttatgggtttccaggttgaaattttattatgtcaatttgagcacccatacatcaacttgggtgcccactactgcacactgcttagttttttggccgcaactcactcaaatattttcgaaaagatggtattaagttgtcatttgaaatatattttgagtcgtgagtttccttgtaaattttctcaaaatttcaacgatttttctcattattttattgtaatttatatggatatccttacctatataaaaaggatcctctagttcagttttcacattcaaaactctctctacaaggttaaatttttgtttcctcacatgtttctctctctagaaattgtgaggtgaggcttctattaattaataaaaactcaatataaacatagctccactatcatcgcaatacgggaaatgaacttgtgtaaattttggtattctctctttatttcttattatttctatcacttatcagacgatacaaaattaactatttttcagcatcatcacctttcaataaaaatttcatcacaaggtcgcttgatgctaaaagttttccgatagtatctaattttattttaaacttttgattagattcaaatttatacaatttacataattaaatatatatatatatatatatatatatatatatatatatatatcacatacttattatgagtggttatcaatataacattaccaataattctaattttttatatatctatttatgcacatactttaaacctaatatatatattttttgaaagaaaaattaaaaaaattatttaataggtaaattagacaaagtccattacatgattatataaatcaaagagcgtactcaataataatggacttgttggattaaaatcttattgtgggcacatatgtataatgtatatgctattataaagtgtgatacaaaattaagtgaccaattatgttatgggtatcaaaagggaattaaattgtcatggaagaaatgtgtagataccataagttaatttctaatttattgagggaccaaattataaatatcccaaactcataatataatgagcaaataaataggcagtgttcctcaagaaatactagagtttctatattctctcatttcccatcagagaaaatactttagagaaatagtttattcttggaagatcacaacattctttgcaatctccaacaatggcttcaggttagtgttttccctcatcttttatcatcttcttctttaatttagcaaaagttcgataaatttataatttaggattttctatattaaaacacttttaggaatatatttagatctgtgatatatatattttttgagtgttttataaatcataacaagcggtgttagagctaccttttgtaaaattgattgaagatttgatgattttgtttataaaattagagattttgaaatttagggatttcatctttaatttatgtaatggatctggattttttaccttcagatcgttatctttgcacatatattttgtatacattgaatttatca

SEQ ID NO: 243257 - DNA, 5806 bp, Cannabis indica
ctcttccccgcctcatcttcttctccaacgctctaaagtcaccatttttatttgtttatctatttattcttgtctttttaatggagagattaccggttgagcttcatctcaagattttctgtttcttggaccatcagaatcttgccactgctcatcaaggtcattaattttcttctttttatttgatattgttgttctttaatatggatctgaagtttgggttttgttaatttgatagtaaattatgccaatctcgttgactctaaagtttttgggttttttttctaatagaaaaagaaaggaaatagaaatttatttgtctttgctaattctgtattttggatggaattgtcggtttgattctactttggcgtcaatatattagtaaattttcattgttatttgtatatgttaattgggatcaaattaatagagggtaagaattagcatatgtatttgtctaattttgaccaatttatgttaagattacacgaactaatatatccatagatttaaagtcataacaagtttgttgaaatggaaatttgttgttaaccaaagtatgcaggaaatggaaggtgttagcctcagacaactatgtttggtcaagcttattcaaggagagatggggaggagatcgtgctgcaatcttttgttcttggggattcaagatcatggaaaaagaagtatgaggtcgaagaccgtcttgaccgcgttggaatgtaagttggaatctttctttgtccctatttcctttgttttacaatgacatcaacttggatataggtaggcatagttttgagggaaattgtgttgttagcattgttgttgtgttgaatcttgtttagatgattgttccaatatccgattagaaggctaagttcgggtatctaaatcatgtttgaaactaggatccccgcctaactttacaatatttggagacgaagaaactatagcgattgctatttatgtaggtaccgaggagggactcaaaactcaaacttgtgggagcaaaccacatgcctgaccatttgagctactcctcttgggtgttatagtgtcaaattcatgtttagcaaaatttcttttcatgaacactaatagtatagatatagctcttctgtgtggtgaaagattttggccgtttgagcttttgtctctcttttgggtgtgattttgcaaatgatgtattttaatttgtattttaatcttggtagtgatacttagaaatacaatagttataactctcatccgatcaagatcggatggaggtattatgcttagagtgcttgttatgaacactaatagtatgctaagatctataacaagattcatatatagcttctgtatggtgaatttttttggtctttttagctttttatggatgggaattttttcaaatgctgtgtttgaacttagtatgccaagtaattaaatgctaatcttgttagtaatactcagaagtatcattgttaataacaaagaagacaatgtttgatgggatgaaagtattatattttactaggagggtgaagataatcagagaaggcgaggattattatcttgttcgccaaggcgagatccaacgctatttgggttcaagaaagtcttcgagtttgaaaagaagatcgagtgcaaacagtgacctgagcgaattacaatcctgccgtgggattttggacaaaattctattctttattggggacctagaagttgcttcaactgacaacaaacgtggccgagcgatttgaaatagtcttgatggctgtaaaagccacaaaggttcagtacgttttactgtaaacttgctctgtaatttattgatgcattcaactatgtattatgatttattgtaacccatgaaaactgattggtatagtatgtcattgtagtatgtatgagtatatatatttcaaaagtaataaagaaattcatttacattgttcattctcttcaaccattttagatttgaaacttgagagattttataaacagcaaactacatggagcaaataaacccaagaaaaatgctcaaccctacaaggacagacacaacagactgatcgaaataggactagacagatcatgctctatagatagttgcacaacaaagtagaagacatttaatagatctgacacagaacgccaacttcaatgggtgttgtccatatagttgagaggtaataaagagattttaaaatggacaccgttccccctttatatttgtaattaaaaaaattgtgatagctaatacaataaaaatggggtcaagtaggacaaattgggcaactattttagttgttcccattggagatgccctaaggctaactccaatgcagtttggattgttgtgacccatcagatggtgtcagaaggtaagctacgggtagactgtagttatgcattggagaactttaaatgtcatgagcaattatagtatctgtcttttttttttagaaaaataataaaagttaaaaactaacataaatattatattttaatgtatttttagagttgtttgcattggagtattttttttgtaaagagtgacaaaaaatgatctagatgatagaaaaaataaaatattattttttagagtgatgtaaagttttataataactttgagcattgcttacattggagatgctttaaagtatctgcagtgggcattggtgtcctttaatatttttaaataaaaaaataaaatataattagttaaatgtatgaattggaattaataggacaactatttttgttgagctcattggaaatacccgttagagtgatgatgttccaaaccgtctcgacacaaacaactatcatggtgcaaactaaactaaatggcaaaccccacaaaaacggccaaagccaatggacagtgtgacaaagcacttatcccaacaacaacaacaaaaaaatggagacaaccaaaacacaacacaactaaggatcgtaaaaggccaactaaagcaacacatccgaagcctaatccatcaccaccaaaatttgcctccacaaagccacacgcaccacccgagccaccacaatagaaccccatcaccaacaacaaagtggctcttcttccctggcaacccttctacctgatagaaccaaccaacagaaccttttcgagccccaagtccaaaccgtttcctgaccagtgaagcaagagaacaaaaccaacactctctcggccaaggcaaaggctagcagcagctgccccaaccgagagaagagacttatgtttttcaataacaattcctttttacttacttttgttttacaataaaaactagcaacactaattaaaccttaaaactacattttgccttcaatttgtaacaaggtttcaaaagatttaggagccatttatcatgtaaagaaaattaaaaatgaaaagctaatccaaaaatgctttaggtttagaatatcaccattggtgtagttttcacttacatcatatctgattaagaataaatgatattgtagaaaaagaataatatcggcattggcatacatgggtagaaatttcaattttctttctcaacagtaaatcctgaaaattgcaaattactgcactacaccactaattcacagccaaaaattaaaacaattacaaaatacttcttcttcctaactcatacttccattttccttttcgttgggcagaccactattttcttataactcctttttgtcttcttcactatcaaattgaatatacctttcaactaacaccaactgcaattcacagtataacatttttgaattgaattaggtagatggctagcggccgttaccgccattacgccatcgtcttgaaaatgaatccggtggtctgtcttttctaatctctcaattagatgtttaatggatctgattcggtgtccctttccttcattgcttcccaatcttcagtttctgtaatcagatattgtgaaaaaccataagcaccacaacagaaaaataccattccaagtaagaaagaccgaattttgaacttacttggcttttcggcgatcaagaagagcctcctctgcaagaagcatgctactaaaaggaaaatcgagcacataccgaacataaatgtgattgggaatgcactcaccttcagttgccaaaaacaaaaatagaattagtcacagtgagtttttttcaagcaagagatttatgtaaagagtattatgatgtaacatacgttgtatagtacaatgcagacgaagatattgagagggattctgaagaagttcatgatggtgcttctagcctcctcgggaatgtattgggacctcatcttcataatagatggccagaaaattccacagcaagcttcgaaggtagtgaagccaagaagcaggatgcatcctccaaatgagatgcctcctcctctctccgtggaaggaggtacaaagaactgttctatcaaataaccgatatttgagaataccataagacaaaaagagagtgaagaagggattgaaagtcttggaacggtgacttacactgatcaaaatggggagcataagtgatgctgaagcaacggcaaaaacaatctgcatgtagctctcgaccctgagagattggcgagccatcaacctagaagcaagggagcttcccaacatggaagccaacatgaatgttgcaaagatgaatccgtgaggaatgtcctcatcgttcgggcttagagcgggagtccagagaaacacaaatgtatacattgaaccctcaaacagagactgaattgccccgagcaatgcaattttttcatctgaatcacagagaagtaactaaatgagaaggaaaattcatcaaagtagaagacactggaaagagaatagtttctatcactcgtttcagattggttttgctttcaattttatgtgaaaaaactaaacaaggaaaggcttaaagtctaccagaagcaatggccacagcagcacccctgaattgggtaagcaagtccttgctctcagaaggatccccatagttctctgaccaagaagataatataaccgccataccgatagcaagaaagcacgaagcagcatcaaacggtgcaacaggtccaagagataatgagtcaacaagtagattcccaagcaaaccagccacaatagcaacaaggccattgccaagaaatattgcctttgagaatgttattgacaaccattgttgttcaaatcctctctgcagataatgtaggagaacagtgagcaaagtacaaaaggtttataaatcagatgcaaaagagaatggaagagaaaagcaacacgatccccacagatgaaactacaaacaaactagtaatcaattcctctttttacacctacattttgcaaatttggacagttatgcaagcacttaaatcagtttattaacacaggatcaatctacaatattaccaatctaacaataaacacaccaatgtgtcaacctgaaaagataaaaaccacataaaattgtaacaaaacaaatttgcacatcaaacgggtagtaatcctacaaattaataaacatgaaatgcaacaggcccttcaaagtgacaaagtaaacttcgttgttcttgatccattccatcacaaacaatcaatgtaaacattcaacgtgattacaaccacaaaataaaatacatagacaggacaaatgccccttaccttgttgtgttctgcaacgagccaggactcaaatgaggaaaacagcagagaagtggcaatacctcccaaaacacggccaaccatcaaaactctgtactgaggagaatgcttggtaatacagctcagtatgtaagtaatacagtaagtcacac

SEQ ID NO: 243258 - DNA, 1228 bp, Cannabis indica
agatggtcctcgagatttgggttccttgcgtcacgtggggggtgttgaggatgttcttcatagtatggaggacgagcattgtcttgaatgctcatagactggctccttgattcagagtggtaactctccccatgaaactaactattctctgttattgaggccctcaaggtgaaggcccttactgggcatacaattgtgttggggtaatttaagatcttgacaagtaactattgtgccatggtgaaagaagttgcacatgttgtggtccaatctcccttgatgccggtcccaaaggggcgtagttatcataggatatggtgcatcatttagaccgcctacgtctcctaggttgaggtccctatcgagcatggtatctcgagagttctctcgcctaccttgagggggttgtggcaagtcttgacttggaaggcgactaggaggtgtctccctttgtcgtgacctctctctcggagctggttgatgtggtggtgcattagtacgtggaggctcaagatgccttattggtgatgggggaaactggattggtgaaggagggttttgaacatgatcttttcccccctcatcaacacaaatatccctaagagtagaagaaacttgagatggcgggacgacattattgcatgttgtgctcctctcctcatgggagcctccccgtgggggatgtgtagcattatcttgagaggcagtaggtccttgtgcatccctcctagtttgttgctgtgtaggaggggtgtattgttcctcctattctcacaactaggggttgttacccgttgtcattgttgtgatggaagtctgtcactcctcccgccatgggtgttgttctcacgagaaggttgttgtggtatggcattatgattagtatcacagctttgggttgtttgtgacctagacctctcttggccatcgacagggtaacacattgaacgaaacccacgaggtcatccccttcttgccgtactaggatgcacgtgggttcctagtcgttgtggccttgtggccttttgggcaccatacctctcttaccactctctattgagtctgggagttttatctaggcgttggcacaataccttgttttctataaacacttcgtgaacattagtagttctttgtacaccatgggatggtgataacgaacttccaacatcttggacttgaccttcgtcatcagacacggattgtttgcatgggcatcaagaggtcc

SEQ ID NO: 243259 - DNA, 1572 bp, Cannabis indica
tgctggtttatgttgagcgaacttcattattctggttgcaggatgttcttacagagcttaaggtagatttagacagggcaagaaaaggaaagcctcctttgaaagacgccgatggaaagacaaagagaaacttaagccccgaagcgtaatgtcacttgacatttttcatctaatagttgtgtcattgtgtgcgtcttgttgatatgcttccttattatctccggcttgatttatttttacaggttagagaaaaagatagctcagacaaacacaaagatagagaaaataaaacgggacatgcataacaaagaggatacgaaaacagtggcgttaggcacatcaaaaatcaattaccttgaccctaggatcacagttgcgtggtgcaaaagacatgaggttcccattgagaaggtaatgtcaagcgtttctggtcctgtgggcattcttttccatcaattttgttcatcatttatgttgattgttcagaaaatagagaagaaacttgatacaattgtcttcctttgttatagattttcaacaagtctctcctggcaaagtttgcatgggcaatggatgtcgacccggacttcagattctgatactcggatttaaatgatgagcggcgccaaccgtctctgccttttaccaagagaaggccccaaaagtagaaaaggaggagaaagaactttgtttcttgttcaattatagatattcacattttttttcccctttaattgttgcagcggaaatttaatgctattgtacatctaatctaatgatgatggcagagttggcccttctttttcttcatacttctattttttcttttctttcttttcccaaatagaaattgttatcaattgtttatttggactttcatactaatgattttgaaataacattgactaactcttagtaacaacaatttttttatattctaaagtttttttttatttatgttagataatattaagattgtaaacaggtagcataccaataataagcttaaattttttcaattaaattatttatttggattatttttacttatttatcagtttcgatttctgtttttttttttcttttgcttttaactaatatgtatgttcgtggtcttgtacatgctattttcactgaataaataaatgacagaaatatgtaaaatttacgtctgttacattatttagtgaaatggtttctaaaaaaaaaacattgttcagtgaaaaaaaaaaacttacattaacataatgtgtaatagtaatagtataaatgtacagatatagtatattcaattaaaagtaaaatacaagaatgtaaacacataatcaatgacattttattatagatttttttttttttttttaaaaaaaaggttagcatgtatggcaaaggatgggcttagctgggcttttgcttcatgagccctggaaaagagttaggcctagcccattcaatcgcaaagcagcttttatagtggcccttcataaggaaataagacttgactatattaatcagttaaataattaattaaaatgggacaactcttttttttttactttatgataacatttt

SEQ ID NO: 243260 - DNA, 2460 bp, Cannabis indica
acaacaactcattgacagttgttcaagatattttaatataaaaatgctgatctgcaaagctaatctataaaccagtaacaaacatactcagatggcactaccgacagtccagatggcagaaaactcataattggacatacacaaaaacatggttcttacaatgtttttaatgaaagctacttttattgaaaggaaatctatgttatgtaagtgtggacaaaatgtaccttactcggaatttattttaatcccaattgagcagttgcaatggaataaagtaatgccttttgttggcatatgcataactagttctcattgtgtagaatttgcttctttgctggctttaagtataatcattttgatatctaattataaactctaaaatctcattgtgattcttcaggcacatgtaaaacaacagggtgaatatgagtccgtccaccgtgacttgatggtgggatttgggaagtgggaattcagtcctttagaactagaaaatccatttccgaacaatgaaggttctgttcacctatggcatggagatgaagacagacttgtgtctgttttgctgcaacgctacatcgcccagcaactcccatggattcactatcacgagttaaccggtgctggccatttgttcccggaagctagaaatatgtggggtaccattgttaaggaacttttgatggtgaaagaatgagcttcataggtagccttttttctgtgcatttccattctctctgaatttcagttttggtaacatccattgttgtgtgattatggtaaactttacacaagccattacttttttaatgtaatgttgctaaatgggaatctatttttcttctagtctgggtgacaaattatgtcattttaaatcttatcatgttatttgatatgatataaattttcagtgtaaaaatgttcttgatcagaacatgtagataagtagagcaaaggcttgatgatttaactgctgtttctatgaagatgctacatcaaacaatggaattgaaaagaagagagaattacagtaactatatttcttcaagatttaaaataaaaaaaaagcccaacaaaatgggacatatgagggatcaaaccttaagctggtctagattttaatttgatatttcgggattaaactttcttctcatctttccaatctgtttaggactcaatccaaaagccttttccaagagttcttcattgatcccagacccgaaaactgcagccgggattttctgcaaacctggactttggctattgaaacttccaaaaatagtggcaggttttttaccaacattcatttgaaagtgtacaaggcctctaggatacaccataacctctccttgctctaaaattcttgcgaaaacccgattagttgaatccacaaagcctgaataaacactcccttgaactatgtagacaatctctgtagctctagggtgaaaatgtggtggatttatcccaccaactttgaggtcagctcttgcaaatgacatgcctagtgtgttaagccccggaaagatggtggggttgacggagatcgttgcaagacctgtatcggtgaagtttccagacaacttcatgccagagaatacaaagtcatcagtggtggcctcagttgagtttttgcagggtagtatcataaggtgagatatggtttttatggcaccaaatttcgggtttggtatgcagtaatcttgaacagggtcagggtcagaggccaatgtaattatacattggaatgagaaaataatcacaaggaaccaaatggtgataagattttgatacatggctttagtactactactactgcttttgatttgggtcatagagaaatggggtttatgagaggttttatagaacaataacatggtgaaatatacacatttttttcttaatgaaatacaaatactctccttttatgattacattacaaggttaagtattatttgtttctaagccatgtattatgcttttgagcaaagattattatccaagtaggacctactgataattataactaagaaaaataatcaagtaataagttgctaactatttgagctcatgtagaagacacgtagaattatcaaccatgattgttatgattacatgtaattgatatacatactagaaatttctgttgaagaaaacatgtgttgttttaattagatattattttgtttattgtattggagatctaagtgtgaattctatagtaattttgttgttggcttgtttgttgcctttgcttctgagtgaaggtagaaagggaatattattcatgaacaattatggtttcaactcatgcgtgatatcatcaatgttatgtccaatgatgtctaacataaataatgtgtacatacatactatctatatatgttttttttgttaaaaagaaaaatgaattaatataccaccagtgtatagtgaaaaatatatatataggacact

SEQ ID NO: 243261 - DNA, 2629 bp, Cannabis indica
  modified_base (2440)..(2440): a, c, t, g, unknown or other
ccgcagacaatttaagaaaacacataacaataattaaaggagtgttaaggttattatcaatttcttattataatcttttcgttcaatttttgtgttcaaaaatacttatcgaaatattttcttttatttttttttataattgtgttcgttatagttataacattagttttgtaaatttttaaaaaatttcaaataatttacattgctgaaaataatttaaaattttctgaacatacgtggtggactgaattttaaaattttattctaagtactgtaaactattcaaaaaaattcaaaaatgtatagagatgtgagtataaaattaaaaaaaaaaattacttgcatgtgtattttcgaatatagaaattgactaagagattgaaataagaggttataattactataataagtatagatttttatttaaaaaataaataacaaataataacaaaaatgaaccaaaacaaacacaactacaatatgtagatcgaaactgaaaaatgttgtcaccagaaattgacttaaaacaaagaaggcagatcatgttgctacgaattgtcctccaaatcctctataaacacagaccaatatattgagatttgtgttgttcataataacattattatttcacctcaggactccgaagttaaaggcacatgaaatgttactttatgttaatttcattgcttaaccacgttactaatactatatattattattatcattaattactcatatatatattttaactggcattatcctatttaaaccaagcttataaaaaatatatgaacatttcggatcaatgtgtaagaatttgccccaacaaacttgttcaatatgttttttcaaaagacaaaattaaagtatatatataaacttaaggttgcttctgactctctgagacgtggcaaactgtcgagatcactacattggaataaaccaaaaatgttgtaaaatatatcaataaatataaaaacccatagtacctcaaaggccaaattaagcagagtggcttagttatgaaattaattcattattatagagaccaaacaaggttggcatgtgccagctatatagaatataatttgttttgtcggtttccctgaaaaatttaattaattaccatacaaattgattaaagacattcgttgaaacaaaattaaatttaatattaatccaaactaactaagaaagaaatatatagtgttttgtattttataccacaccacacgtactctttccactacttgatcatattattcatttgtacgaaaaaaactgcagtatccaaaataataagaagagtgcttacgttaatctttttcttttctttcttaattaataattacagctttaattatcattcttttgctttatttattataaacaatgcaagcttaataaaagtttgcagccctcgctagttttgtttatcaatggttaagattttttaaacgctgcacatgtaagctggtctgccagtgtcataaaatgctaccttttttttttttggaataatcataaaatgctaacttatagctatatatgatatatcttagcataattaggtgaatcagctttatttttccttttttttttttttttgaaataaatgaaaattttacattatatttggaagttagatttttcggtgtagaaaaaaagaagtaaggaaaatgtaaaaatatccgtatgactctactccactaatactttgaaaaaaataagggtgatggtttttgtgctattaaacttgatatgtataaggcgtgtggtcgagtggagtagaattttttaacaggcattttggagaagattgattttcttggaagttggatcaaaaaaattcttaattgtatttccacagtagaatattcaattctcttgaacgaggaggctcttggctctattactccgaagcggggtctgagacaaggtgaccttatgtctctgtatttatttatgttgtatgctgagggtcttttgaggttagtcaaaagagactgcgagaatagtctattgtttgggttatcttgtggtcgttctgggctagttatttctcacattttattttctttgctaatgatagtttattcttctttaaagcttcagatgtctgttgtgctagattcaagcaacttctaagttaatgcgaaaagagaaaaggcagaatgaaattgtattattgaatgaatggaaaagaacaatttacaaggctatatatacagaggaaaagcaggggtgacacatcaacccaatttaacaaatacaaagcaccaggacaagaaccaaccgactcaactaaattaactaacctatctgacacatctaaactgaaataatcgaatgagcataaatatgagaagcagttaggattagtagaaacatctgacttagtaatattctgatagccccccccccccccccgccccccctnaagatggacggtaaatgtcatggacggacatcttggcaatgtgagaagagagtgtagtagaaggcagcggttttgtaaaagcatcagcaagttggagggaacttttgatagggatgagtcgtatggaggaattcttgattttgtcacggatgaagtggcaatcaagttctatgtgtttggtgcgttcat

SEQ ID NO: 243262 - DNA, 1406 bp, Cannabis indica
aaatgagttttatttagggtaaaaaatcccaacataagggtagagttttagaaggtcagccctgacattttgtacaaagtatcactatctttgccgctccagatagttcttttccccttactcttgacaatctgcattatgttcctttttgcattcaagtgtatggaatcctgtttatgtgtaagtcttataatcttgctaaatttatagccatggaaataggtgaccttattgaggtagataaggataccattaaggagggcactggcccttacatgcgtcttcgtattctcctagatgttaattttccaataagaagaggtatgaatatcaaattcattaggatgggacgagagtttattaattggctagactttaagtatgagagactcctggacttttattttttctgtgggaaactagatcacaccaaaaaatattgccttgctttcttgcaaaagtgtgatgaacttttatctgaacctttatgctcctataatatcctgctcagaggtaaagagaagatttctgaaaaagcctcagccttttcaatatccccatcctcctgtaatcaccatggtgaattttcatcctgtgaatcttaacttaccacctcaacacctatctacccatttaattacattctcgtcctttctaaatcctaatgctaattttactggcccatttgctcccccacaatccacatctgttatgatgatgcccacacccttgaaccccaacacttcaaatattaccccctctttcaataggcccaactttgatatctctttgcgcccatatgcatttacctcctattctactgattcattaattgttgctgatagccctgctagccaaatggaaactctttcctctacccctactttttttgtggctagttatggtagttccctcctgctggtgactcttctatggaaactaacccttctaggggttagcctgattctactgttcataggaaaggtttggttttggcttctggtgtcaaacgaccttctttccaaccccaacaggttgtggttggtggttctgtgaggtcccaacttaagtgtgctcgttttggagagagagaagatgattcttctcttaaagctactgatttggaacaagcgggtgatgctttacacacccgcccataaaaaagagtatattgagttggaatgcacgtggataagggattacacgtgcattcaggaggcactcccttttggttaaggaaaattgccctgatgtgatttttttgatggaaactcgtttgcctatgaaggttgttgatagagttaaagttgctttgggttttgataatggtgtagaagtccctaggaagtattttggtggggggctttttcttttgtggaaagtaactgtttatgtaaatattttat

SEQ ID NO: 243263 - DNA, 5916 bp, Cannabis indica
aaggaatatcattacaaaactttaaaattcagccaaacaatggattcttttccattccaattaaaactgtcaaaagcaaagaaataatccaaaaacaaagtaaactaatgctgctttaaagattaacaaataacagctcatcaacagtcaaaatggcactaataaacacctaaaatcctcatatctcaacataatgaatttaatactgtactgtttcaaatgtaatagtgctattactaggtagattagttgtaagactcttacattagtacattctataacacatgccactgaacttgagtctcaaaatgtcttggaacaaaagtaagatactttgatataaatgtgaaggaaagtaagatttgcaatacttcagacttatatacaacaatgtctgcacaattacatttaaacaaacattagacacaatataataacctcaaagagttaactagctgtaatacaaagaagccttattctcaaccaataaattcgggggcaatggactaaaaaataccccaaaaggcatttgcttggtatcattcatttcacatgtaaactacagcaatgtcgattacaaggaatcataaaaagatgctacttaagattaaaacatagatatcgctattgaaaacagcaacttagcaatgtgaaaacctaattgaactatgaagtcatgaccaatacactagagtcacaatgaacttttaagtaccacagaaaagggtctgataagagttgatacatcacctagcgtcgtatgtacgagtttgtggctccaactgaaccagcaccaggttgagactttgctatgggagctgctaacgcagaaggttgagccaactgagcattctgataagcgccaaatccttgtaaagcagcttgggagccgtaaccactaaccatacttgagttcatactattaaaattaggctgcgccataccaaacccaccattgattcctatagtaggagcagctccaaccccattcaaggtatgtggaactccaccagcaaatgatggagccaaccccatccccaaaacttgattcataaccccaagagcaggattctggctcataagaacagcacccggattcatattttggggaaccaacccaactttcaaagctggcatagcaacattattaggagccaatgcctcacctgcccctgaaaccggcattgcaggagctaagttcttggtggcacggccttccgttgccacagaacacctcaacttaaacccttcaaaaaccttaagcggttcttctaaggctttcttcataccctccaagctcctgtaaacaaacatagcaaaccctttaaacttcccggtggccttgtcaatcccccatggaccatcctcaatctccccatatgcttcaaaaaatgccctgagcctctcggggctaatgtgtggcccaacattcgacacgtagattctacggctctctgatgacgaagccgacgccgaggcggcagcaggagtggactgaccttgcagggttcccgcgatggcgagctggcacgaagcaattcggttgccgatctttttctgaggctgctttagggctttacgtgctccggcgcgtgtcttgaagaggaggaagccgtatcccttcgatcttccggtgaccttgtcggtgacgacgttgcaatcctcgacggcgccgtattgcttgaaggcggagagtagggtttcggtggtggtgtcccatgtgaggccgtggacgaaaatcttgcggtgaatagggtcggactcgacggacttgactataccggagacaattgaggggtttgatacggcgacttctttaaggatgttgatgagttggtctttgctgaatggttcaagaagattcttcagggcgtctcgcttagaagcctcatctgattctgaatcttcttcatcaccatcgtcggaggaagagtccgttgcttggacttcctgcttctcaacttgttcttcttctgaagaggaggaagatgatgattgttgccagtccaactgagggtctttggtggccatggggtttagaaggggtttggtctctacagaagaaggagcttccttggggatagattttcgctttctcgccattggagaatgatggagaccagacacagtgacagacaatgcccaacgcaaccactgaaagagccaatttctttctttcttttttttttttgaaactaaattcattcataaaagcaacattacaaaggattagtgcaagctttcacaagggtaattaaccccaatccatatagctattattttattaatcaaaggatcaggctaatacatttgcaacctcatttgtctctcggtataccaaggaaattctagcaattgaagcaggtaacatttccctaatacatttaagtattccatcaatatctctatagccctcctccttgttatggattagttggacggtctcctaataattagatttgacactaaatcagtttaagcacctttgtactctagtttgcaaaccagcttgaatggcaaggagctcgacatggagtagcgaatactccttctgcaacatcgtagcagaagcaaacacgcactgtccatttgtctcatgaacaacacaactaatactagatctgctccccctttattcactctcccatcaacattaatcttaatttcattttgttgaggatgtacccatcgagcttgttgccttttgttatgatttttcttgtttaatatcggttgcctatactccactatatactgagcacaccagtccacaacttcaaccgcttgtgcacccttcctccatgtttggtgttgttcctaatatactataattgccaacataacaccagaaaaaaattcatatgtatcttgggtcatacattttgcaattctcatgaggaaggtaatgatatcttcattctccacccgctatgtttcagctttaaaaccattaagttttcacaccctttattagtcgtacacccccataatgcatggaaaatattttctcttacccttttagagcaacgatggcaagctgggtccccaattagcttttgagaaacaaggttagagttcgtaggcagccatgaatttgccatcttctagacaaaatgcttgatcttgggcggtaattccaatttccatagctttgtccaccattctttcattaccttttcatcagaagtagccacatcttttcgcatatcagcagccatgtgacatcctcttcgtactgaatactccccgttcttactataatgccacatcaccttgtcttctaagtcttccttaatcggtggtagccgcatgattaattccgcatccttacaaatgaaattagctcgtataaattcctcatcccactctccacttggaagtgtcaaatccacaacataaagttgttctgaaagtgcgggcttgtcatataccttgaaactcgttggcctaggtagccaagggtcttttaatattctaacattctgcccattgccaactcgccatctataccccttcaaaataatttattttcccacactaaactccgccatacaaaggatgcatgtgccccacattttgcctccaacactcctttattaggttaataacttgctttgagaaccttgctgcatagagacattggttgccgaagacatctccaaacctgtttggcaagtaaagcttggttaaacaatttaaggtctcgaaagctcaaatcaccttcctcttttggcttacataagtacttctatttacaccaatgcgtattcttcttcttttccaaggaaccccaccaaaatcttgctgccattttatggatactattgatggtgctctttgtgagtcgataacagctcataatatatgtgggaatggctagaacaatcgccttaataagtacctccttcccacccattgagaacatatgacttttacgtcctcttaacctagtccacaccctattcttgataacatcaaataattactttttatttttgccaacaaaagacggcaacccaaggtacttcccatgattatccaccatctgccaattcaagttttctctctgctgccacattcttcccaaagcacacttcagatttgtggaaattaaccacttgacccgacgctatagagtacttattaagcaatgtttgaaatcgttggcatgcctcccatgttgcatcaaagtatactaattataatacgccaagtcattgaggtattaggtactttggtacttcatagggctgttcatttgatccaatctgtaatttttcagtcaaacaacatccaatccgtactaaatgcggatttatattttggatccatttcaatctgcataagagtttaaatccaatccaatccgcataaaagtttaaatccaatccaatatgtgtaaaagtttaaatccattccaatctaatccacaatagtacatatttgatcgattattttggatagattactttctttaatgttaaattattttatattccaataaaatgcaaaaaaaccaatgtatataaaggaatgtcaaaagagaggtgatgtggcatcttaaggtgaattttctttggcttttctttttttttcttcattttttttacattttttaatattttttttatacttttggtaatatgagagtcatgttaaaaaaagtctcacatggtttaaaaatcattgtgagtgatatacttttggtaatttaattttaaaatataattgatcttcattaaagttttataaggaaataaattattagttgactattaggttataagttaatattatttatttttatttaattactaaattaatcacaaccattcaataatagtttaatggctaaaaaaaaatgtaatcatgatggttatatatttaatgtaactattggaacctcacccatttatatatttataagctaaaaaatatgagttagcaatttatttattttttccatattttttattcatttctcttctaagtgatatttgatatacttacctgaaaaacttatataaaataataaattataaataatgatagaatataatctaattatataattaaattaataaatctataatcaattcttttatagtaattaataataatacacatataaaaatattatgttttagattatatcattcattataagtaaattatatatttatatataaaaattacaaaagtttaggaatattgtgcgaagcactacttagttccctagtaaaaaataaagaaaaagaaaaatatagcagtagcacagccaaaatttaacaaacattaaaaaataaactattatttcttaatctccaacaatcatctcttttcacctctatctagataattatttctttctatctctatttacatacagaacaaactaatatatatatatatactcatctcagatgacaaaaaaaatcattactatatatatttagatttacaccaagatatatatgtaattattactaaaataaataagctaatatatattggactcttctactgtgaggaattttctaaatgccctatttgtagggcatttaatagcttattctaattgggtaagtgcattgtaatacggtcttgaatgcaacatatttaaaataggattgattaaaatattttttttttttatttaaccctattttttttcacatttgctatttaattgagaaatgctatttgtctcccacgtgtccatcctacagtgtatcattctaactaattttttataattactttttttattaattcattatttaattttaaggcatttttcaaagatatagaaatagataaattcctaataaattttacggtgatattatatttagtgcaaaaatgtagaaactaaaacttttaaataaaaatgcattctccattttaccggcaatc

SEQ ID NO: 243264 - DNA, 3598 bp, Cannabis indica
gttctgatttttaatgtttcatagcagttgcattacagttgcataaatattttgctaacaaatatttcttcacatattagtactattaaggtacaagtaattatcgatcagtgacaaaaaaaatactaacaaatagtttctcacatatacacattcacattttatattgttagttgcaattaagttggacgttagttggctcgcaacagatataattgttgcattacagtttcaacagcaacccacgatccatacttactgggattgaaatcttcatttgatgaagctttcagttaaccacctgctatatatacctataatgtacatagttttattaaaaaatttgaattatagtttctctaaatattaaaaatagggacgatggatcctactaataaagacaaaatgatattcttaaaatttttcataatatatatagggcaattatagtaaaagtattatttttgtccctacaagtaagaacatatgcttttagtattaagaaaaaattataatttataattatatatataatagagtctatgttatagttttaactcttttattatattattcattaacataaaaattggtaaatggtatataatttgtatccatttactaactacaattcatcactttacttatttcatcatgttaaaatcgaataaaatgtaataaaaagattacgttactgtaaaatttatatttcaaaaaatattattaataaattatatactataaaaggcacaacttactagtataaaaaattgaggaagcaaaaatactaataattaaaaaataaataagtagtgtgtaacttaatttgaatcttgggttttttttttttttgtacaaataacaaatttttcattaaaaaaaatcaagagtgtttagtatatcgtaagaaatgaaatttttttcatctagactagtttactatctactctaagtgcgtgcacaattaactcatacgcagttaaattaaccgaacgacatacataaatgagagacgccttaaaaaaactgaacaagagactaaaaatagtgaattgctaaaaggtatcattgtgcataacactttcctcggtgtcatactgctattagtgtaattaagtatcgggtctcatataacttaaaaaaaataatttctaaagaatatcactaatcaataatagggcgctaccactactaatacccaataaaatggttctaaaaatatcttctaaaaaaagctaaaatcattaaaaaaaacaaaatctcttagcagaaggagagatcaaagctaaactatatacttataatgtcttctgcaactaaaactataaaggaaagaaaatttgacttatataatcaagtgttaaaaatagaaactaccctttggtgccctagtataatttttcagtacatatatatatatgcttaaataatgattaattttcttttagatctagttttcatatttatcacacaaagtttaagagaagaaagtataataaacacaaatcaagaaagacagaagtaaaataacttatctggtgaagagagacttgatgaagaatccataataattactataacaatcaaataatttagtgcctaaaataccctttttgtgtaacattgcttgcccaaatgagcatctcagataccagaagaagtcattagatcacatattatatatatatatatattatatgcaactactgttgctggaatactcatttgagcaagagaaattacaaagaagattcaatacttatctagatctctctctcactctcactttctctctctcttaatatgaagcagaagaagacctttctgttctgataagacttattaggttgggtttaactatatatgtcatgtttgggagtgtatatataaagtaaatgctttctatattgaagccctacaaacaatacccaactgacaacccataatcaaaactacgaaaatgccattaggtacaatactaacacatgaaagtggtcgaggagattttggtaattttagagttgtttgtggaaattaatgaaagagaaatttttttttttgagaaattacttcatatactattttttaattttttttaaaaaaatttatgatttgggtttttaaagtgattgcaacgctagttccaataggggtttctatacgatttttttgttgcaatttaggttgaagcactagttgcaataggagtttctatgtagaatttcgtaaaaatgcaaaaaaaaattattttaaagtgtaaaaataaaaaagaccctttttctataccctaaaaaattttaaagatactttattttaataatttttattttatataaattttatatttttaattatactaaatttttttaatatatttcttccaatttatatttttataaaatatacttatcaaataaaaataaattatattttaaatattataacaaaaaaattaaaataaaaaattgtataaattttttttaaaaaaataaaaatatatatatacatgaattagaaaaattataaaaataaaatcaaaataagtattgaaattaacataaagtaatgtgaggaaaaaaattaaaaaaatatatattaatagtaatttttaagaattataaatttaaatttttttaataatagagtgtatttattattttatagagttcaaataaaactctccttaatccaataggttgttgagatttgagaattgggtgaaagaataggtacgacgagtcgttggtgttgagagaatggtagttcacttttcatatgcatcgaataatggaattggaacccaccatttttcatattttgtcttatatcaaactttaagaataaaaattgtggttgttgcttactttgtagtttgtaccatttcactctccttttctaataaatgaatatgtccaaattatcactattattttcttttggaaggagaaaaatatctataaaatttattaccatacaatgtaggtagacacgcacctttaaaacagtgtggaatatggatacccttttcaaaatacataaaatgtttttaaatatttaaaaaggaccatcaataataatgatataaaataaaataaatggcgtcaaaactcctcaatactttcactttcgttgtacttaatttctaaaacttaaattttggtggtaaaactcataaaattaagaaaccgttagcaatttacagttttcatccatttcaagtattaagtgtcatgttagactgtccatgtgtacatctacgtggacaagatgtacacacggcacaattatattggtccacgtaaaaaaatatttaacaaattaaaaaattaaaaaaaataatttaaaataaaaaaatatattttcaaaaaaaactatttaaaaaattaaaaaatatttaaaattataaaaaaaattgtaaataaaaaaaaatatttttttcatttaaaaattaaaaaaaaattgaaaaaaaattccttttttcttctttttctttcttttcctcaaccttcttctttagccatcaccaccattttaccctaattcccaaaccattttacccaatctcttcagccttcttacttcttcttcttcttcttct

SEQ ID NO: 243265 - DNA, 4562 bp, Cannabis indica
aggaccttcttttgtttggttaaatttaatgtgatcatatcatcgctacaaggctacatacttccacgcttcatatttcctttctttctatatatttattcatctatacataccaattataaaactatattaaaattgcataattggttggttgtttggttatgtgcatttctattttccagtgtacggcctcctgttttttcaatgcattaaaagcagtgacatgaaggacctgcatgtgaaatcttttacaattggatcacaactctcctctctctctcccaatagtatcttcttttttgattttgatgtgggagtggagaaaattgagtcattgagcttagatggatgaccaaagccatgtgaaatctcttcatgaaatggggtcctctaaagcttacctggatgtcagactttctgacctcacatccacctgtactatcattccttccctataaatacacaacactccataattccttctcattccaacgtttcctcataacaaaaaatatattaaatataaatattatccatcatcaaactacagagaaagtctaagctaaagccatcagaatcaagttttagagtttcccacttggaatacttgaagtttactcaaatgggtattattagattgccatcaactattcagaatctcaagcaagctctcaagcttcactcatcaactgctggagctaagcatcaccaccaccaccattctggtgtcccaaagggccatattgcagtttatattgtgggagaaattcaagagaagaaaaggtttgtcgttcctatagcttatttgaaccacccaaaattcaaggagttgctaaagaaagcagaggaagagtttggttttgaccacccaatgggtggtttgaccattccatgcagagaagacacttttgttcatatcactgctcaattaaatgttgcttcatgttgaaggctgatattgagagtaactccacattttttttgggtagtagtagaggctgtagagatttttatgacatgtaattatgctattagacaaggatattaggtggttttaattgataaccatctaaaatccattgagaaatgaaatcatttcctattaaatcctctaagtatttgactcttaatttacagttcttttacatatatataccttctgtgatgattttgcttcatattgcaccaaaattacaactttaaactgttataacacagatgggattttaggggaaacgcttctttgtttaaaaaatagatattgcatcagtaataggaaagtattcatctccaatccacactaaaacattatctaagcagaaagcatgtttagccaaattgttgtgggcttaaatcaatgccagggataagagataatgacttactaatatggattggctataaaacaaatggtttcattccttaagttgtaatttcaatgaccataactttagaagcatattcatgtgcttaatttttcttcacactgagataaacttatgatgtagattctgtcaaacactattttaatgtgaatatgttaatttatttttgggaaatctaacaaggttttttttagttgcttattaaacgataccaatatgagttagacattcttctcatggctaggaagagtgaaaataaaatctgttatcaactctttctccttatagcagttcttgttcagattaacatatcttaactaagtgtaaaaattaacaaaagcaaacagttcagtacattggcaataaatgaacatagacacaactaaaaggcagacaaagttgctaatatcttcagggtttggataatagacagctgtcttcagtcatttcatttattatcataatttcaataattcaagaaaaaataaatactagtccagactttaggttgaacagctttagttttgctctgtcagagcctctctgctcagtagtctctcaattttgatggcaatattattggtggcagctcgcaaatacctttatattttgtgctaagtttttctatttcaactcatcaacaacatcgtcacatggattggtttgcttctctcttagttatgtgatttgatttatggcttaaacagcctcagattggtcggcttgatggaagttgtgggtactcattagtgtcgtacaaatgaactctgtttctatcaaatgagacattggtatcatttgtgtcttatatatagtttaagtacattcattaatcaaaattcaatcacaaccattcttaagggacttatacatgtgaattgtattcttataaatagaaacatacattgagttagaatatttggcaacagagatgttttgcttttcttttttctctttagataactacaacatttaatataccctataattatttatcttacaagataaaaatggaatatatccttatgccgctccatggatctctcctctatgcataaattggctttgagatccaaacgttttctattcactttgttatgtctttggctaatattggccacaagctaataagaaagctataaattctaagaatggggtggtagccaattaaggctcgtggcagaaaccggcaagaaagatcattgatgaaacttttaatagagcatcaactgaacttaggaaacatatgtagacgtagacgcttccaggatgtctgccgtgcaacatcacctccttcagtccaatgacaagttgccggttctaatgtcacgctgctgatgagcgattccttttcctagtcggaactgggataggttcatctcatctggtttaccactgaaaagaggagcaagcttaggttgaaaccatcttttaagtgttattccgctaattctgatttttccatgtgattcatttccctggtaatgtaatccaatccttctcagtaaagacgcaactgcttgaccaaccctgttcacaataagatattttagtttagtaagcggagaaaacgagtgaattatcagagaaatcagttgtttaactatagagcaggacaaacatcgagggagacagatatatcacattaaccatttcaatttgaataattttcaacatgatactccgtccgtaatctgcaaattttgagtatattacttgtgtgtgttcatgtttatttagccctattctttgattaatgattatagattgttgttggttgcctctaccaaatttgaccaatcaaatatgctgttgttcaacttcagagacaccaaatatagaagctcaatcaaacttcatgttgtaatttttcagaagccagtcttttacctccctgcaacgttgactgtcttctcctcgccatttggagatgtcatttgggctttctcaaccgggagtaaaatggttatgccaggtagcctcgcacctgcataatgtgtcaggggccaccagaaaagcaaagatgtaagtattaaaaaagaaatgttcctctcgatcatttatgcttgatacaaaattcagtgcacatttcagactgaacaaatttgcccacctaattataattaatcttctacgatatactgactaaaaacttcaatcacaactcaaatatttaaaatgacaacaaaaaggagaagaagaaaagaaaaataccagcagcaagccgatgtttgagacctttcaaaacagttaaaaggtacacctgcgaagtaccatataagattttaattaatctgaatgcttgagcttttgtagcatgcaccattgtagataagtgaccatgactttcagaagagaactcacctgagcagtatgaatctgcaacttccttgtatcaacgataacaggattttgtttaaaggatactaaaggaacaatcccatgagaagcagcttcctattttaacacggcaatgttacacgatttccagtaagtttctatttcaaagtatgaaccaaaattgttaaaaattcaacactactgacctcaagtaatgaaaaaacacgagggtcatattcaccaaacccgtctatcagtgaactaaggtttgagggttttgttgtgtccgcagttacacctagattctcaataagcctatttttcaatgatgcatcatatgggagctgcaagcatcctaatacttgagataacacatcaaccgtagggacaataccaggtgaaatggagtcacggtagaccattaaggctgatgatgtcctgtaaacatagcacaataaattgctcagaagcttatactaaactccttactcattaatgatacataatcaactttctaaatcatttaacagaagtgaatgtatgtaaactaattcaatcaaggggattacgttagtgttctgtccgatacattctattactaaacacaacaggaaatgttataaaatgaagaaatatgtttctgccctgagtacaattcaagataattttttcaaatatttataattatatgttatttttataggtgtactatagatttttgggcgaagaaaaaacgcaacttaacaaaattcattttatggacctaaacgaaatgcaaaagaggcaatttatgcattcactttgtgcatgcttgaacatatttttgtagctttctac

SEQ ID NO: 243266 - DNA, 3847 bp, Cannabis indica
caaaatttagcatttcttgatggattttaacttaattttaaacccaagttgctagttttttatgaatgcctaaccttgacaatgaagtcttttactacataggactatttgctaaaaaatcattagtgcattactgaatttttttagcctgattgctttattgatgctgatgagaaactctttcaggtgcttggtgcttggggtctgggctgggaaatatggatggatgggatggagatcacccaattcacttacttccagcaggttctttcttctatattgaactaacatgtactgtacataaaatatttttcctttcctgaggtaagagttatattttgctagtttccacaccttcacatctgtatgtctctgtctttatcttctcaggctggaagtcttcaattgtcaccaatatctgttgaaattacttacggccttgagcgtatcctcatgttactacaggttagtgctggtagctcctctttatattttgtttagttattgcttgcaattaacctaattccgctaattacttcattgcagggagttgaccattttaagaaaattcagtatgctgatggaatcacttatggggaactattcatggagaatgagtatattagctatttatcttctgcttttttttttttttgtttttgcttttaaacgaagtatgaaaaattattatctcttacttgattcttactgttcttatattgccgtgtcaaggggactagaaaatctgaatttactatgtgttcttcttcttcttctttcttttttttttttttgaaaaaagagaaagggccattgtcttagacaagcccctccgttatgaatgaaaagccgcacttgtggcagaggaaaaccgtagttacaaagttgaaaaccaagcacaaaaaacctgtagtactctatacaccctgaacataatcactgcccctataatcgttttagcaaagccccctaggacactcataaaaccagaaacattcaaatgaggcagaagcaaataaactacaacaatgctctccaatctctaattaagtctaaaaatgaacgattttcaaaatgctttgtcttgtatacccaagatgctgtccaaaatctattcttttcccataggacctctgctgaacactcagaaccttcaaagattttgttatttctttctaaccaaacagctcacaacactgccaagactgcagttctccataagcacgtgctccttttacttccacccaccttactcaccatcatttgaggaattgaacaggttaaaacccattgagtctcaaattcgttcagcagttttatccaaagactacacgcaaggcaacaccttacaaacaaatgtgccacgtcttccccacttttcttacaacattcacaccatcccgatgacatgcatagaaaggtcacttttttgcaatctgtcatgaacatttagtttatcatctagtatccataaacgactatcatccaaaatattaagcactctaacctgttccgactgctgtaatatttgtatcaagcttgggatttccctttccataatgtttcttctaaatttgaagtcccaacttgccacatagttccccacctcgccttcatttacaattagctcctgaatactttcattcttagccctagagatcacggttaagtccgggaatcaatttctcaacgaagattccccaatccactcatcttcccaaaaacgaatacttgccccatttcttgctttgaacttcaccaacttgctgtatttgtcataacacaaaactctgaaatatccttccacgaccctcttagggacaatctaacccccccttttgtatcccataaattatttgctttgcgatagcgatttttgatcactttgtgccacagagaatttgactctaaagggtatctctatagccatttcataagcaaccctttgttcttcaattgtagtcttccaattgctaaccctccctcatttcttggtttgcacacctcatcccaagccacccaatggtcaccaccagctaagtctccaccttcccaaagaaagtctctcatcattttttctagagcatttatgacgacctttggagctttgaagagagaaagatagtcgattgaaaggacagactaaataagagtgagcctaccccctccagagagaagagcatttccacccatccaatcttttcacacacttatccacgacaagctcccaaaaagtctttttcctcggtgagccaccaagtggcgttcccaaatatgtcataggccaattgcctacctcacatccaatttgtttcgcacattggaccaccgcctcctcaatttgatcaattcccaacagttgacattcaaatttacttttaacccagaattaccatagaaggcttcaacaatcttgactagcttttggagtgatgccttatcatttacaaagaatagtgtgtcgttcgcaaactgtaaatgactaagatgaatattgtctttacgtacttggaaccccaaatatatccaccatcctcctaagcacatcagctactagtgtaaagatgaacgatggtagatgatctccttgtctaagacccctagtgccattgaatttacctctcactctaccattaatgaaaatagagaatgatgttgatgagacacatcttctgatccattttctccataactccccaagtccttttttttctcaaaaccagatccaagaattcccattcaacacaatcatatgctttctcaaaatcaatcttgaacacaaaacctcctttaccacaactcttgtaatcctgaatcgcctcgtttgccattagaactgaatccagggtttgtcgcccttcgacaaaagccgattgggtttctgagattgtctctcccaaaactccacagagtctagtggcaaatgtcttagcaatgattttatatacacttgtgatgagactaatcggtctgaaatcttttaccttgcaagtgtttaatcttttggggatcagacagataagcgtcttattgatgctgtcttcaattcttccctctctttctaaagctcgaaatacttccataagttcatccttgatggtctcccaattcatttgaaaatcgccaagctaaaaccgtctggaccatgctctttatttccttcgcagctaaaaatgatccttcttacctcttcttcttcaaaaggactttctagttgactcgctaaggactctgaaatttgttgccactcaataccttcaattccattcccaatctcacctcagaggtataaagttttgaaaagaacactatcaactcctcaacaatttccttctccttatcagtgactgacccattatctctttcagctctcgaaatggtatttctagccttgcttgcatttaataagttatggaagaatcttgagtttgcatctccttagcccatttacatttagatttccaccagaccacttgtttcttcttcaaagttcaatcgttgccactcttcctttaaattccttctttcctcggacagagattgattccaagagggggttccttccaatctatctaagacccccagccttccttctagctcattctttgttaacatgctttgtccaaatgtggatttactccactccttcaccttctcttgggttattttcaacttactcataaattttgtgactggtcacccgtcagtaactatctccttccaccaccttccaaataatttggaaagagaattatgttctagccaatgattatcaaaccgaaaaggttcagggccccaatttggaggattttagtcggccacaaatggctatggtccgaaatttatc

SEQ ID NO: 243267 - DNA, 1541 bp, Cannabis indica
aaaaatatatatttcatcatatgaattctattttttttttcaaatttcaatcacacataacattaattcaattattaaaactcattaaagtttgataagtaatataaatttcacaacttacatactgatcactcatgagcaatgtgaaactaatatgtgaaactaatatatgctacataaccacataactatacgtatatataaaaaaaatgatgaattatataagagatttataaagtcaataaacaatatttttaatattaattaactattgtgtgaataagttatattctgatctcttagcttgtatttatttttattaggagatattcttttttagttatttaggatcattattagaggttgtaataagtatgttatctaaattttaagaaatgttcatggtccatgtacattgaacgactaatatggttgtattaattgtgcataaaattaatgttgtgatgtgacagatcttcaaaaaaacacactatttcatttaaagggaagcaaaacagaagacataacaaaaggaaaaacagaactcaaagaagaaatgatccgtagcagttttggaaaaagaaaaaacaaatacttaagaagctctaaaagcaagaagaggaaagcgtgttaaagagcatatgagaaatctatgtggaccaattaattttggcagtaagagagaagctaaggatcattcgcgcttataaatagaagaccccctctttagaaaaagaaggatgaattcttaatcatgccagactagtagacactcagtcgtaatacatcctcaagtgcactttgagcccaggaagcagacgacccaaacaaaattgagtgaattgagagagaaattgtgtaaactgaattttgattagacaaaacatggtataaaaaattcaaagtcataatacaatttgttgttgagtcaattttcgacatcaacatatacttttcagataaatgatcaacttgtttggctagatgacttcctgtttcttgtcattgagatgtatagcctataatattactttattggaattggatataattgaaagtaattatacccttttgtatattttttatgccagtctcaacataaagcatgactcgcacaagagaattaaaatgtgtcaattatactcttcaatttttatactctgtgaaaattcagtgtaattagtattttccaataaataaataaatagtaataatagaaatctatttaaaaataaaatctaaaagtgacttgcaatttatattcgaacatatttcaccatttacaactgcgtattgtagtgtagttggttcgatatctttacactaagtctctcatttggttttctccctcggtggagggcctcagctaataaccattttagtacaaatcattcaaattgattttgcattatcttaatttaatcacaaatcaatatataataaaagtataaatattctaaatattaggggtgttcgcggtgcaggtggtgcggtttttaaccattttttcaaaccaacccgcacatgcggtttttccaatt

SEQ ID NO: 243268 - DNA, 2772 bp, Cannabis indica
taggaaatagtttccaagttcaccagaaaaaggcacttcactttcgtgttgttgtgaagctctggccgactagtgaaaagccccgatacttgcttttgagaacttctggtagagacttttgtggtctgagttcaaaatggtcaagggttttatttcgcagaagagaggagatttcttcatcattttctatgagtaatgctaataaagatgaggtagttcttggtacatgtacttgggtaatgttgggttattgattcccataactaattaatttaatttcttattctgtttttttttccaagatgagacaagtgatgaattctctgattgaaaatgtatcacatggtcttaaaggatggagccacttacatttgatgaaagtaattggtttgttggcatgcactttcatgctcattccttcagccaatgctgttgatgctctcaaaacatgtacttgcttattgaaggaatgcaggtaactcagtgcaatttcttgtgtttgtatttttctaatcatattaaatgtacattgttgtttctcatctagattagccggtagtagctaggattatactatctcgtatcctatgcttttctgtgttttttcttctatttttccagcaaaggcagccttattcgagctagttatagcattatcttccacttacataatgagattgattgttttggtgatatgtctcagtagaccttaattgttcctatgtgattttgtatctatccttcattcaaacactagagtttttgtgtcagggtagaacttgcaaagtgcattgcaaacccatcttgcgctgccaatgttgcttgtcttcaaacttgcaataatagacctgatgagactgaatgccaggctagttctgcaaccttttgatcaagtcttttatttttactagtttagggcaatgcttaattgttcatatatgcttcttcatcttgcagattaaatgtggtgacttgttcgaaaacagtgttgtagatgaatttaacgaatgtgctgtgtcacgaaagaagtgtgtgcctaggaaatctgatgttggagaatttcctgttcctgatcctgctgttctcgttaaaagctttgatattgcaaagtttgatggaaagtggttcatttcaagtggcttaaatcctacctttgatgcttttgattgccaattgcatgaattccacaaagaatccaacaaacttgttgggaatttaacttggagaataaaaactccagatggcggcttcttcactcgaacggctacacagagatttgttcaagatcctcagcagcctggaatactatacaaccatgacaatgagtaccttcactatcaagatgattggtaattcattcatatccacatggttcttgattagctgcaaaaacaattttgttcttcctttcttcgtcatgagttttggcaatgtgatattttcaggtacattctatcatccaagatagaaaatacaccagatgattacatatttgtatactaccgcggcaggaatgatgcttgggatggctatggtggtgcttttatatatacaaggagttcaacattaccagaaagtattgttcctgaacttgaaaaagcagcaaagagtgttggccgggacttcagcacatttatcaaaacagataatacttgtggacctgaacctcctctagtagagaggctagagaagaagatagaagaaggcgaaaggacaattgtagaggaagttgagcaaatagaaggggaagtaaagaaggtgggacgaaccgaaatgacattatttcaaaggttagctgagggtcttaaattgcttcaacaagatgaagagtatttcttaaaaaatctaagcaaagaagagactgaattattagaacagctgaaaatggaagcaaatgaagtagaaaatcttttcggacaagcactgcctataaggaagctcagatagttttggtttctttttaaaaaggatgacatttgtgaattgcaccaaattcttaccctccaattttttggagaatgtaagctaatactacatatttattacaagtttttaaagaatatacaagagtcaattcttttgtattttttgtgcttcttttccctactaacaaattacttacaacaagttgggattaaaccatataaatcattcaaatgttgcccaatttgagaactagcaagtatcatgaaggtagagtatttttcatgtatttaaagtatgattaatccaaaaatgtgactctttcatcaattactttgagaacaaactgaagagtagacgaactacactacacatagccttattcaaaaacaatatctagagttggggattaatcatacacacgcccagtgtgggcatccagggtcatctcaagtttttaaggggcttaggatgaaactaaaaaatagggtcttttatttttaaaaatttgactttaattgaaactttttatattataaaaattgaattttaactaaaattttaaaacaaaccacaatttaaatcctttaacttattcacacaataaaatttaggctatatacaaaattacgggaaaaaaaataaaaaatttacatgtatatggcattaaacttaatgctactaaatataatatttttttaacaaaataaactaaaaggaaattatagtaaatgactacaaattataatctaatgttagtaaatattctcatttcaaaatttatagcaaaatgatctcttttttaaattatttattatttatatttgtctttttgctacataaaaaaaa

SEQ ID NO: 243269 - DNA, 2247 bp, Cannabis indica
taacatagaaaaaaattagtataaaatttagtaatacgtgcctcacacgtaatttttgctagtatatatatatatgtgtgacccattgcatcaatattaacatacttgtggtagttaacaccttaaaatcttctttagcatttatcgagtaataatgatattagcctcaacactatctattataaataaagtccacaataaacataaacctagttttttaatgatgtttcacttgtgaaataactaaataacttaattagataaatttatatgtttatgatcaatatatacacgtatatagatatttttggttcgatataaacatacacgcatgtatgcttttcaacattgttctcataaaatattgctgattggacataaattacatacgtacgtacgtttacacaccatcaattgatcatgattaaacaaacacacaaatatatatatattagttaatttcgtgaatcttattttcgcatatgcttaattataagcagcttatttattgttaagattacagatactatatatatcataagtatatgtgtattaatcaataaggacgctggccaacatagtttcctgggggatcatagctgcagataatgaaggtacccctattattattgcaccgaaccttagcacacccaacacgagccgtgttacgccataccacctgagtgtagtgtccgcaaaccttaccagagcggcatgagtttgagttgtaattgtaatccgccttttcggcaacccacaacctcacggcgtctgtgccggaaagatcaccactgctccctgcaaggttctcgccatagcgtcctccagaatggacaagcctacagtccccgatgtgttcgtttgcataacggagtgcgtatgaggccaacgtattgtcccaaaccaggttccccacaccgaccgcggaccgagcagagttgtgggcgttcaggtagtcttgttgggagttttgggcgccaagggtttggagtagggctaaaccaaacaaacaagttaatagtagcgacgatgaaattcgtggtaaaaacgccattgtgttacttttttttggggtagctcttaagattaattaattaattattggtgaaagtgggggtatttatagtgatgaaattttgaattttatttgattagagcatagtgaaagtgaagtaataatatatagaacttaaatttttggtactaccacgtagctagcctttaatttttccaaaggtattatataaatttatccgttgacaaaatatattttatgattatcactaagaaaaagctaactttacgtacaagttattatgaataggaatttatgtatttggatcttatgttttataaaagttgcaaattaaattttatgttttgttaaataataattcagaccggacatgttatactagaaaataaaatagaaatgaatttactaattgataattatggccgagtcgtgaactatatcgctctttttaagacgttttgcagttctacctgaagagtgcatatgacagtctattatcaaccacgacattcccaagataacataacttctgcatacgatttcgttatatgttagaatatggaagcgtatggttaaggtagtaggccgggataggtgtgtatggtataatatgcatgatgagagatgtagcccatgcatcatgtatagaatttagtttccacatattattaatgtcacactctctaacatcctccttaaggatggtggctattttcttcctcaccaatcatgcatgactcaataaagtgactcttttggctcacagtggctatttttggctcactatccccgaattacaagcgcagctcttttagctcgtgtttttggactgattttttttaatttggatcgattactcgttagaattttagtttagctctgataccatgttagaatatagaggtgtatagttaaggtaataacgataggtgtgtatggtgtaaggtgcattttcatctcaaaactaattgacaatgcgagaaatatatagtcaatgcatcttatatatggtatttagtttccacatattattaatgtgggactctctaacatgttaagcaccgaatgaattcagtaattagtaactaattataactagttactacttacacaatgtaaactaattactaagtttctcacaattaattcatattaatgtatatattactaaaattcttgtttaagtttgttcatgttattaagttgtaaaa

SEQ ID NO: 243270 - DNA, 4360 bp, Cannabis indica
gatataagcgtgtaggagtatttaggtaataaattgtagctaaaagtgattttttcatgtaaaaattttcaaaaagaaattgaatattatttaaatatatacatcacagtggttgaatttttctatctaaatggttcattgtcttgctactcaaatgtgtcctagaaataaatttatttcttatagataataaatttaatttattggcacaataaccacaagctatttaaaaataacctaagcaaaagagaaaaaaaaagtagacatgtttaattactactgtcacctatttttcttcttacactccagtactgtacaaattaagcaaaagaaccacaatcaacgtctaaagaataaaaaaagtaacactacttgatctttaaagagaatcttctatttgacactctcatggttaatttctcaaaaaaaaaaaattaatgcatggtgagagaattcgagagagagagagaaagaaaatattttatcatctcaacttaattaaaacagtttgtacagagtatatgcctatatataggcagtgaaggagagcacagttagttggagtttaactaacttgagttagctccataactgaaaataacaacctctaactaaaaatataggctgaactaaagcttataactagctagttctaatagcctccgatgacaccaacttggagacaatattagagaaggaggaagatagtaatgctttattgaatatgtgtgctagattttgttgagatgaaacatggaggagcttgagtgatccttgctgaaatttttctcgaacaaagtggcaatctatctcgacatgtttagttcgttcatgatagacgggattctcactgatgtgcattgcagcagtgttgtcatagtagagtaaagcatgaacttttggagatatgccaaaatcttagagaagagcaaagatccatgttacctttgaagtaacatttttgtcattgcacgatattcagcttcagcagatgaacgagagataacttgttgttttttagatttctaagggacaagtgattggccgagaaaacacaataccctaaaatggagcgcctggtgtctcgacagctttcccagtcgacatcggaaaaatagaaacttgaacatttgaaagggataggctagtttctacatatgctcttatgaggtactgaccaggggtgctcttgaggtactgtaatagcctattagtggcttaaagatgaggtactcgaggtgcttgtaaaaactaacaaatggtttactgcataagagatattgggcctagtgatggtgaggtatatcaatttaccaattaggcttcaaatgcattagggtcagagaggagagtccctttatctttgttgagtttgagattgcattctattggtgaggatgttggtttggctcctaagtaccccgtgtctttcaatagctgaagcgtgaaagggcattgagaaattgagatgcccttgcttgtttgaccaatttcaaggccgagaaagaaatgaaaggagcctatgtcctttagtttgaacttgttgtcaagggaaattttgaggtgggagatggcatgatcattgttgctggctacaacaatgtcatccatgtatactaagatagcaagaaacatgttggttgttcgttttatgaataatgagttatcagacagtgattctgaaaaacaatctgcaaggagggtggattttagtttggaataccattgtctagaggcttgttttaggccataaatgctcttttttaagagaaaaatagagtttggaggagctttgtatcatggtggaaaattcatgtaaacctcttcatgaaggtcaccatgaagaaagacattattgatgtctaattggtgagcattccaattgttcattgcagcaagagctagaagaattttcaaagtatcaaactttgctacaggtgcaaaaattttgggagtagtcaattccttgtcgttgattgtagcctttggctactaaataggctttgaatcgatctacatccccgttttgtttgtatttgaccttgtatacccacttcaaccgatagctttttatccctagtggtagtttggtgatgatccatgttctatttttttttcagggcttgtgtctcggtgtccatggctttgagccaatgaatgaattgtgatgctttagcataactttgaggctcaatttttagagtatgtttctagaacaacatctttgaattgaggactaagttttatgtaagaaagaaatggctaaattggatgagcagtagaagttgtgtggcaaacataatcactaaggtgaaatggtttctttatgttgcgaccaacttttgtgtgttggggattgtttgagggaattggttgtgttaatagagatggtagaatagtattattggatggaagtactgctcgtggaaaataatattcaatatcagtatttggttcttgagtgaaaaagggaatatattttcgtggaaaataacatccctagaagtgtaaatagtatttggttctatatccagcaaggtgtaggctttcattccatagggatagctaataaatatggaggcacagctgcgaggggtgaacttatgtctttgggagacaaaagttgaaccataagccaagcagctaaatgtcctcaaatggtcataatttggacgtttattgtgtaaaatttcataggatgtgagtcctttgagcaatgcagataatgttctatttaacaagtatgttgcagtttgtatgataagatcaataaactagaggtaagttagattgaaagcatagagctctagctacatttaatatatgttgttgcttttttttcactactgaattttgttgtggtctttccacacatgagtgttagtgaattatgcctttagaggcaaagaatgaattcatatttaattctttagcattgctagaaaaaactgctttgatggtgatagaaaattgagtgcaaatcaagttgtaaaagttcatgagaaccgtgggagcttcagcttttattttgagcatttaagtctaagtaaatcttgatttgtcatctactatggtaaggaaatatttgtaaccttcaacagttataatgtggaagggaccctatatgtccgtgtgaaacaaataaaaaatattattggcaaagttattgtgagatatgaaagagagtcttttttgtttagccatgtgagaaatggaacaatgttattcagatttaacagaaaaagatgagtcaatctttttattacaagcattcaaaatatacatcaaagggtgaccaaggcgattatgccaatggtctacattattatttgaaaaaaaaatgaaagattgagttatattggccattgtagtagcatcttattgcagcaaataaagcttgccgtgcagcctagctatcctaatcacaagtctttgagaatgctcctgaataacacatatttcaagtttaaagaggactaaattagttgtgtcgtcaatgtatgcaataacagaaaaaagattgatcctgaagtttggaatataaagaacattatgcaaggttaatatgaaaaatcccaatagcatgtactggtatatgggtgttattaggtaaggtaacatgtttagaaaaaggattgtgagaaaaagattgaaagaaacttatgttacaatacatgtggtgtgtggcaccactattaaccatccaagatttagaaaaaataaatgaattgttactagccatgttggaagcagtcgcaggaacagcaggttctggacgaggagcaatttggctgagttgttgactgagtagagaaattagttgctgacattgagtgaacagatcaactgaaattggtgtgccagatgcatcatctgcattgaagctggccgaggcttgatgagcagtggctttcctttttcttgcttctttttgttaccatatcaggatggaatccatgaatgaagaagcatttttcaactagatggcctagttttccacagatggaacacgaaggtctggatttcttggttcgtggaggattggtggaagaagatggcctaatcgatgacgcaagtggtggaatatcagaattgccaagggttctttggcattctcttgaacaatcatggtgcaaactctcgagaggttaggaatcggctccttgggtaagatttgagcacgaatagaggcatatgattcgtttaaaccattcaaaaattgcagcacctggttttggttgtagtagtcaagaaagaccttcatggcaccacaagtgtaggtcatattgggttggaattcctttaattcatcccaaaaggattttagtttggtaaaatatgaggtgacggactgatcacc

SEQ ID NO: 243271 - DNA, 3479 bp, Cannabis indica
gcccatctcgaaagaactccatagttaagcgtgcttggcctggagtaattttaaggaagggtgacctcctgggaagttttcccaggatgtgtgtgagtgaggacaaagcacactgaaaacactcgtgttggtctgtagggtcagtcattagtccatgaagcagccagagtgatgaactcgtgtataagagccattagtccgtgggtgtaagggcccaatggaggcttgaagcggggacgttacacatacaatatacatacgctataaattatttattatttcaatcaaaataatcaatgatcctctatagacggtctacaatgagttggggctaaaattatcgttctaactctcattgtattttattcttaaaaaatacttagtttctttaatatggtatttcaataaactaatagaattactaaaatgagcactcaatcatttagtgcttttaaccaagctaaaaagaaaccatcatttcacttcttaaaacatatagaattcatagatgtccacatcactcccacttaattgcactaccgagttctcaatatgtaagtacgggctagtctgtaaggtaagttggtaacaaacaagataagaactcaaaaatacaattaattagcttaaagcttaatcatatcactcaagactcagattgaattgatttatgatcaactaagtaatattgacttaaaatagataataatggtaagtttatatatcaacaatcaatatcggtctactacaatgtagacctatacatttgatacaagtctactttaccagtacctttaaaaggacataccacttgccttagtgtaagtagaccacatcatcgattatcacataagtgtaaattcattacactgataaatccgaagactaaataattttaaggctgattaagattttttcccctaaactttgacatgtaccaaatcatgtcccctgaactttttggcagttagaaattcctcgtgaactattgaaattgttaaattaaggactattgtctaattttattaaattttactaatttagtgattttttatgtactaaatcatgctccccatattttgatatctactaaatcatgcccctcgaatataccaaatcatgccccttgaactttcatctatgttagacttttcttactaaaattagataaaaatccttaaatctaacaatcttaatagttcagggagatttttaaccaccttaaaagctcaaagagaatgatttggtacatatcaaagtttggagagtaaaaatcataattagcctaattttaagcatataatcgcaattatttttcaatatgatgacatcaatataactgtgaataactatatgtttagtatttaatataatttatatcttaaacaaataattatgaaaacaaaatatgtaagcaaggcgattgacaaggtcaacaaatgatttcttttctttattgataataaataagattacatagaaattagattttatttagatcataaaactaacaatgaagtctccactaatcgtacccttggtacatctttatcattttgctagcttgatctaggccttgttggtggtatagtcatacctttgatttggcattggtcttgtgagtcctttatctcttgccatttgagttattaccctctcttgacacttagacaacagtacctatggaggggagcatctcgtctatgaaggctcggcgagatgaaattttagcatgtggcatgtctagcgagatacaagcttggcaagaagatcacacttgggcgtgaagaatgcttagcctatcatgatggggggtggagaatatcacgcttggcttggagtgatgatgcttggcgagaaaatcacacttggcccagcatcatgatccttgggcgagaagatggctttgactgttatgtcaagcaagaagattcctaactagaagcatgctggcgtgaaataaaggctggtgtgaagataacgttcgttgagaacatgtgactgctccaacaatgatctcttgtcgtgacttgaggactttcatcgtctccatgctctggcaaacttctgtcaagtgatgatttcattggagacaacttagaaatttcacctagcaaaattttggaattaacaatgctcaagatatatgttttgaccaactaaagatgacctcaactaaaggcatgagggcatctcaaagagtcgtggcattctcatctagaagaaaaaagatgcactcaacatcaaagtcgtttgccatatgcaatgtaaataacgatgaggctgtgttctcaaaaagattcttactcattcaaatttcaaagttggccgtaacaaattcagagaaaatggactttgtgaacaatacaatgcccgcacagaggcataggtagatgcactcgatgatgtcttcctacaaaatggttggacagagatgtttctacaatggaagaaattcaaacatagaaacagaactctactcatcaaaaactctagttaagtgccctccaccgcaactgaaactgaataagagtacttcgaaagcgagaacttcaaggaaggggactttaagcgcatatacttatcctacccgactaccattgaatgaaccatcaaggtcctctcaacgcatttctacttgaagcaacgttaaattcaatttgggctttgtggctttccctgaagttctcgttgattgatgcttttcattctttcataaaagttctcgatcacccttgacaaataataacatgaaaagattgtatagtttctcttagtatcacgattgtataggtataaaatataaagggtaaatactattttggaccctgtgttttgcaaaagttaccaattggaccctgtgttttgttaaatgacaaaatggaccctgtattttctaaaatagtacaaataggaccctgaattgatttttaaagtttaattataattcgatctaaaagtgctatgacaaaactgtttacattttttgtatctgttcgtattaggaattatcttcaagttggttgtattaaaaaaaaagttgtctaaaattaagctcagggtcctatttttaccattttagaaaatatagggtccattttgtcatttaacaaaacacagggtccaatctgtaacttttgcaaaacacagggtccaaaatggtatttaccttaaaataaaaagaaaataacatcaaatgatatatacatcacttgccttcttagacctcccaagtgacaaataacaagaccaatcacattaatctaacattttggtttcccaacaatctcattatacaagggaaatttcattttttgcccttaataaaacccccaatatcaaaatttagaccctccactaatttgtacaaattaattccattgattacatgaactttccattttacccttttattaaaaaaaaaataaaaaaaaattagttaaaaactaaaaaaaacttaccctctcttccctctctct

SEQ ID NO: 243272 - DNA, 2288 bp, Cannabis indica
aaaaattattgattaaattttttgacctcgtttgatacgttgtattatattacattagtattatttaatacaatgttatgtttgatattgacttgtattaatatggtgtaaaattataatatattttcaataaactcgatcccaacatcgactacgtgtctagttcaagtttgagatttgggtccaattcaacatctgggtccaggttagagtttcatcactcgagtctaggtcttgtgtcgggtctcaggtcggggtccggtttggaacttgggatctaggtccttagatccaagtcgaagatcaggcttgatctcaaatctttataaatattataataaaatttaatacaaaccatttgttatatattaaataatataattattattgtattaaattttttcattatataactataaaattatttattatctaaaataatacgacgtttatacggcctattaaacgaaccctttatttttttaaatgacaattcggatcctcttccatagtgcattgcattttctcttttttcttcttttaaaacatgtaataatcttttaaaatgtcattatttattgtaaccaaaaaaatacaagcaaagaaagagttcttatctgcaagttatgattcaaaagagaatcatttcattaatatcaaaaagggaacacatatgatttgacttaagtacataaaaattcttacaattccattgcattaaaacaaagatttaaaatttgatcgtacaaaacacttgcaaaagcaaaatataagagagagaggtgaggtgaccatgatacaaatacatcaacaacatcatattcatatcattattaccatcttcagtagtcttcattttcctcttcatcgtcggcgccttcagcaccaacttcctcgtaatctttctcgagggctgcaagatcttcacgagcttccgagaactcaccctcttccataccttcaccgacgtaccaatgaacaaaggctctcttggcgtacatgagatcgaatttgtggtcaatacgggagaagacctcggccacggctgtgttgttgctgatcatgcaaactgcgcgttgcaccttggcaagatcaccgcccggtacaactgttggaggctggtagttgataccgcatttaaagccagttgggcacctgtgtataatcaaaccgaataagaatctcttcgaaaaaacaaagtaaagaaaactttgtgcaaagtatgaaaggacagtttcaattaccaatcaacgaattgtacagtcctcttagttttgatagtagcaacggcggcattaacatccttaggaacaacatctcccctgtacattagacagcaagccatgtattttccatgcctagggtcacacttggccatcatgcttgaaggctcaaacacggcatttgtgatctcgggtactgatagctgttcatggtatgctttctcagccgagataacaggggcatacgacgaaagcatgaaatgaattcgggggtatggcacaaggttagtctgaaactctgtgatgtcaacattaatggcaccatcaaacctcaaagaggttgtcaatgatgaaatgatttgtgatatcaaacggttcaaattcgtgtatgttggcctctcaatgtctagtgatctcctgcagatgtcatagatagcttcattgtccaacaacacagccacatctgtgtgttcaagaagggagtgagtagatagaacactgttgtaaggttccaccactgctgtcgaaacctttaatcaagagcaaaagacttgttcataaataacagaacaaatgtataagacaggcataaaaaaattctttgggggatctaaaacataggtgcctaagagggactcgaacatctgaccttgtggcagcaaaaccacatgcctaaccgtttaagctacccctctcgggtaataggcatgaaactcttattagtagcaaaatgtacctgtggtgaagggtagatagtgaatccaagcttagatttctttccataatctacagacaagcgttctaacaacaaagatcccaaaccagagccagtaccaccaccgacagcgctgaacaccaagaacccttgtagtccagtgcagttatcagccaatttccttactcggtcaaggcagagatctacaatttcctttccaactgcaatacataaccgaaaacaacaaaaatgcttaaccaaaaccatcacattgtgattataaaagttcccaaacaatgtgttatgattcaatttcggtgtttacctgtgtagtgtccccttgcgaaatt

SEQ ID NO: 243273 - DNA, 7764 bp, Cannabis indica
gtgaggggttcaaaaactttttttctgatgattgtgtgtgatcctgcagcgactatcagagggacattacatggacagttataggcgaccctcgatttatttccgaatgaaagggacggattgagcgataaaagaagaacatatgaagaataatctggcttctacgaatgaacctatgctagaggtttgatcaattacaggctcatgggaacaagttaccttctttgacgaagagaggtattttacttgaccaggttttagtaaaaaaaaaagaggttccctcacccgttacgtgatagcacacagagaagacggccgtggtggcacccgcccgcgttgatcttcgtctgaccacggatctctgacgggtattctccggactgagcttaggctttgttggcttctttacaaaaaaaagaaattcctaaataaggtgcctctgcgcagggtcatccatcgaatcataagagaagtagtccaactccgatgagttagtacccgcatctcacgcttaaggctaaagaggaatgagtgcgggtcaaaggtaggacaccgttcatggtttttttccataagataacctgcttctgcattatccttttacagactaagataggagactgagagtttcatttttgtccccaaatctgacgaatagcacggatcaacatctgtatccggcggggggcgactcttcttacgagacggcagatggagaaagagctttcaagttgagaaagaaggctcgagagacctgcacttcttttaaaagttggatgatacagttcctctttttccaaaaatggcgcaaaaaagaaaagacagagcatccgctctggaaacaggatccgccgaggctaagacgaagtagccaaggccagtgagtgatatcgatcgagttcggtaagtcaagaagggctcttggctttctggaagatagttgtttccaaggaccaaaagtcaaactatctcccgctctagcaagagagactcctttcctttttcatcgttagtcagccttgtactttacttttattcagtttgcctttctaatagaagaagagtctataattagatagaagtatatataattagccagattgtctgaagcatgaacagaatcacctttgttccgaaggcctagcgagttcattttttttttcaaaggcggtcagttcagaatacgtggtttccatctgcccacaggagttgggcggagacaaaatggtggggattgctatcttgccctttcactttctattctttgacgaataggtaggcgtacgaacgggacagtccgatcaatatcttcttagcctagttcggtttagtgccccctgtcggtttgaatttgatgtataaaatgattgaagccccggccgaaagactgctcaaatacctgtttcattggcatcaagggcctcagcctaagcctcgtaaccaagagcactcgcttcatcagcggaggttccggcctactaataaaggaaaaagcatggagtttcgcacaaggttcagacctcccagcccccagcttttcgaagagggcttttggtagagtaaagaacgggtaaatctctgaaccggacgatccacttgtccttctttgttgtctatcgacagaagaaattgtttatcgtgccagctatagtaacttctttcttctttcgttctcacttggatatcgatctagtagagtaagcaggagttttctagggttcatgtgatcgttgccacgggggcccccgctcgaaacactacaaggacgtctccttctggcgagaaagaatgtcttccaaaaagctgagtgcttgcaaacgcctcaggtgcatcacaacatgcaggcatgccactctcgaatgcgccgttatgtccctactagttcactgacggactatacttctcgagtgatttcaggcaagggtcacggtcaaagagtggtatactgacttgcttgttcggcgcgagtgcctaaaaaagacgttcttcccctctgaaaagagtgtctctggtacggtttttcaaagcggagattgctaagttggaaattgcgatcttgccccaaagcatcgcacacagcactctgattcattgcctaccatttagtaggggttgcccgaaaggagaccggaaggcgtacatcagagctagcttttagagccccgtggactttctcttatccgaaagcctctctttgttgaattgatctctcgactgttcctcgtgacgaaagatcctggcctacccctccgtcagtagccgttgtttcatcggcacccgggacttctgaatcggtccctgaaccaagagcccacacttcttttgttcatcgcactcgccttgctcattgcaaggggagatcctttcctgtctccatcggcttgtcccgtcggtaggaaacagattattcatgaatatcggttcagcaatgcctcgatggtgaatcaattccactctttctcgcaagctttccggtcttgaattcagggtagttagctgccggttccaagtgagcttcacgtaagcgtaggtgctatacgggcccactgtggcaaggtgatcaattattcccacctggaggcgcgcaccgcccccctaagactaggtagccagactttctccccagcctggatcggggatagattgctgattttgcgttgcctccaccgaggtgtcatggggtttaggaattcttacattatatctttccgaaaagtaactttacagccccttcacgtaatttgaaagtggctatagacttcttagcatgagtaacataaggtttctgacctatagtagcagtcatatcattaatagcaatggctccgatcctgatcgataaagaaggaaatccaccaataagccaataagttagggacattcctgcatgctctgggagcgtgtcagcgtgctgatcgacgtgaatcaaagttagaagctgccatccggaggtactaaatcaatcagcgagctcagtctgcagaagaggcaaagacatggggtcaagccgaatcaaggttgtctactcctcttcggacatagcgatttggtccaggagacctctccaagaactaaccataagagtttgccagtgagattcgagtcgacctatcttctgacttccttgttcgtcaatctaccgccccgtgacttttttgaaagcaagctccattcaaagcggtcgttagaccttgcgacacagccaggtttccatttattggattttttccacaggcttgcagacctcaccttggccagaggagttcctcacagccagtttccatcaagctcaatcaaaaacgaaccggccccgatcagtcccatggggctcaccccaaaaaggggttttctcaatgggccaccattttcatgacatgtatgccgcgctgatgaatgccttgggtcctttctatcggcattttcggactgaccgttctcaggcatatttggaagacaaagatagggcgatgcaaggccgggtcgatcccttgaatcctagtttgagattacccagtactcaccagaagtctgctgtggtacctctttcaagatagagcttgctactaagctagcccggacgaccaagttgatcaatatcaatggattcgcgcctctccgataagatcatcttcacgagctaaatccccaacttggaacgcactttttcaatccgggcgcagggcagctcgcacagacaggtacgttgatatcgattcatccctggatgtctctgaccttcatcgatgataaagtcagggatatccataaaaaaggctaggggcattcccggcatgctggtagccatacgagggcggtaaacaaacgctctcatcaaggacctccttctcaggatgttgaacaggcttgcagacctcctctcgtagtgtgtaatgactttgtctcatacgtcttctttgagaaagactcctcgacccggttgatccctccgaatccttccttcctggaacgtcttctggtaagaaccaaccaatgggggcagcgggcatttcgagagcatggaagtgcgttgtgagcacgggtgtgtttgcgcaggcaagtaagttcaaagaccgtttgcggcacgtttgacatgggtttcccgtctctcgtcataggaaaaagaaagactcattagcgccattcgaaatgaataaccttcgcttactctccaccggtggatcgctcaactgatgaacagcacgcatacttcacaccgatcgaatcttgattcccggttgatgagcaagaaagggaggaaattggaacaaaaaagagatcgcgataaagaaaaaaagaaagaaattctgaaacttcgggctcacttgaagccggagaggctgcggcattttccggcttctatgtgagcgccaactcgatctcggtatccattatctgatgaaaagaagactcagctgcccgaactgcctgaactgatgtacgagatcgttatccagtcaacgagaagaaagagatccattctgcctcgcctgtctctggttgctgccgcacgcactcggtagcttctaccctaccttcccttcttctggaaaccaattgtcattgggttgcttctcaacgcataaaatctaactattgggaacaatgggagagttctattctaacataaactcctcttgccaactaacttgatggaagtcccacacttatgtgatgacccactaggaatgaaaaactcccaccgccccgatccaaagcatgacgtgcatctaactgaagcagcttactcatcgctcaaagcaacaagccggtcaagagagtgggagggcttcttcccatacgtttcaaggtaggaaatcagttcgctattctcctgtatagggctagcttagtgatgacagcttcaatcgggagtcaactatctaatcaaatcaagtgagagggtggcattttgtacattcgggacagaaaacggatcgcactaaagagatccgtgggcaagaactcttcagcaacctatgaaggaagcatcagcagctccctgagagactctttccacgggtgaaagagcaatggataggtcaaaggcagatgtataaagagctttgtatctctgggttggtgctcctaagcgcaggaaggggaatcaatggctggctttggttgatgtacaactgacttctcaactacgttgatccttgcttgactcttctttcatttcgatacaacaaatagaaaaggccggggatcagcactcctcttcacactttctcacagacactctgttcttaaaaccaaaaggtgagtaatgggcctgttcaggtcaaatcatccatgaaccctaagtgacgaccctgacatcgcaggtttgatagccacatcttcagtcaaataaatgtgaattgttctggttctagctcggctgcttcccttcttccacggaagcttcccactggacgattgagtcacctacccaccctcacccagaagctgtatcagctgcttcttttggttctttctatcaagggagaccccggcatctgtaatggacactgggcagtctgattctacggcaattgctcttaagacaactcgcctcttctattctagtttttttataagaccttgtggattgtgagaaatccgtttctgtggaagccgcatgggctatctttctggttttccgccctttcacctttccaactccttaaaggctttgattcttaacctaatttcttcgattcgtctcccgcaggagagaagaggaacaagcactcgtgaagtgatccttttcaagaacatgcgtggaaacagccctatttcgagattttccatttccgcgcggttagacgcagggaaggctgactttccgcgtaggctggatgcgccaacatctcgactttggaaactcaatcctttttattaagtggttcacatggatttgacaatatggaggaggagggtctttgcttcactttgtctcaatctcctacctatcgccggacatcctgtcatctttccagcatcgaacatccatatttccagtcaattcttttggtagaacaagtgtttccaaccatttcaaaaggaaattccatgtgaataggccaagtcatctcataagagaaatcgagtcctcatgaatgtgatagttcaagttattctactgggaaatagtacccaaacccctctacttcttgaattgaccttattcctaccaatctatactcacctaggaagaatgaaagcaccaggttctatgttgcgtgttattgaataatggcaaataggccccctagggctagaaagaatctctatttgctggttgctggttcacctctctggatgataccaggttccattgaacaagaaaagaaagcagacggaaaatggttggcattccagtaggttggtccaaattcaagctccttggtatacgcatcatgggtaaccccccaaagcaaaggggagggacaaagaaaatccaaatgggaaagaatgggctgatgtgcttcatgtttcactgcgaagcttttgttcgtaaatccgaagataggaattggtgcgttcagttcaaaaagattagatattcgaatgctatagttattgggaaagaagtagtattcaccgcttataaggaagttggccgtaggctcttcaagacctatatctctcttgtttcgagaagagatgatcacaactcggcacgattggtattcaagtaagtagagctttgctgcgtactttcttttctggcataatggcttaaagctcagactttcactattgttgttggtggatctgtgtatcactcattcccaggttggtcttttctttcattaacgggctaagcctctttctggcgttttgatcggatgaggtaattccatcgtgcatggagtggatcggtccagtatcattagggtagacttgcacttatttatgtaggtttcgcctgatttgattcactgcgctctttctttttgtgtgctacccgttttctgtctcagggatgggattgggcgctttgtctcataggagtccgttcgatcctttgtctcagtaatggggaatggatggaatcggcttattctgactatggatctttactaattggatttgaattcctgtgcgcatcgcgatgatcgttctcttctcggcatagacaaacaaaacaagttctcatcttaagagtcagtacattcctcatctcgaatgggctagaccgggattatagggacctctattgaaggacagatcgggagggcacgtgtgcttatactagctaaggggaggttacagcagaacttctttcatatagtagatagtagtaggtagtctagcccataacgacccaatctatagctcaacagttaggttttttagccgttacttaggacctagggtcttgcaccactgatctcatgcgggtatataggatacgttcaaacagatgattccggtattacacctggggctgcaacacgaaaagcaagtttaggcgaaccaagcagcaagattccgtcaactctattagagcaaaaagatgaaatctttccaactgccccaatggaaagctttgaaatcgcagtgaattcacttcgaggaacccgaaggcctttcttcaacattttctcctcaacctgggaatttttctttctctgcgcttctttatctatcagtacggcatagtgtaccatctcaatgttgccaggaacgaaaagagcatcatggtaagctgtcttcaacgtgtcttttttttttttcaaaggcggtccccccggaccgatgactcgcttgttcagt

SEQ ID NO: 243274 - DNA, 4150 bp, Cannabis indica
ttgtagttagaattgaaaaaaaatttagtagttgaaatagtagttttttggtattaatttaacaccaaatttaagtttctccaatgacccttataaacgctttaaataataattaaaaaaaaaaaaatagaagattcgatttttccgcaagactctacaaatacattatcaccacttttttttttttcccagaaacggtgtatcgattttccctccaaaaccctacacacactattattcctctcaattatcatcgaaaaccctaatctgatcccttttctctcgttggatttccttcattgatgataatcttaggtatttataagtaaaaatttcataaatcgtgatgtaattatgaccataattgtaaaaaagaaagatcatgttttgatgtggatgtttacagtgatgagttcttctggagacaacaatggaagcaacctttcagtttcaggtctgaattctgaggatcagtagccatggcaagcagctaattaattacccatcaactttgtggaccgtcttcctttcccctgttctacagtaagatctctcggtactttttagtacatattattattatctccattatcgaagttgcgagaaagcgctttgtagtgttagtgatgaatgtctcagaccctgaaagtaatgcatgtagaatgttgattgatgagaatggcgttctttatattgaaatgaacactgctttttctgaggagaaaaatccaaaacaggtctccttcaaggaaaactcaagtggtggtggctatgtgaatctgagtccttcaaagagtgaaaagggagtggcatctactgtgatctctggtgttgcttctttgacaatgaaaaaagataagaaaggggtcaaacgtaaacgtaaagaaggtgaggatggagagtcagataaggccaggaagaggaaagtgcttaaggagattgttaaaagtgatggcttgataaaaagctctgaaattgattcgagcttgcatgagacatcagacttgaaattcttgatatatcctgatccagatttcaacaactttgacaaggacaggaaagctgagctttttgcaccagggcaggtatgggctgcttatgatttttataatgtcatgcctagattctatgctcatataaaaagtgtttcttctcccgggttcaatgtgcacataacttggttagagccggtgccaactgatgagaatgaattaaaatggcatgtggcggacttgccattttcttgtggtgagttcagttatggggattctgagaaaacaacaaatcgttttatgttctctcaccaagtttcttgggagaaaggtagtagtagaggtaccttcttgatacatccaagaaagggggagatctgggctctctttaaaaactgggatattaaatggagtggtgatccagctgctcatagtaagagtgaatatgaatatgttgaaattttgtctgattatgctgaaggtgttggaataaatgttgctttattgaacaaagttaataaatttgtgagtgttttctgtcgggttaagaagaaaacatttcgtgttccaccaggtgagttattgaggttttcccatatgattccatcctataaaatggaaagtaatgaaagaggggtaccagatggatctttcgaacttgatccggctgctttgcctgtaattaaaaccacggcaaggggtgtcaatgacatgcaaaggagtcgtccttcagagactcagcaggacagttctgccattcctttagctccaaggccagaaaacttgcaacttccagattctgagttctacaactttgatgctgataaatccaaaaataaagtttcggcctggtcagatatgggcattgtatagtgatgaggatagcatgccaaaatactatgctaagatcaggaaaattgatcttttcccatctttcaaactgcatatttcatggcttgtttctgatgagtacgtgcctctttcttgcggtagatttacgattagaaagggtgagggtccggcctatgattgtttaaactatttttctcatcaagtaaacgcagagcttactggtagaagaaatgaatatggaatttttcctaggaaaggtgaaatttgggcattgtacaggaactggaagcccaacagaaacagtagtgacttggaaaactgtgaatatgacatagtggaagttctttcagctactgttttactaataaaggtttcagttttggaacgcgtcaatggttttatctcggtatataaggctcgactgcagggtggatcaaccttaatatggagaattccccaagttgatttttttaagttttctcaccagattcctgcattccgtcttaccgaagagagaggaggcaagcttagaggcttctttgaacttgattctggtgccttaccagctggttattttggttgaacctagtttcataccctgcctataaaatttataaagaaatctttgcagtatgcaacttctcattttgatccatggtttagctgtgttacagaatcaggtgaggctggatctttgccctgcttttgttacagtgaaaggttcatgtactgatccttgatattttgtactttattgtttgtcagcatggaaatgtatgaagtgtattattaacatacccttttgtgaatgctctcgttccttttgatttcgcctccaacagttcttagtggattaggaaatgttttaaatctcttggatcccttttgctggtttcatgagttcttaggccttctgaatggtcttgtgatccaaaagacattctccaacaatttctgattgtggcctattgagaactatgaaagtttattttaacgctgactcattcatttgagtgtggctggggtttatgctacacctcaatgatagaataaatagaggggagagagttcatttgtgggtgtggagaattattttgtattgagcagtagctcttgggagagtactggtctcttcaataccccagcagttgttctattgttcacttcttttatcatctaaatgaggaaattcttatcaattgaattgactgaccatgctatttattcacttattaagtatatatgtaagtactctagtaaaactagtagttaaccatgctttttatttgtgcttttgtcaagttaattcagatacaagttacatttatagttttgtgtataattcatattgtgctttatgtgtgtttattatattattattatgctcgtttgcagacatgattgctctcagattttacaacttgatctcacctttttattcatcaggtgtgggattacatcttcctaactgtatgtgaatttttataaaacaaaatttactagtatgaataactatattatgtggacaaatctctcacttgcaccatgatttagtgtcaaattttggtcactgtttgcttgaatgtcaaatgaagtaaagaccctaaactcaaaagttgtgatatagacttttttcttgagtacagatatattagacagttgacactattattattaagtctaccaatactttttctctttctcttttatatctctcctctcattatgttgaatgtgtatttatgtatatttattgttgttgctacctgctgttattattattagaatatccttatgtgacatgctgttctttgataattaagatatgaaatcattgttattaaattcttttaaaaatgattctgaatttaatatttggaatgaaagtaacatcactgccacttctttccctttgttttgtcagaagtatcacagaagcactcatttctttattctatcatttaaaatactttaccaaaatttaattttttcttttattttaccttcacaatttatattaccataaatcagtttctttatattatttttaaaagggaaatttgatttttatgcttacatttgttaaaaaaaattttctaaacaaataataactaatatttgtaagatatgataatttttatgatatctttaaaatactccatttacatcaccccatttacaccatcggaccacccacttgggccacccatcggaccatccatcgggccaccccatcggatcacccattggacccattggaccacccatcggaccaaatctgctaccaattttttttttttttttta

SEQ ID NO: 243275 - DNA, 6294 bp, Cannabis indica
taattaaaaaataaaacaaaaaacgtctaattaattacttatatcctaatatataatttaactgagttttagcattaaataaaaatcataagaacaaaaaaaaaaattaattactttaggtaatactattctcccaagactacccacgtcgctttgtttcaacactttttgaagtaaaaacctcaagttcttctccggtttccaaccctagtaacaataaattcaaaaacaaaattatataaattcaccaaaaattttaaacaataaataaaaaataataataatatttacctgacgcctttccgttggagtaccacttcgagtttgttggtgcaaaggcggtggtgtttcggcgggaatcaacggctgcggcggcggcggcggcgaagaagcaccggcggctgcctgagccggccaataaacccagttgttcacttgatgagtgcaattattactattattattatcgttattaaggcttgcatgttgattattactttgatcaacttgattctgattctgattgtgttgatgatgatggtggtgatggtgatgatggtgtctttggtgatgagataagagccgtctttgtctagccattctcttcttcctcgcttctttagtcgccgaagacccagacctaatcaccaccgtctgatcattattactcatgatctgatcttatgagatgaagaagaagaagaatagtattgataagggtattgactcccgtaccctgaaaaagcttgttgaaacggcgtcgtttggagattattgttctcaggaaccgattggtggtaattagaaaattgtgaagaaggccaagtttgagaagagtcgagcatagtgttgtattcaggggtaatttggtaatttgatggagtggtaacggtgggggtattagtattacccgacccgttaataaacggatctgtacccgtgaacccgatagggaacgaaggaggaggaggaggtggtggtggtggtggaataacaaggggatcgtagttccaattattttgaaacgacgacgtttctttgactaaactacgtcgtttttgaagatgattagtcttaacccattcaagaacaagtttcaataactgtttcattgcttcttttccaccacccaatcgcttagccgcggcttcgattgttgattttttgatcttcacacttctcaaatcttcagccgaaactgtctctttgttattcttcagccaatccaagaacaccatagccatatcgtctggtactgaggaagacgacgtcgtattagctaaatcttctttattactattattattattattttccaaatcaacaacctcttgatcatcatcattatcaatcatcatcatcatcatctcatgatcatgatcattattattagtactcaccaaaacgctgtcgttttcattattattattctccaaaacggtgtcgttttggaaaatagaagaagggtcaaaaaactcgttactctccaacaaatccatgtacccaaaagtctccatcatatcaacacagtcgagtaccccactaccgccggccccggcgacccctggctggtcagagaactccatcgatgccgtggaagaaagcgtcgccggctgtttgtacccgccgcctccgccgtggtgatgatcttcttcgtctgcgtctgatttcagaacggcccaagaagaagctgatgacgtggaagaagaggaagaggagcaggtgatgggtttgagagtggccgccggagtagtaatagtagtcgaggatgaggatgaagatgacgaagatgatgacgacatgcatgaaaaatcaggaagagatggaaaatcagtgtagaatatagaatcttcattaacatcgagtagatcttgatgttcatgatcttggtgatgatgatgatgaagccaaatctcttgttcccttggatccatatcttcaaaccctagccctattgaagtagtagttgtagtagtagtagtttcttcttgtgcatgtagtagtagatctcgataagcttgatcttggtgatgagtatgaatatcgacagtagtagtgttcttcataaacgaagaaaaaaggtttttcagagagaagaaaataagaaagaaaagtatgagttgtacggataagtattgaaaaaatgaaacaataatataagcttctcttgtatcagattaaggaagcagatagatagaaatatagagatataaagagagagagacagagagagtgaatatgggccctcaaaacagagtgagaagcaacataaagcatctgtggtttgtttatttgatttttattagaaaagttattaggtctaatttatgttaataaaatcggtttgttagaagagtaatttttttttttgagggaaaatactatattattattaaacaaataaggattcgtttacaataatagagtaaataggtggaggaataatctccaaccaagaacaagtctcatctacccctaatgcaaatttagcaagtccatgtgcagctgagttagcaacacgattgacatgagaaacctttacatttgggaaaaaagataaaagactaagaacatcaataattaaatctgaaaactcagaatttgaattgaagggagctttcaaagcattgacaaccataagtgcatccatctcaatgtgatcaataggtaagtgatgttgaagagcccaattgagaccatagaaaagtgctttggcctccatctcatgtgatttaaggttgccgagtataggcatggagagggcagctttaacatggccattcacatctcgaagtattgcaccatacctgttgtgtaagtagaaacatcaacagccgcatctgtgttgagcttgaaggcacctgctgctggtggacgccaaataactggagcagatggccgacgaggggactggtttgagtgtgcagatggtgctggtgcagtgactggcatggcaggagttgatcgctgttgggctgctctaaagttttggagaaagaccgaggcaaaggcagcaagattttgagcacgtcttgctgttttcccatggattacattgtttctttcagtccaaatggcccacattgtacataagagttgttccatttcagtttcgttgtagatggaggaaaggtgtgtcacataatcaccatttttcatagaggcagcaactgtccaattaaaacttaaacccaaagatcgccaaacagccttggcatacttacagctgaatagagcatgtcccgttgactcccatgcttgttgacaaatggagcaagtggaatctgtgatgatcttccttcgaacaagtgaagtggcaacaggtaaagcatcatgtatggcgcgccaagcaaagatcttcactttttgagggacttggagagaccaaaatagtttccaccaagccacagctgaagtagaagtggaactaagatcttcttcttccaaggaagttgctaggtgataagcactttgaaccgtaaagttccctgaagaatgagggtgccatatcaatttatctctagaaggaaaataacttagtggaagagtgagaatcttatcaacatcaatagggctaaagtattgctgcagcaaggtaacattccattgtctatcatcagtgataaggttagccacaacaccattggaaggacccgagtatgtcaaaggtagaaaggatgtatgcccaggaatccacgggtcaaaaccacttcgaatcagtcttccctcaccaattttccatcgtaagccttttatcaacaactcacgtccccaacgaattccttgccatgttaaggaaggggagtggcccatacttgcatccaagaaagagttgttaggaaaatacttgctcttgagaagtgtcgcaaggagagaggttggattttcaactagccgccaagcttgtttggctagaagagcttgattaaattggatgaaagagcgaaaccccattccaccttctcctttttttttacaacgcaaattccaagaacgccagtgaatcttagaaccattttcattcatgccccaccagaagtttgacatcatactctcaagttggttgcaaaagtatactggcaagcggaaacaactcatagcataggttgggatcgattggactaccgctttaaggaggacttcccgaccccctgctgagaagagtttttcattccaagattgcatgagtttccaaatcctctccttaatgttactaaaaagctccttcttatccctgcctgaataagatggtaggcctaggtatcgttcatggcactcgctaattggcatggaaaggtgccgatgaaagaacacttgggcagccaaggtggtatttggggagaaggacatcacatatttgtctcgatttattaattggcctgacgctcgatgatagatatccaaaacccttttgatggatagacaggagctctcatcagcttgacaaaaaaagagactatcatcagcgaagagtaagtgggagatcatgggagcctgcctagtgagtttaaaaccatgcaagttccccaaatcctgctcacgttgcagcaatcttgacaagccttcagcacatatcaagaaaagatagggggataaaggacaaccttgtcgcaaccctcttgttggagtcaaagagcccttaacttcaccattaacaaggaaagagaatcaattggtagtgaggcaactcattataagcgagacccaaccatcagcaaatcccattttcttcattccttcttcaacgaatttccattcgaccctatcaaaagctttactcatgtcaagcttgagagaagcgatgccatgtttaccagcagtcttgtttttaattgcgtgtaccagttcaaaagccaccagaatgttgtcagttatcaatcgattagccaagaatgcactctgagtttcggaaataaccaaaggaaggacttctttgaaccgggctacaatcattttggttacaagcttggagatgacgttgcaaagactaataggccgaaaatccttcatatgatgaggctttttaatctttgggatgagtgtgattaaggtgtgattgaggctagaagggtcagccccattgttgagtatgtcaagtacgacatttgatacaagattaccaacaattgaccaatgttgttgataaaacatggcagacattccgtcaattcctgggcttttgtccaaactcattgtctttagggcactatcaacttcagctggtgtgaatggagcaaggagagtatcattgtgagcagtagttatcaagtgggaatacaatcaagtgtatgagtaagagcacactcatcaaggttaccaactgtgaaaagatcagcataaaaatcttgaacaacagctgatatatcattaatagatgaagccttgccacccgaattgttgtagagaaacttgatgtggttattgttccatcgggcactagcttttgtatgaaaatacttggtatttttatctccacaagcaagccaatcaactcgagatcgctgctgccaatacacttcttcttgttccaataactcatcaaggattaattccgcttgttttagatcatcaaagtggctgctgctatgacaggaagaattattgagctgctcgacttgtttttgacactttttaatgtttttcttcatcttcccatatttgcgatcatgccaaagttgaagttgtgcagcacatgtgttaatattagaaacaacagcagcaatagggtcggtggaatcattgtgcaaccaattttcagcaataatgtctttgctgtcagaattggacagccatatcttctcaaagcgagaccgatttttccttcgtttagtggtgggttgtgtagcaatcaggttgatggtggcactaatggcacgatggtccgactgaaaatagtctagatgatgtacttgagggctctcgaagaaggattcccaatgattgttgatgaagacccaatcaattcgctctttgatagtatttctagcagctctatttttagcccaagtaaacgggtcaccttcaatttgagtttcatgaagacatcctttgtcaatggcttttcggaaagcatccatttgggattcacaacgaagagctccacccgatttattactatttgagagaatttcattaaaatcgccaagaactaaccaaggaagatgaggagcaacatctgcaagtctttccaagagagtccaagatgcttgtctattattgacttcgggtgcaccgtaaaagcatgttaagtgaaccgtggggctgttttctatcatcatgtaacagtcaaaaaaa

SEQ ID NO: 243276 - DNA, 4285 bp, Cannabis indica
agagagagagagaaggaatgtaaatagatgagatagaaagattaatctcatgtgtattgatgttggtattctcttacaatatatagtgcttatacaatcaagaaacagttacaaactaataactaagtgtactaagatagtggcagtacattaactgtcataacacaaaaccaacacacttaaggtccctaatacaccccctcaaatatacaatgtgagctaggcacaattgtaagtttcgacctgaaagttgtaaatcgaggattggagacagctttggtgaacccattagcaacttgatttagtgcaggaacattaacttgaatcaagtactgcaaaattttctctcgaacaaagtaaagattgagctcaatttatttcgtatgagcgtgtaacaatagattggtaatgagaactacagtgctaaggttatcacaccagataacagggggcaaggaaaattagtttgagctcagtgaacaaagagtatagccaggtgatctcaaataaaacttgagatagactccgatactcagctttagtactcgatcatgagactgtgtattgtttcttagactgccaagctacgaaattttgaacaaaatagatggtgaagcctgatgtactttgacgatcatcaacatttgtggctcaatctgcatcgtaaaaaaatactacatcataaggctctggtttttgaaggagtaagtcatagtcaatggaacctactaagtacttgagtatccttttaacaatattccagtgagtttgcaatgggtcagccatgaattggcaaactttgttgacactgaaagagattttaggtctagtaatgactaaatattgaagttcaccattaatggatctatattattagggataaagggtctccttcataggcagataatcgaagaccattagtcattgttgttggagatggtttggcatcctgcattttggccagacaagtgtagtccttgttcatattgtgttgcctttatcccaagaaagtaggaaagagaacctacatattttaatgaaaactaagtattcaaggcttgaattaagtgagatactagcttggaacactccttgtgatgattatatcatccgcatataccaaagttatggtaataaaagtggatgtatgctagacaaacaaactgtgatctgatttggaggagatgaaaccaagggaaagaagagatgtatgaagtttctcaaactaagctcaaggggtttgtttgagtacataaagggccttgtttagtttgcaaactaaatgaggagtctgtggatcttctaacctggtggttgaatgataaacacatcttcttgaatatcactattcaagaatgcattattgacttaattgcttgatcaaccagcctctggacaatgctagagatagtacaactcgaatggtaatagacttgactattggactaaaggtttcagtaaagtcaaaacatggttgttgatgaaactccttggcaatgaatcgagctttgtacttgttaatggtaccatatgggttttctttaatcttgtatacccatttgtagcctattgtagttctaccttggggcagaggaacaagcttttgaaggccaaaacttcaatatcaatagtctaggaccaaactgcttcttgcaatgcttgtttgaatgaggttggaaccctagaaacaagaaatgatcttggtttatgtatgccaaacttggacttggtctgcatgatgtgagtattgagtatgggagccactgaagtaggagctttctaagaagttgagttgggaacagtagtatgatcaacttgtaaaatagaattagagatagttttgggaataacagacgactgagagaccatggattcaacagaagtggacactagacatctgtagactacagactgtggatgtatagtaggagatgcagtgtgagggatctgtattggacacaactctagatgtagacacaggagtaacatgagatgtttgacatgtgggagggggtttgggaccataagaggtagacgacatgtcagtagataatagaggaatcacgtgttgagaatgagaggaaccaaatctggggaataagggacacacctggagagaccgtgcaactttaggaatctgacctaagagtaaagtgtataaagcggtacggaaagggtgaggcacctatgttttggaagcatacgtaaaggtagtttcatcaaatattatatctctagagatgtacaacctacccaagggatctacgcacttttaattcttatgattaaggctatatccatgaaatgtacatgttgtaaacctaaattggagcttatgcttgctgtagggcctgatgtttggaaaactagggcaaccaaaggtcttgaaagttctgtaatctggtttgatattgaaaataagttcaatgggggattttttattgagaataaaggttggtagtctattatgaagatatatagcagctctagaggctcatcttaaaattttaaaagcatagaggagtgagctggtaaagtaagaccatgttcataatatgcctatgtattcttttagcaagcagtccttctattggaaatcattacaaaggtgttcaagtgatcaaaccgggtggaatttgttgaggtttgacttcttgaacttggtttactgctggttttgacagttagcattctcctctaactaacttaactgtcttgacagttaagttagttatatgctaaccatgcacctataaatagaaagcctctcacttgtgtatagaagcagacataattcagagggtttagagagaaattgagagagtgtttgagagtggtaaatggcctctcttttgctagtttgagagagtcactagtaagactccattgtaacaagggtttcattcctgttctgtaacctctgttcagatcaataaaagctcatcaccacagccaagttaaggctgctttctctcgtggattaagctcgtgatcaccttgattgtgtagcccaaccacgtaagctcttgttgttgttttatgcttccattaagttgctgatatttctggtttatgttttagttttatgttgctggttttatgtccaaatttgtgttcttgatcattgtgcattgttcttggtgttgtgtttgttcttgtttggagtttaagactccaaaaaaatagtaacaaattattaactaactgtaactaacatagtgacagcacactaactgtcataacagaaaaccaccacacttaaggtccctaataatattggaccaatttgaagaggttaagaaagctaaataagtgtctttgtatatataaaatatgttaaaaaatggtatctcaattgcataaaactaaatgatgctcatagactatactaattaaagtatagaaactgataaatagcttccaaagaacagttaattattcaactacaacatttataagaggttatggcggtattacttactggtgtgcccttcacaactgtggacacatgaccccttgtttcccctttgccatcgggaaccggtgcaagctttgagattccaaagtcagaaacttttgcagtaaattttgaatccaacaatatgttgtttgattttatgtcacggtggattataggtggatctgcttcagtatgaagataaagaattccctttgcagagtctaatgcaatttgcattctcctagcaaaagtaagagagcttcgaaacctagctattgtgacaaaataagcataacagaaagtataataaggtataaacataatttgaatagattaattggggtcatctgttacatattcaccattgaagatttcaatcaattgacaacaatcaagtgtactaatggaggcgcacaagtggagagattttagggatagggtgatagtaaaaatggtattatatatatgtaaggttaaggttggatatttacagcaaaactggtaatatttgtagttgttacacataagagtgttgataaaataatcaattcaatctaatctgtaaaatacaaatatttacatttgtgcagattggattgaattgaaaaatctaaaatccgtacttctacagattagattttgattaacatgtaaaagtaaccgatctaatccaatccacacattgaagattcattacatgttatcattttttttttgagtcaaagtgaaaaagttttatttaaacactttcaaccattacaatagacttaaaatcagcagagacattatgctgattaaaaacacaatctgacgaaaaacaagact

SEQ ID NO: 243277 - DNA, 5203 bp, Cannabis indica
ttaaacgatttgggaataagacgtctggattatttggctcatctttctaattctaattttgcaggtcgtgtctccaattgttaaaccttctgctcattgatgaacatcaagaaaaaaaacagaaagaaaagaataagaataggaaagaaagagaaagaatgaagacatcaaagatatctcaatccattcaatgtaattgtagagtttataaacatttggacattaaccataacagaatctaactaactctactaacatacatgctgactaggataagtagagctacccgttaactaactctaactaactattagctctaacacctcctctcaaactcataattgaaacattctcaattttaagtttgttccataatgtagagaatatttggcacgagattgccttgattaaaccatctgctaatttgtcataggctggaacatgtttgatttggaccattttgttgagaacattctctcgatcaaagtacaagtcaagttcgatatgctttgttcgagcatgtaaaacaagattctgagttagcaagacagtactcaagttgtcacaccaaatcgtaggtggctgaggcagctgaattctaagttttgagaacaaataatgcagccatgataactcagcagtacattagccacacttttgtactcaacttcagtgcttgagggagatacaattgacaacttcttgctcttccaagttattaagtttgatccaaaaaagataggaaaaccaatagtggagcgcctatcatttggatctgaggcccaatcagcatcacataaggccacaagatcataagaattaggtatttttagatgaagaccgaagtccaaggtgccacttatgtatctgagaattcatttgacagccatccaatgtgtggttaaaggtttttgcatgaattagcaaaccttgttcacactgaatgaaagttcaggccttgtgattgtgaggtaccgcaatgctcatactacagatcgataaagttggacatctaccactagtttcccctgttgagatcacaaaggaatgctactgatcatgggagtaggagaaggttttgcattagtcatttatgccttggcaagtaagtcccaagcatattttgctctgaaaaccctattcagtgtgctaaacttcaatacccaaaaaatagtgaagaggacccagatctttgagagagagaaatgagtattgagagttgagattagtttaacaacaacattatggtcattacctgtgatgataatgtcatctacacacacaattaccaaagtgacagtacgattaataaatagagagtgatctgagttggatgaaacataaccaagagataaaaggttattttggagcttgtcaaaccatgctctatgagcttcttttgaggccataaagagcttttatgaagcttgtaaactagatctattttaccaggaattcgcatctaatgaccttccttcttggtggaagttttaccagggtataaattctatttcttgtgagggctaaaacttcatcagtcgttgcattattccattgtatttgttgcaatgcttcttaaagtgttatgggaacgctggagactaagtaggtttttggcttgtgaatacttgactttgacctagttttcatgatgtgtttattgtgttgttcaggagcattttgacacccttcaatgttaggaagagatgctggtattgagtgattagtttcaggtggaattgagggagatgacaggtttgttgcaagattagcttgcagtgaagtgctatagggaactgaatgtaactctggtggaacatctgttgtgagatcatgtaaaataggctactcattaggcataggttgactatcaagcacatgatgctcatgattcatatcaacacattgtcttgaagattcacctacatccaacacagatggttgacttaggtgccaaatgttagtcataagatcaaaagtattgttgtttggctatacatatggttcaataatatcagttaaaacatgttgttcaatctctgaattgttgtttagcaaatctgtcatggtgtaagatggtttaaagtgaggacaaacatggataatacctgacacataggaagtctttgtttgctgagaggaattaagacttgtttgagcactagactcttcataaggaaaagagaattcttcaaaaatgtagagtcttcatttttgccaaggcatttgtagcctttgcgattgaggttataacctaaaaaagtgcatggagcagacctaaattcgagtttatatttattgtatggccttatattgggaaaacacttgcatccaaatgttttaaaggatgtgtaatctgtttgaatctttaacatggtttcaaagggagatttattgcctaacactggtgtaggcaacttgttgtgaatatacacaacaattctgaaagcttcatcccaaaacttgaggggtagagaagcttgagctaacaaagcaggaccactctcaactatttgtctatgtttgcgttcagctagaccattttgttggtgtgtgtgttggggcaaggatgtctatggtgtattccattctctacaaaggtagttagaaaatgatctaaattcatccccaattagtctataaggcttttaggggtttaccaattcggaatctgcttcagatttaaagtttagaaaagtttgaatgcatctgatttggtttttagcagatataaccatgtaaacctagagaacacatcatatttgtagccattgaaagaggttgtgtgagagggccccataaatcagaaaccactagctgcaatggttttgaaataacagtatttgaagcttttagaaagggaaatttgtaaatttttccaagacaacaagtagaacatattgaaaactggaaaattttattgcttaaaggaatattagaagattgcaagactttttgttcaattttcttagatgaatgtcctaacatattatgccatagagtgaaatcatattcaacatcagaattacacttgatacaactagatatagtggctctagagttattgagagtgacaacaaaggtgttttttgatgcagaggtgtagctattactaggcttgagttgcttgtgtgacacagattgcttagtttttaaggatccaatgctgaattgagatggttttaaataatacaggccattctcttgcctccctatcagcaaagtagagtgagtcaacttgtccttaacataacacatgtcattatagaattcaaaaaatacattattgtcataagcaaattttaagacactaattaattttttggttatttcaggatcatgcaataagttgttaaaggcaagaggttgagaagacaatttggaaaagagaaaggattgacaaatatattttagagacaaaactgggctatcaccaacatacatatgatcttagccatcatagtcataatagcttgccagattctgagtttgtggagtacaatggtttgtggctcttgaatctgggtaccaactagcatcaacagtgttgttggatgtaacaagattagcttatgtctgtgcttgagtagaaggttgagtgctgcaactagttgagcctagagagggtcctaagaaagcctcgtcaaaatgatagagtaacaatattgaacaatatgtccaaatcgtaagaaaagttgacattgaggcctattattaggatttataccaaatctaccacctctattcatattgaaattacctctgcctccaaagttctgattactgttcaaagctgagtcattagcacgcatgtaatttctattgctgtaatgacctttgtctagtatttgtgaattgcagatttcctcttcttgcatattggtgctgcttgaatcttctgaaggccggccagattagcttctacaactggatcaagatctgaagtggtaaaattagcattgagattgatttctttgttcgacttcttgattcttgattcaaaggccaagagcagagcttctattttcccaattgtataattctcgatcctggtgtttgaggagatgacaaatttatcgtacttactaggaaatcctttaaaaattatagcaacatgatctcaattgctcagtacttcgccaaactgaagctagaagatcgactgtttgtttgacttttagtaaataatcatttaagctcaatgaacatttcttcagattttgcaacttggtgcaaaattcaaagatcttggaggaaacttttaaagtgaagtatttttccaaggcattccagctttggtgtgaagtgttgcatccaaccattctggttagcaagctttgtgtcatggatgacagcaaccacaaacccatgagctaattttgcacttcccattcaacataggcaggattgactctattagttgcagcatctccttcattctagaactcacctggaggggattctttgatgcatctcattaattgatttcccttaattattgccaagatttgttattttcacaacaagaagttgtgaatatcgtttaaacggatcgagatattgtgattgaagaacactagatctcgattcacacgttctttattgagagcttgtgatccattggcctctatgctagaagcattgtttctcacggtcgccatgttagctacaagggagcgaaaaatactctgataccatgttaaaccttctagccattgatgaacatcaagaacaaaatagaaaggaaagaagaagaggaggtaaagaaagagaaagaatgaagacaacaaaaatatctcaatccattcaatatataacagtagagtttatatacattagacactattaactctactaacatacatgctgactaggacaactcgagttaacgtttaactaactctaaccaatatcatcagctcaaaaaccaatggattggagattgaattacatgctattattttggcttattgctatcaataaaattacttagtttattaaaaaaataataaaagaaaaaaactttattgcaatatagtattttaaacattaatataatttttttgtaaaaatatttatcattaatcacaatatattacatcatttaagtgatacttaacacaacaacactaatacatgcatgttttcaaattttttttacctacattcatcaattcctaatttaattaattaataataataa

SEQ ID NO: 243278 - DNA, 4783 bp, Cannabis indica
gagaagtaatgtgcaggtcccgagtgatcaaaagctaccatcgctttatcttttagacagtatcgtaaagaatattgggagggactacataaaaaactttgctgcgagattacctgaggttagttttcttctctgcttgtactatttgatttttcatagcatttaagttagttattcattatataaataaataattctgaataaataatatgaaaacaaatttcttattgacactgagcaatgtaagtcataattttactaattgtgattaagaataggtatgcacagctttgttttgtgtttattactcatccattaattccttccctaccaaataaacaaccttccctcttatgtatttctggctaacccatctgctgctgctatagctccacttttactgtaatcactctagttttcattttccccttttcaacgcgtttctaggtattcatcaaggcatacaggcaggttgatcctcctgtacatacgagcatgcgacatctttttggaacatggaaaggagttttcccttctcacacacttcagatgattgagaaagaacttggttttgttcctgcagcaaatggttcgtctacagctaatacaacatctaggcctgattcacaatcaaatcgtccactgcataatagtattcatgtcaatcccaaatacttggaagggcagcgtcttcagcagcttaatagggtaagtagttttgatgtcattggtgttttactcatggaattatgatattgaggttctatacttctatctaatgtgtatctctttgttgcattatcatattttccatcactttttaatttactggtgtcgttgtgaagttactatatcttattagcatgctgtgaataatatgaatgcttagaacagcccaatatgatgtgcttttcagacctcataacttttagttttagtatgagtgcaacttacaacttatcaaaaataaacttcctgttttcttgcagatagaaattttagttttgatgatctgctaattttcttattactaccttgtacgtatgttgattctgtaataagataaacaatcatttaagagacatacaacatataaattttcagaaatatgacctttataatcttgctaataaggaaaagatagcagttttgtggctcattggatgcttatttaggaccttgcataatcaatattgtgcttatccaccgacaatcaaattgattattgagaatgatgggatataggagcgagcaataacataaaatgtatatatatgtataaactaataatggagttaattttgaaggagattttcagtttgtttttttgtttaatgaaggcaaaggactggctactgatgtatctgggtctattgcaaacacagttgaggatgtagagacatggacagagcaacagtatcaatactggacgagcatgggctgatccgtcttctaaattgaacgtatgtcatgtgaagcatttgatccagtttagtttatttagttggtgctattgagatttgatgtaaacttgcaaaatatgcagcgttcacaaagaggtacatccagtgagggtattcatgagaagagcactgctggagagtatgcagactatgactacagctctgattttccaaggaattcaggcttcgggattggaagaggtggtgtaagagtttctgagtcagaacatgataaactttggcatggagatggtggcaactttgctgaatcagtatctggtcaaagaaatagtttcagtattaagcatggatttccaaattatccagctcctaaatctacaaatgttgtcaacactagtcttcagtcagcacaaaacgttacaagtagaagcagtggtggggtgtctagcagcagctggaaaaattctgaggaagaagaattcatgtgggatggtatgaactctagatcgtcagaccacggtgcatcggtcatatctagtaaattgagaaaagatcgttcagcttctgatgattcagacaaatctgtaagttttctttgattatgccctgacatgagattctagataccttactgagaattttattaatgttctttatgggattaactctattttcaaaaattgtttttttactatccaaattatcctaagtgcgcacattttttttcatgaatttgcttctagtaatgttgacctcgcatgtgcaggggtttgaagatcacgttaaaccacaaagtttacatgattatacaccaaggggtgataaagaggcttctattgattcactttctgttgaacacaaagatctacctggtcttgggcatcggatatcatctccgtggttgttgcaggaaccccagttgactgatgggttgccccgtcctgtgagttcaagcattggcttcacaacaaatgctgttttagggtcttctggggcacttacacaacaacggtttcaatctttaaagtctgcgcagtcatcattgagacagcggccaccctcacctacattaactgcacgccatcctcttctttcatcgcaaaattcaacagatcatgaacgtgtgaaggcacattctcttagtcatcctgattctaaagtattttcagggcagttgaatctgggggtgcctaacatacatactcaggattcattgcccatctcatcctcccatgttcgacagggaaaaatggcaaaatcactgccccatgatgtacaagcttcttctccttcagttcccacttttccgctgaggcatgcttccttttcacagcaagcagaagattctacagagtctgatcctttaggtctaattcagaaaacttctctacctcaggtttctgtttcagggattctgtcaacaaacagtaggtctgcatcagagcgctctcctcttactgtagaaactttaggagactcaagcacagctagtctactggctgctgttatgaaatctggaattctttctaagagttcaattaccaatagtagtctacctaacctgaactttccagactcagggcagttgccatcacagtcaagtcagcctccacttcccagtggacgtactcctactcaggtcatgaactcagggtctagggctacatcgacatcttcatcaggtcattcctcctatgatggcttgtcagcatcctctaagatacctaaaaagaaggtagagcagccgtcaaatcaacctgctcgaccactatcttcgtctcctgcaggtggtgcatcagaaaatgtttcgaatgttgcaaagaaagcctctgatccaatatctaacctccttagctcgttagttgcaaagggtttgatatctgcatcaaagacagaatcgcctgctgtgattccacctgaagttcctcctcaaacacaaaagaagagcaggactgttactagcacaggctctgtcccattgtcctcagtttcagcttcccctgttttttcaatcaagaacgatggctcatctctctcaaaacctgattccagtgttgtcaatcctcagtccacaaaaccggagaaaccccaatcaaccaacttggagattaagaatcttctaggctttgacttcaagcaagacaagatccgggaatttcattcatctgttgtcagtgaactccttgatggctttgaacaccagtgtgctgtatgcagtctaaaactcaaacacccagatcaattgaagagacacttggagtggcacgatttgaaaaaagctaatgattccaccaaggcatcaagaaattggtattttaattcaagggactgggttgctggagtaggatgtccatcgggatttgagcttgcgaagtcagtagacaagcctgttatgacgattgataaggacgagccaatggttcctgcagatgagagtcaatgtgtatgtgttctatgtggtgagatttttgaagatttctattgtgaagaaacggatgaatggatgttcaagggtgcattgcacatgatcattccttctgggactggtgagttagcaagtaacgacaagaatgtgagcaagggccccattgtacacaaaaattgtgtatcagagagttcactccctgatttgggactggtcagcaatatcaaaatggtaatgtgctcttactcttgcaactaattcgaagaaccaaatgattttctacctctaaagaaatgttggttttacgtttgttttcaacaggaacaggatgtatagtgctctgagatggagagaacctttgttttgctagtctgacagaatcgggtgaatgaatccaggttcaattctgtagtttaaatctgcatggtcattagatgctaattttttgtgcctcagatcagaatgacggtgagagctctttgtttattgtcatgcttttttttggttctttttttttttgcccctttgttttaatccatagtttgagaagaaaaagttacacaatgaaggaagatgattggtatattgaaggtctctctattctctaacgtggttgatatgttgttcctgtctttcattttctcttttctgtttgccatttcttacacttttgaaactactactacacttgatagataccatacctaccaaccaggcatctgatgcaagcaaaaacaaggaaaatcggtttgtgaacatgttgtcttggcgatgcagtccctgacaattgcgtctgtatcactaaaacaaccgctagatttatcttctttatacttatatatcatttttggcttggtttaatcacattacatttacctctgttagtcgagcttcttgagtaatggctttcttgctgcaaggtttttgggatgtt

SEQ ID NO: 243279 - DNA, 1759 bp, Cannabis indica
aaatgatttttgttttatttcttttcttctccaaaaaaaagttgtgaggttgaccagcttacttgtcacaaatctgttgaggagtagaattctcctcaatggcttttgtctcagtggccgtaccatattcatcagtgccacatatgtaaacaacgttgtacccacgaagacgacagtatctagcaaaaacatcaccactcaaaacacctgatccattcacaaattaaaaacaaaacccatttcaaaattaattaatatatgatctcaattcaacaacaacaattatataattaaaagttttacgtacatccaatgatgttgccgaggtgaggaacgttgttgacataaggcaaggcactagtgattagtacgttcctcttacctcgtattggtacttttggactactttttacaactcttctcgaatcatcttcttcttccatctcttcttactttgttttaacaataaaagttagttaataataataatactaatatagtatatgtaatgttatgtagtagttgtgcttggtttttacgcgccgtgacaatgaatttaagcatatgcacctgaaaatggcttatttatgtctcaaaaatatgcttgttttctttacaagttggatatattgatcaaataatgaatataattggtttgagattttagtgagtactctttgagaaaatggtgtgtgtttatatgatgtttgggtcattggggggggtggggttagtcaacagcaagaaccccaaaagtccaaaagtctttacacgtgtaatctttcgtggacggcaatgcgtggtgagcaaggtcattttttaattgggttgtttgttggataaagacttgtacgtgtaacatttctctaaatgggactttagtctcttaagtctagcaaagctatgaagaagaaaatatactaaattattacataatagttttttcaaaaacataattataaagggtcatttgatttaggcacttctccaaaaaaggtatgatattagacgaaacaactttgcctattttgaatacgtggaacttgggttaatattataacactagattataagatctttcttactgaaaaatactcataggctttgcactagtggggttcttttttatgtgaagtgggtactaattttttcttttagataatatggtatttctttgactttgttgtatttgacgttgtcattgtatttctcgcaagagaactttattaattagtacaagacaaagttagactccacaaaattttagacattgcatgatttgcatctagttgcaccaaatttgtaaataaatttgcgtcatttgtatagagctttaggtttgaagatgattgagcaaaagttaaaaaagctaaaggcatagtaaatgaaagccactaagcaaacccggccctgggcataggcgggctaggcctgtgcctaggacccacctagtccaagggccaaaaaaaaaatttctctttaaaaatttacaatttttttactgatttagaaaaatatcacatttttttttctaaataagggcccaaaataaatttttttatggcccactgaatttcagggccggccctgccactgagctagcctcagagcatagcagtggctagcctaaattattagaaatatgttatatcactatgctagactcaaacaaaaaaaaaatataggagatgagatattttaaaatgataaatgtaatttttttctaaactataacaataataataaaagaagaaaaaac

SEQ ID NO: 243280 - DNA, 3441 bp, Cannabis indica
aactttgtgaaattttacaaaaatgagaagtggtgtgtgagtgaatagagtcccacatgtaatagaaacacttcacaagaagtgtatataatgtgcaaatttggaacttggattaggtccccaaggggtacttagttttgtgcgcatgggtaaggattcacacattagaccaccacacacgcgtgcgctgccgccatccatctgaccgtgtcgacctggaggacgtgtgtcactatatctttttggagaaaatttatttatgaaattattatttttatttaattaattaaaacagtctttaaacgtgtttaattaattaataagcaaagacaatttctcactccgtattttcagtaacactcgtatgattgttcacacgatccccacaatcaaaaaaaataattttcttcccgttactccatatgatgcatcaaaaccaacaagagaaagacatagagaaagacatcctttttttttacaaaaaaaaaaatgtgttccgagatatagtataattattgggtgttgtattttgacaattctttatcgtgcaataaaatactgatacaatgttctcgactgagttgttttatcttgagaacggtgaggttatagtctacttgcacaattttgtacaatgccccgagcatcttaaaaaggacaacctaatccgcaactcaacctaaattttaattcggtaaattcgtgtcttttatttttctacaacaacttttttcaacaggttccacatcattggctgagtttaagctcaattatttagaagtatatctagcttgtattttagttgcaaggaaaagaagtgtcggggagatttactaccagcaattaaagtttaccaatgatggctcgccttaaaaataaacaggacaagctccccaaaccttgatctcaacaagaaaccttttagatctttttttcgttaaaaacatctcaacaacaatattgtctaagtaataaacaaatatatctccccatagaattttcattaagacaaataagcagttaagaattaagacaggactttggcctacacctaactgcatcaaagagctagccagacgccttacaaaaacaattaagaatgcaaaacttgaatcgagttgtatcacatttaaatcacagttatgtaatgaagaagactgtaataagccaccaatgcccctgagcaagtacaaaggttaaaagatggattggagcttcagatgcatgccatttcaggttttccaaaaagtacaactaaaacataaaagcaagatattgcaaatttgcaagcacacttaggttgcatttggttagaaaaaatagtatcaaaaggaatagaaatgagaatataaataggaagaaattgaattcaaaatacactaaaaaaaattaataaattttttctcataaatattggaatgaccttttcttgaatagtaactccacccaaatgtaaaaaagtcagctctattagaatgacattgcaatattttaaaatgtaaccaaataaagaaataaaataaaacttgattttttttcattccattctatttcattacctccaattaaacacaaacttagtctccttagccaaagacatcggcaacatcacacaacatatttctactagcacttaacaaaaaaaaaaaaaaaacatatttctactagctttcagaattgtccttcaaattcaaattcatactataaagcagaaaaaacacatctttgacttttgtcaacatccattatttcaaaaccacttgtactcaagaaattaagaaaaaaaaaatagcaagcattgactttaataatacaaaggtcactagatttcagattcacattgttaagctaaaaaatgtgtcattgcattctaaagacaaccattattcttataacatccacaaagataatcctttatccaaaaagatacatcctttagcatacaatccaccagctacacgaaacgactccaagtctcaaatctcaacaatttagtgaaagatagcactcagcactagattgctgaaaaatctttcagcgaaaggaaaaaaaaaaaagtgtctttgcctcttgtcaacttccattatttctatggcatccccaaaagatacattattaggcataaagcccaccatatacgcaaaactatttggataatacataaacacacagaaaagtaaactcacacaacaatgtggataccaaacaaattaaagttattcagcatcataatatactttaacaccatatcatcttatgtttcaaatgttgacaccagaacagtgattctactcaactttttagacctcacagattgattcaagatataccagcctataatctaaacactacaaaaggagtcttcggtgtacctacaatctaaacaaaactattaaccaaaaacaaaagtaagggaacaaaagaactgggcaatctcaccgagtaaccagctagtgaacatctcattaataaagcaaaattctaatcctttttttttcatctcctcgaacccgcagtctccctctccaccttctgcgaaaaaagcttggttgcaaacatgttatcatcaaaatactctctataaggatgctctttgggaatcagcctcctgaacttatcgaactgtttctcagcctcatttttcttctttagcagggtatatataatcccttggcataaatagggtctgaagtccctcggctcatccttggctagctcctggtaaagcttcaaagcatccgagtaattggactccatcactctaatttgagcaatgaggagcttaaagtccctaacctcggatttatttctctgtttctcgcacatcttcattgcctcctcaactctcttagccacagcatccaaattactatcctcagactgagaagccgccattaccagcccatgataagcctccacgcgtaaagggtccttcttcaaaatatcttcgaactcatattttgccaattcgagctcacccatgtaactatggatgttggctttaagcacaggccactcgttatcgtccggttcaagctcaatcagccggtccagcacttgaactgcttcttgaagcttattcgctttgatcctgatctccatgagtgaccgaagcgcttccatatcatctgggttactactcaaatgttcctcaatgagcttctcttggtcatcattggcagcctccgtagacgattcttcgacaaccgaaggtgcagcaattgggacggcggcgaaggcgggtttgtggtggaaccggacgaaaaagagagcagcggcggcgacggagatgcaagtggtcttgagaatgggtgagacaatagaggctaggagcgagggtttagggttatgggtagaggaggatgaagaggctttaatggagagggaattgaacttgaagggaggtgatgatgagtacgatattcgaaaagaagaaatggg

SEQ ID NO: 243281 - DNA, 4237 bp, Cannabis indica
atatatatatatttctttttattcatttcttgtggttcttgtaagtactacaagcatgtgtgtccttgaatacttagtttggtttgtgaagttatacatgactcagtatgtgatctaggagaatagttatgaataaactggattagtataatttcttatgctagctggttatttcttttatgttgtatattttatgttatttctcttatgatgtcatatttgttagtatgctatatcagcttaagtaggattgcactagaaacattattatatattttaaaatagaggattgagagaaagtttatcccattttgggggttaccccttatttgccttagatttgggcttttaacaatttttggcacacctgatgttttattaattctcttttgattctatgcaaatagccatatgtaaatcaactctcttgagatgctaattctttttattttgcatattttgaggcaaaacatttacttcatcaaaatttgttcctttttgttctcaattattcgtgatgtgaatttacttcgcaatttctggtttataattagttctgtttttatgcttgaattgctggtttatttctggtttataattaattcagttgctgttataaccatcaacagaaattgaacaaatattaaagatacttagctcgatttcaatgactagaatgaatgagttttattgatcaaatcatcacattacaatgagagtttacaactcaattacactcaacaatggtgtcgaacaccgattacacaaaacctcacactgaggaatcttgatcagacacacaaggaaccttattacaaccctccttcactcagtttcttggacagttcttagaactagggagagatgaatctgtaggggtttagtcttctaggtgctaaagtatctttctgtttgaaccaaggtgtccttttatagctttttgcagttagggtagttgaactgaaaaacagagaaccaactaacataactaacatcttggacaccaaagttttgttgtgctgatgtggcagctggtttaatgggctaattcctcaacaattcgctactcttttcttcctttcggatgactaactctctgttactttgtttttgtagctgaaaatctatcaaagattgattgcataatagattgtaatgaaacttctgtgcctgcccttcttcaagatcccgaaacatattttcatcttccgatactggtaaattttggaagaaagtaaaggaatttactatgttgtttgtgttgccttttgttgttgtttcacttatttacatccttttcttcagacatcaaaatttgatcgcttttcctgttgaagagtctgccttctgcagtaaagtttgcgaagttaaatctaagcaaagggaagaaacttctaatttgttgtcacaatggtaaagcctgtgaagctcccttcctcttttcctcaatcgacatttaaattaagtcatgtgtaatatattatattgaactaggaatattgatgtcaaagcagggatgtttgtccttattgaatgcttgttcaatttatatcttctaatgtctaatgatgtttccatttccaggggaggatattagtgtatgcgtcggtttggcaattttgatatcattatttgatgatgaaggtagcattaataacatacagctaaatttttctttgctttctcagtttcgaaaggttaattttttcctgtaaaaaatcattgggaagtctagttcatagcttctgccaccttttttttttcactgctatataaataaatttatggatgagttaccttcatttgttgcatattttattagtttcccctctcttttacaaagttttctcttgcacataaagcaatctttcaactttgctcaagatgtcttaataaatccttttgtagtaagggaaactttctttccaaatattattgactgtagtttatatcttgacttttgtactactccaataggaacatttgatggtgggaagtttttcagccagaattgcataaccaaattggaaatgaggaaaagattagtattgatttgcaaatttgcagtaaatgcccgggcatctagaggaaatctcaagcaagttttcagctttcttagtggtacaacagtcatttcagattgagatattattctctcaggattttgctgaagaagatacagatagatactccactaccaaaaatcaagagctttccatttttggcacacttctcttattattgctacctttttccttcagttttggacggtgggtatacctaaaaataaaagggcctgctttttctttttcactagagtgggctattttattttatattctaatttgtggttttgcatactatctggccctgtaaggagtttggtctatggcaaaatatctatgggagaatgaagtagaagaagacagggcagacttgtgttgagatgagtccaatttaaaatccaactgttaaccaaatgttattaatattaactttatattaggtacttggattgatctgaaaattttgttttaataagagcgttttccattggccttaaattatgcgcgactgtgtgtgttctttatttgaggatgggaaaacgtaaaagttagtgtggtgacattgggcttccagttgctgaagattgataatggacaaattagatacttgattattttatacggacattttctttgaataatatagtagtttgtgaagtgatacaactttcattatatttaaatatggaagttgctttcactaggagtgtaagtggatggggtcggatctgattctatgatccgactcgatctaaatcatgtaatgatctcgtcccgtcttgctagatcaaatactcagattggatcagatctgactcgatttatcttttttttaattaattttttttaaaagaatttaattttgttaggttctggggtctcgggtcataggtttgggtctagatcctgagttcgagttcgagtttgggtctgtgtttgagtctcgggtcccgagtcctaggtctaggtctcatcttcgagttcgagatttgcggtctgggtctgtattcgagtttcgggtcccgagtcctgagccctaagtacaagtgcagatccgagtttggggccccaggtttgggtccatgtttcgggtatgggtctaggtctgggtcctaagtttgagtttaggtctgaggttcgggtttgggtctgaatcctaggttcgggcatgggtcttgccgcgggtctgaattcgagtctcgagtctctcacatctgtgtttgcttcttaacaatttatatgtactctctcagtatatttattataaatatatgtaattttgtttgtaattgaaataaaattatgcaattactattatatgtgtggggaactagctagtctaaagagaaaactaattatatatttatataaaattcatgacgctgaaggatttctttcaataaaatttagttttgtgctgcattagacttgatcttacaagatcttaaatggagaaggaaagagaaaagcaaaaggcaaaaggcaagaagacgataaattaggctttcatctttaatggaaaaagaaattttttgaaactatagctttaaataatgtgatcgaaagcaaagtactgaccaaaactttggaagggcatttaggtgggtgggtaaaggcatgagaaaatgagattaatattttgaataatgataatgcactaagatattacagtgtatctttctaaaacagtgggttctatataaaataaatatgtttagttttaatagagacaatctaattaatatatagtattttagttcataattttaccgcagatatcattactcaaatattaggcataattgtcccttgcatagccataaaaagcaaaaatagcctccataaaaagaagaagataatttggcctttccccatattcttagataaataaactgttttaattttaagcattaataatcaatttgcatggccatggaaagaaaatccgaatgaatgtggacccgcacttataaagctaataagctctagtatctctcattcttcttggataaaattgactgtatttttttagaaaaaagaaaaaagaaaaactacttgatatctatctatgtacatttaaatatcgttttgagtgattatttatattatcttcatatgtagtaatttacaccatgtttaaaggatggggtaaattttgtgctgaaagctgt

SEQ ID NO: 243282 - DNA, 4418 bp, Cannabis indica
ttttattttaataattgaataaatattatgtgtaattaaaatttatttatatatattcttattgtataggagttaaaataaattttccactaaagaaatgttcttatgtattaacgggacaattttagatttttatgaggttattgtgtttttcgtcaattttttcaatggtttgcagaaaccttttaacttatgcttaatatgacagttcaatatctagaaacactgagaaatatgtctgaattgttggaaattttctcattataagatgaattaaaaaataaatataaatatattacaaaagattacaaaataattaaagaagaagaagaacaattaagaacacataatagacttgatacatttgttctaaaagtcatttcttctctcacatagatatttaggaaaactctacaaatgctcttaaagatttttaagccttatatgctcagtctagtatctaaatacgagcatatcatcacaagattctaaccacacaactagtggcttcaactaggtgtatcaaaagtgaacaaatagtcactatctatagcgagagaagaaggttacatccgattgcttggtagactctatgtcatccaaaggtaaatagaggcctcaggtttagattaactgaagctactaacaaggctttcctcatgaaatgggcttgaaaaatcctgacggacaaggactgtctatggcgacaacttgtggaagctaaatacttcaagaacaagggcttccttgacctggagactaaatctactggctcactcatctgaaaatcaatccttcgtgctagaagctctcttgttaagggtctatgtcaaaaaattgggatggaagatccacttctatttagtttgatccttgggtgtcggggggtaacctccaacctacaccccgacatgatgccacgactggaatgagtttggtgcgcaacttcatcacacttggttgttggaatgaagagctcattcgacattggttccacaaggaggacgcaaagcgaattcttaatatatctctcctcaacatgtcgcgggaagactcttggctttggctcccagaacccaacgggaagttttccataaaatcagcttacaaagttatcatgaatcttgaaggtattgctgttagtgataaaaaatagagaaccatttggggatctaaaatacacgatagacttaaattattttggtggaaaatactcgctaattgcctcctcaccaaggaaaagcttggtagtttgttcaccattctcgattctaattgtccgctttgttccttggaaacggaaagctccctccatattttttggcaatgtacttttgctagagctgtgtggtttgggagttgttggcagattagaacaaatatggccaaaaaggctaaccgggagtgctggctggactagtttgctgttgacacacatagaccaggtggtattcaattccatctctttttttgggagggggatgctattattttcgtgagcatttggagggaatgaaataatctagttcatggtggaagaccatctcccattaatatcattctaaagcacattaatacaaggatcactgaaattttcgaggctcttcttccaaatactgtagtggcatccgagtggttctcgccccctactggatgggtgatgtgtaataccgatgtcgcaattggtgatgctcaagcgacatgcgcaactgtgttcagaaatgaggctggcatcatcacgaaatgttatacgtttcaaattgggcactatgatccactcacgggggaggttaaggctctttttgcgaaggtgtggaggaggcggttaggcaaggatacaagaaggtgattttctagagtgactcttctattgttgtatccgccttcaaaaagaaaagcatgagatctgtacgttgcattataacattcaggatttggttggcaactttctcgcttcagcaatgaattttgccctttaggagacctgctggattccgagaaggtacaatggtgtggcccatacagtggctagatgggaaaatcgtacgaacaaatttgggatgtttgatttggctcgtgaggacgactccctgtgttctgcattggtagatggctggccggcttagtattttagtagtaagttcggttgtggcggttggtttttagtattatttccttttctagtttctgtgtttgttagcgtggactatctagtttttgtagtatgttccattcttgttgttgctctctgggtgttttcatggacccatttatcaaaaaaaaaaaataatcactatctataaagttttcattctaaccaccataaaatctttaaatgttaccaatcataaagtgggcgttcatggtattaattgggtaatttggaagttttttgagctgttagaaaagctcttaacgttcaaaaacgcacacaatgatatgatggaaaaaaaaaatagtaattggttactagttactagttttttcagttttcgtcaatttttctcaaaagtgttccaagccactcccacttgattttgcaccatttatacactttataaacgtataattcaattctccaacaattataatttcaatagttattattcatttacattcataaacaattagtaatatcttttactaatttaagaataatactgtaaaaaggaaagttacataattttatgatcgccatttttcaaagatttgcaactctttttttataattgtattaaaacactaatataacctcctattatatgttactatttgacaaatatattattttcttacacttaattatttactctaaatatgatattatataaattgtctttggacaaaattatcattaacataatatcttctctctcaaactaaacactcataccctacaatttttagcctttttcttgttgtccatgatcgccagaaatctaccgtgataggggctcaacaaatggactctttttgatttttttggtaaatactattttgaatcattatattttgtaaaaattattaattaaactatctattttgttaaatgataaattagatcctgtatttttttaaaataatactaagtagttttgtcaaaataaaacttaataataataaatattatgacaaaactgattatattttcttacatatgttcctattaatatgttcctattaagaattatcttcaagttacttgtattaaaaataaaattgtcaacacttcatcctagtatactatccaagttaagtcacaatcttctaagacctagccgaaatcaccaccattggctatctattcacctcttccctgtcgaaaattccacctagaggtgcaggactcgaagacgttgttgtacctacacccaaaatcagtcgagagtccctctagtcgggcttccaaagacgccgtggtacatttgtccattgttattcgcacgaccataaacgcagttttgataagtctaccacccatcacacagatatgtttagtgccaataattctcttaaagcctctctgggtctttattctatgtacatacatatattatatatagattttatatgcttattattattattgttatttgtagtttgaatctcataaatgtttttatcaaaattctgaaaaaaaaagtgattgattattatatcgttaacatatattgaattagtttattttgccttttctattctcaacttatcaatgacaataaaaatacttctttttgttagccaaaagcttgaatctaacaaagcaatgccagaggagacgaaggtgatggagcatcaattccgatgttaatggtggtggcaaaataaattaaggttttttgggggtaaattttgtaattttttgtatccatttttgggcgttttgtgtttgtcattattttgacttatcaaaagaatttgaaatgttaattatataaatatatggaagaggtttcatggtaattacatttttttagccattagattattattgaataattgtgattaatttagaaattaaataaaaataaataataaacctataacctaatagtcacctaataatttatttccttataaaattttaatgaagatcaattatattttaaaattaaattaattataattattaattaatttttcgtaatttattattaaataaagatcttttagcaattttttttccttaaactattaaattttataggaaaactcttataatttaaaattatacacatacaatttcataattaaatttattatacttataattttaatttaaaattattacacttaattatttagtatttctcacttaagtatttaaaaagtaaaaaataaaataagctagatgtatttttcaaaaaaaagaggccaaactcctctatttttttaataaggagtcatttactcaaaaa

SEQ ID NO: 243283 - DNA, 2830 bp, Cannabis indica
ccatttcatcacttctgaaacaatcttggactggtttagaaaacgcagcaattactactcctttgttgttacgtaccacagctccaattcctaatattttatcatgaaagttgacagcagcatcaatatttattttaaggaaattaccttttggtggaatctcatatgttggcctcccattgtcacttgtcactgaagataaagtatgttgttgctggtttgctacatgccatgaagagaggttgtgatttgagacatgctggtgaatattatcttgaccagccatattatgtgatctttgttgatgcatcagattcataggtatggattgcagctggttatcaatatcatggtttataatgtaggtggatctaggatatcattcaagcagggtggaataaaatactaaactaatataacatacaaatgtaactatataattatttaggagctacataattttttttatacattaagaaaagaaaaaacaataaacatagggaagagccccaccttatgttgagtattaaaaaagagcatttttaaaagacattagttgtgcttaatacttttttgggtgtcatattggtattggtttaattaagttttgaatcctatataatttaagaaaataacttttgaaaaatatcactaatcaatcatacggcgtcataagtattaaacaccactagtgctcaatagcaatgcccattaaaaagttataattcaccatatctttgagtgacaatggttttcttttttaatattgaagtacattgaggattgtttggttgatggtaataacatggaagtgaatgtaaaaaagattgatgtaggggtgagttgtccttggttggccatcgtacaaggtggtcgtagagacggactagttgttgctggtgcaagctattagacatcgtcgggaggtagcttatggcaatctcatagtgtcttattttggggtcgttgtagaagattgtaagagtctattagaaacaatgtcacattttttttattaaactaatagggtcgctattattttcttgcacgagcattctattttaaatctgaatgtatttttacaaaaaatgatgttctctggaatgtaagtacatgtttgatatcataactaaaaaattattttttatttttaaaaatagaaaattattttttgaaaacaatttaatttttttggccttgttttttggaaatagtttttagaaaacaaagttacaaaaaataagaattttgaaaacaacaaaatattattttctgttttaaaaaataattcacttttgatcaatattgtttttagaaaacactaactaaacacgacttatgttttgaaaactttaaaaactaatttttgttctcattttctaaaaaaggtttttttgaaaacaaaaaataaaaaacaatattctaaggatgttttgtttttttgatttaatctaatgaagtatccttttattaaaaaaaaatagataaataaaacaaaaataaaaggtaatgataaaagatactacctccttaatactgaaaaatatccttttgaaaaatcatattagaaagttaatgaatttaattaaaacataaagagaattaacatcttataatttgaaaagacgaaaaaataggagggcaacaaaactttttactatctctcacgacaactgctcctaaaacaagcgaaccctagttacaacatccacaaacaacaacataaatgtaggatgtctcctacctctcacaacccttttaacttgaataaatttgttatacttactaagtcttctaaaattaaaaggaaagattattctaatactatttaaaaataccagcaacaaagaactactcttaaaatatcatgaaatattaaaatttattttttttatttcatctttattcttaatttctcatttatctatatttattattcccaaccaaacatgttaagagttctcattttacatttctaaatcaggacatcaaaaatgatgattatagttcacatatatcttcaatttcatcaatttttattttctcgacatttttttcacctttctttgatgttaatttgctttctataaggagttgaatggtttccctcaaaagaaaaaaataaataaaataataatactaattttcattttttttcttattattatacagcaaaatgttttcttattcaggcttgaaatgaattccaatagttttgtcaatattatctatactatgacattgaattcataattgcttttaatcaattttttttttcctttaaaatgaattatatatttagatacatcaataaattatatttactaaaattattttaatcaatttacttctagatcgagtgatgtgagagctaagatcctttgatatatgccatatcaaccaaatccacatagttgaccccacaatacatgaccatgatttcatttcaaattttgcttatggttttcttaaatgaaagtccattattgataggaaaaataacaaaggataagataaatggagttgtaacacttgacttgcagaaggacattaaccctaattcacttgttaaacttattggttagaagaatatttactctacaaagtagagggcaaaagtaaaagttgagggacaaaaattctaattattttatggaaaattttatttacaagtcgaaattttttaaagatattttattttaataatttttatattatagaaattttatatttttaattgtaataaattttgttaactttttttatttcaattcatattcttaaaaaatatatacttatcaaataaaaatatattatattttaaatatta

SEQ ID NO: 243284 - DNA, 3942 bp, Cannabis indica
agaagttggacttaggtgggggattaattctaatgtggaatgcagagttgaatgtgcgaattatctcgagttctccgtgggcacatttgttgctcgtgtggcgaggggtaaggttttttgccatggacactaactttgtttttatggacatcctgaggcctcacatagagtgttttcgtggaagttgttacgagatatatgtaatgaaactcagggtgcttggttatgtgtgggagatttcaatgagatagtaagtttagcggaaaagagtggtggtcgattgcgaagttcagaggcaatggaagcgtttaaagaggtacttgatgattgtcaactgattgattttgggtcaattaaacatgattttacttggtgtaatgaacatgaaaatgatcaaattatggagaggttggataggggtttgtgtaatgtagaatggttgcaacagtttgatggggctgatatccaattactggactggtgggaatcggatcactgacctttggtggttgatatcccggtccgtgaggagggagaaagaagtggtcatgggaaaagaattagccggtttcactttgaggaggcatggtgtgaggaggaggaatgtcgtgacattattgcaaatttctggaatgaggagcttgtggaggaatcggctgaaaggtttcgaaggaagactgtcaaagtggggaaagttttacaagtctggaacaagaagaagaagaaggaaatgaatgaaagaattgataagctcaagaagactatgaatatgttctctattgggcaacagccgggacaatggagtgagctaaaagcagttgagaaacagttaaatgttcttttggaaaaagatgagcagtactggcgacaacgtagtagggctatgtggttgaaatggggagatcggaatacgaagtattttcaccataaagcatctgctaggaagaaaaagaatgagattaaaggtttgtatgatagtatgggagtttggcaaacggacaaagaagtggttcaacatatagtgggggattactttcggggtttattccagagttcccgggttgatgagcaagacatgggggaggtattagaggtggtacaaccaagaataacaaccacaacaaatgcggctttgttactggccttttctgaagaggatgtagcttgtgcggtacatgaaatgaatccggccaaagcaccaggggtggatggtcttcctgcattgttctatcaaaagttttggaataaacttagaaaggaagtggtcatggtttgcttaaatattctgaatgaggatgctgatgtgcgatgtttaaatgacactataattgcgcttattccgaaagttgagaaaccgaagaaggttgaggaatttcgacccattagtttgtgcaatgtcatatacaaaattgtgtcgaagtgccttgtaaatagaatgagaccatcgctgggtagtactatctcggactcacaaagtgcctttgtcaaagggcgtcagatccatgataatgcgattgttggttatgaaggattgcattgtatgaggaagaatagatttcaaaatgggaataagttggctttaaagctggacatggcaaaggcatatgataaagttgagtgggggtttttgagagccatgatgtctcggcttggttatcatgagaggtgggtggaaaagatcatgcggtgcgttacttcggtcagtttctcctttctaattaatggagaggtgaaagggaatattgttcctcagcggggtcttcgtcagggtgaccctctgtcgccatttttatttctcatttgtgctgaggctttctcaagcttgattcatcatgaggaggcagtagggagattaaatggtatacgatttggtaggcaaggtctttcggtttcacatttgttttttgcggatgatagcatggtgttttttgatgcgactatgaatgattgtcatcgattcaaggtgttgttagggaaatactcaaaagcttcagggcaggaggtgaactttcataaatctgagctttgttttggacgaagagtgggtgcagatgagagggtggccatgggtacatacatgggaatgaaggttgtggctaaccatgggaaatacctagggctgccttctatggtggggcgtaataaaaaacaactgtttgatgtaattaaaaacagagtgtggaataagctgaggggttggaaggcttctatgttttccatggcggggaaagaggtgttgattaaggcggtaattcaagcaattccgacatacactatgagttgttttcgactaaccaagagcaccattaatagcatccatagaatggcggctagattttggtggggatcaactgaaaaagataagaagacacattggtgtaagtggaaatatttgtgtaaaccgaaggaggaaggagggttggggtttagagacttggagatgtttaatcaagccttacttgcgaagcaaatttggcgatgtatacggcagcctacatctttgtgtagtcgggtgttgaaagcgagttattttcctggtaaggatgttttagaggctaagagtggggcgcatgcttcttttgtatggcgaagtttggtgtggggaaaggagattattcttaatggatataggtggaggattgggaatgggagtttggttcgtattgttgaagatccatggttgcctcggcctcggagtttcaaggtatatgaccggcctaatctaccttcgcaactacgggtgatcgatttgaagttgttaaatggtgcatgggatgaggatttcattcgtgctaattttaacccggatgatgcgaatcttattttacaacttccggaggctagcgttcatatggaagataaggttatgtggcactatagcaacaatggggagtattcggttagaagcgggtatcgaatggcgcttgaattgaagaaagtggttgggcaagcggatgatagtcatgtaaaagattggtggaagttactttggaagatgaaaattcctccaaaagtgaagcattttgtgtggaaattggctcattcatggcttcccacaaatgctacgcttgcttcgagaggaatgaatatcgattttggttgtcaacggtgccatttgggggtgagggaatcggtctatcatgctatttggggttgtaaagctaacaaaggggtgtggcaacttagcgggttcaagaacaagctgcagcgtgttggacatgaagatgtgatgacttttctaatgaggcttgctaaggtatggactaaatctgattttgaattgttccttattgtgtgttggcaactatggtatataaggaacaatacgaaacatggtggtaagatacctaggcctgccgaggtagtggactggtgtgccaagttcttggttgagtttcaaggacagcaccagcaggagcgacacaaaaggcagcgtgctggtgcgaggtggtgtcctcctgttcagggatcggtgaagataaatgttgatggggggtttcggccgagtggggaggggggacgagtgtgggttgtgtgtgccgtgactatgggggagctgttcaggtagcgactgctacttcgctgcagcaaatggcctcgccgttgcatgttgaattggcagccattaaggaagggcttcggctgggcttacaacgaaaatacccgcaatttagtgtggaatcggattgtctccatgccatccaattaatccaaagaaaggaggatgggtgtagagatattgatggtttactagattgtattagagatttaatgttaaatgatgctgttgtcggtgttttctttgtatatagagaagtgaatagtgtcgctcatggtttagccaattatgctttgttgaacgaagctagcgctatgtggattagggttaatcccccttgtgtaagtctcgctattgagcgagacatgcctaatcctgtgtaa

SEQ ID NO: 243285 - DNA, 4040 bp, Cannabis indica
aaataaaaaaataaaaaagaaaacaaaaactacaaatgtatagagtatctctctcaacccacagtatcccaaaagtaattgcaattcaaaattttgaaacaaatcagcagttttggaaagaggtttcttcaaacagcacaatgaacaaagaaaatgtcacttacccttgcagttaccaatatgcagtgtctgaatattaaatgctaaagactctgaaatttgagtagtagtattatcataaccatgaaagtcagaacataaagctagcacagaattcaatccaaaagaagtatgacacaaaataattgatttcaatctaagacatctgcatataagatctgacatgccaacatctgttaaagcggtgcaccctttaaggttcaggtgctgtaagttggtgcagaatttggcaatatacaggagatcagaatctggcaaacagtgaacaattgacaatgaattccgtgatccagaaacataaaaaaaaaaaaagcagatcaagaaataatcttccgtaattttgtctccctagctaagtgaaatatgtattttgatagcaagatagttaatgaaacaaagggaaaagaatatagtctcgccatgaagctctgttcgtccctcaagtgtaagctttatgatatttgacaggctaactttagacttataaagaggtgacacatccacaggtcttaagccactagttaacgaattatttggaacttccaatataattggactgacatcaatagctaggtcaacttcacagatcgcagggcattttaggaccaattgtcgtaatgttgttgtactgaaattcaacaaataagttgccttcaggatttttaatgatggaaatgacatggagaaacactcaatggcagctcgaagatgcagcctgtcacacttggaaatatccacttcctctactgcttcaaaagataacatcggcaacaatccctgtgaaattaagaagggatctctctcaaggctttcaagcttagccaataatggcttaatggtattccttaacatggactttgtacagtttaaagtaggaagtagagacatgaaaagtattgctgatgttatctgtggacaacttgaaaggttcaccttctgcaaagtgtggagaaacgaaactaattaaaataaataaacaataatgggagcaaaaacatggactggaactgaaaccactggtgtggtgaactagcatgttttccactaagcctttaggaactgcaaaactaaggattatattatatttgaaacatctataaccttctacatcattgaaatgaaaaaagaaaataacttcccaaggaagcacttgaagtcacaattgtaatgttgccgttctgcttacaatttaaaatcctcaacaagaaaaatatgagactgcaacaggaataccttagaatattccgtcactcgaatcctaaaatctttcaagtcaccaccttctaaaaagcttaatgagccagcagatgaaatttcgaggagtgtgaaaactgaagtaatgcttttatctacaagcttagcataatgacaatttcttcgtttccctgaaaaggtaagccagtcgaaattatatcactaatggctttaacgatgaaaatcagcatcatgtggtgctgttaatatcattcagaagtttatcatacctgcagcaaaccacaatggtaaaaggctcagacggatctgctcaacaccaataatgaatggttaaataaaaatacctctcagtatataataaaatttatagaactgcttcgtatatcacacttggtgtcctagtctgtttttaatccacaattgccaacatgaaaaaactgagggcgaaatagtaacttcactcggaaaggcacaaattctaaacatctaaaaattcatattgatttacctctttcagaatgtcaatataattgcttttcgttatattcaagtcttttgtgttagcatcaatccacatgaaaagtgcatcagagagatacatttcactgtaaggtcacaaacatattgtggtcagcatatgctttgagatttgattaagctaccgttacctaaaataaaatatgaaacctacttgtgtattgtcaaatgggggtgcttcacacaatcttgaagtaatctgtatggaacatctacaaaagatttacaagaaatagcccacatctgcaaagaatattatctgtcaccttcaaatagcaaaacccaggttaaagtataaaccagtagattgataagcctctaatgtaacttcatatatcacagatcaccagcgtgttgcaactaaattattattggaaacatattaagacaccaactaagccacagaaaattaccagcctaagcaagtaagcatgtaaagagctaatgcttttagagcaacaatctactatcatatgacgtatattccatcatacaccttctagcaacaagaagatttcaagaacaaaattttactgcactactaaattcataagtgaatctgaatctctcaaattactcgcatgtagtatttaattgtccaatgcaggtatatttcctcattttctatcctgattgtttattgtatatctttgtataataacatagaatatataatcaaaatgcaaatttaaagtacgatgaactaaattgagaaatcttgttcaaagagattctgctgaactatagtaaatcattttcaataattccaactaaagttaagcaataacaaacaaacaacaaagatccataaaatagctacaaataactcctcgaaaacaatcctagcaatactagctcatccaattttctattcaaactaaatttttacaagaaagttttacagatatggatatgttccagtgctttctcttgctggtatcatagcatacgatgtagtgccaagagccactacaacgaatgataggaagggcacacaagagattcatatagaaatgataacaaagaaatgtttggcacgtacaaaattttttgcaagatagcttgcacacaattctggaagataatcattggctgcaatgcattttaattagttaaaagttaataccaaactctgaacatttacaaacacaaatatttttaattgtattgaaatgaaaatagtaatcaaaaaagcaaagataagacgctgaccatgcttaaagccaaagttccaaatggatattagatcatccaactgcatttgtgatggcatggtagatgaagtcacctccaaaaaccaagtcttacacttttcaagaagaactttgactccgaaataaagtgccccctgaaattttattagaataatatttgagacacgtactattaagttagtctccttcatttcaattttcattgtagtttgtatacatgttatttcaacaattaagaggatacaacctattgcaggtttttttaccataaataataaattataatttgcaagttattattgtttttgtttacgagttcggtaagatatgaggttttttgtggtctttttaatattgaagtttgtagcaaagatggtccgtggtaaaagctacactgtctattacttaacatcaatgttaaaattggagtattgacttctgaaattctcattgtttacgatgcaagagactcatttcgaatttgttgtcatgtacccaaaatattgtcatatcttcaactttccctttttccttttcccttgctacattgctaaactcatagaagaagcacacaagtgtttacctcataaaagttgatgacattgtcaaaagtaacatcaactgagcagccatgtatgcacttcagaatattcacaaatgtttccaattcccactcaatcgaaatatgatccagctgtgattcactaccaaaaaaaaaaaaacttttattgaccttcaattttctcagcaaccaaacagacagcaaaaacattgtttacttgcttaaaaacagtgtaaaaataactctctattttttacctaaagctccagctgagcatcccatggaaatacgaagactgctcaataagcctacaaataataaataaaaaaaaa

SEQ ID NO: 243286 - DNA, 4377 bp, Cannabis indica
tttaaaatatatatatttttttgctttttttggtgtaattgcttgcaacgtgtttgatataatgtctctttcaagattatgcatttttcattagttttatcgtgtaaagttgacaactttgtaattagttttgttggtttaaatcatttaaacaattttactgataaggaagaccaatttatttatattgaaaccttcttctactagtattactattaggttagaccttgtggatttcaaatgagcaggtgcacgatatattaataattttcattctcaagagctcacatcaattgtttattttgatcctttctttcttactcactatatttacactctctcggtaactcttggacttaggtttctaaatttgaaatgggaaagttattagtgacataaatttaatgtgtaaaatttgctgaaagtgcttaaaaacaaatagaggcagtaataaactatatcatctctcacacttcgtttcttttacttttcttgtaagttttgatggaaaaataggttaaatatgttactctttatttagccaaacaggactgttgtgattaacttatacggatgaatatatgtgaagatttctttttttatttgaaggagcggagaaataattttattaaaaataaaaattgcagttgctaacttaggcaattcaaattaacacacacatatacattccaaccatattactgactacctttggtatttaggtatattcctatcataaagacaataatggcatatcaattataagctatattgattaagtctaagctaaatttaatttcgaagctccacataaattactagattaaattccaagtgaaaataattatgtgtaccattttgacattgattcttaccaattttttcatttgaggctagttttgatttctggaactggtagtttattagaatggccttcataatatttgttttaaaaatagagtcagtgtttttttttttttatatgtatatatatgttggactaattttctggctgaataaatatgcagattggtgctcattgagttctgtaactaacattcagtatgatgctcgtacaacccaagaggctgaagatcaaattttcaaaggggggtataaatactgatcctcctgggatatcatgtggtgatgggattaatgactacatgaggtcaaatactagtgttgctgttggtaataaacgagtttcaacatggatggttgggtgtccaaaagaaaagaaacagaagacagaaaccagtgcattggcgatgtgttcttctattttggaagatttgatgtctcatgaatttggttggattttcaaccaaccagttgatcctgttgcactaaacattcttgattaccttacgataattactaaacccatggacttgggaacaataaaatctaagctggacaagaatgattattacggcgttgcagagtttgcggctgacgttagattaactttttccaatgccatgcactacaatcctcctatgaatgatgttcatgcaatggcaaagacgttgagctgtatttttgagaaaaaatataaagttttgcagaataggtttggatcagacactttattaaaagataccatgcaaaagtgtgacgcaccagctcttttggttaatagatcagcccccaagaggtcactccctttgaaaggaaaggttgtcagatgttcttccgaggcaagagctgctgatatagtaagtagtagctttttgattatgttttttcatatattgacttggtaataggtatagaaacgtttaggattattatgaatttccttaatggtttagcaaataatacgtcatataacattcacatagataacatgctttttttttttcttgcaagaaagtattcatgtttattgtttgtttgactcgtttaccatttgtttataggttgaacactctaaaacgaatacctattctatgcaaaagttggggaagaacttcattgaaggtatgaagcggtggtgttcaatctgttttataactctatacagatgctaaattggcaattcgtcttgtaggtactgacaatagcagtagacgaccatgtgtctctatcaatgcaaaaaaaccatctagtgtaactctcaagcagtgcagctcacgtagtggtcagtggatttttatccttttctattgtggctgttatgctgttaactaactcatggatgtaactatcaaacaattgatctgtggactgacaatttgtcttgtaggtactgagagtagcagtagacgaactactgtctctgcgaatgcaaaaaagccatctagtataactgtcaagcaatgcagctcaggtagttgtagtggtcagtggattcttatcctttttctgttgtggctgttatgttgttaactaactcgtggatgtcactatcaaataactgatctgtggactctccctgtcttggcttagaaatttcttcagatagatcactgggaaaaaatcatccttgcagtgcaacctctagaattgtaaggatctattatctcaatcacctgagtgttcaatgtaagtttttacagtgtaggatagttgatcattctatgtaaatttaggatcgtcgacctaggcctgatccagaatctgagagagacaatataagttcatctagagaaggttagccttcttcctctgtttttaatttcaccatttgttcttttaatgtctttctgaaatgttaatgcttgtgaaaattctcatttgtggtgattaatctatgtgttgttttagaatctactccaactgtaaaattatcattgcaagaagcacttcgtgctgccaaagctgtcgctgcaaaattaaaatcccactatgcagagactactttgaaggttgaagataaacgctgtattgacccttttaaagctattcaggtaatattttttctaattataatttggaaaatttgtagaggtttaatctcgaatatatcatctgattttttccttatattcccattttctaactagggtaataaaataaccaatcttgagaaaaagcccaataagaaatcgggacagaggcagcctgagattgaaggtaattttagtactgaagcttgttttagaatattcctgtacagcatttgtttgtgacctttgttatacgtttctgccattattggtatcaaaccatattcatctaagtgtttcctatatttaattttatgcaactaacttcttttctattaagcattcaattttttcggtcattgaggagtgaatattataaggttagagacaatttagttaaaaaaataaattgaggaatttctttgacatagatgagatgagtgtttaatttgtgattgattgtagtgagtttcaaagtagcaaatgaatttggagttgtctttgaaacatggtggctattctttttatgtctatcttgataaaataatgtgatactaaaatcttaactttgcagaggaggtgatgactgaggttgtctcaagaacaaagacagaattggggttaaaacatcagagggaaagagaaagagaagccgctcgagttgcactcgataaggtttgataaaagctgtgtttatttttggtgtcttgatataaatgattatttgagctctctgagaaactaacagtggctcatgttcatcacccaggttgttgaggaagctgatattgatcaaaccctcgagtattttgaagcactcgaacggctgtgcgggtacaagccatcatgtcggtttactagaagaggaaaccactgctacattgaatcttccgggttgagtttatctcgctcaccattggagaagttgggtttgttcttgaaagaagagtacatggatggtgaggaggatgactaagagtgtatatatggtatacaagaacatatatgtgatatgagttattcttggaaaatgatattttcaataatgttttgcccgaattcttacatgtatataactataggaaaactattaagtgagagcatcactcttgccctcaaattttttacatgatattgtatattgaagcatagtaatatgatatattactttttcttttctttcttcttctaaaatcttaacaaatgaagtctgcctatcaaatacagaaaaaagaaaaataatataaatgagagatataagagattctaaaatctctctatcactatttattctatttttaattctcttatttttttttttaaatttttttattaggtttatatataacaattgattaattaataaaaaaatatttagtgtcctaaatatcctctgattttctattattttttactaaaaattaaaatatttttttcccatttagccatataacttaactaaaaaaatatatctttttttttt

SEQ ID NO: 243287 - DNA, 2474 bp, Cannabis indica
ttctcaacacctgaaacaagctccttggcatagtatgggctaacagtcaagaccttatctgattccaggattccagccttcatccaattgattttccttcccttcactggtttttcatagctgcagaacatggataaacataaatgcccaatgaagcttcacaaaaactttaaaaaggtgctttttaccgtgccacgaaaatcatacatacccgtcaatgaaatcaaaagagcttttaaaagtatctgggagattgaggagactgaaatctgtgaacgcaaatctgccttggtaagcaatattgtggatgcaaaaagctacctgacatcagcagcagcaagtaagcacaatccaaatgttgaagaagatggcactactaattaaactggtttacttactttggcactcttgtataagcctttggctttataaatggctttcaggtagcagggtataagtgcagtgtgccaatcattagctatgaagacaacatcttcacctgacatgtaataatttcgttgtgttttaatgaattaagatatgctactaagtttcaagaatgatagaattagtttgtggctgcctaccatatggcccagagtaatatttgctgctggtgaaattcagaatccttggaacttctaaagctgcctaaaccataaaaagttaattcataacataaattttgaaaaacaaaaagatcaaataaatctgatttttgacattaaaatccatgaggttggtaatgacacgtgatggagatttgttcacctggcatagaaggctaaaccgaagttgattgtcttggtaatcctctccagcaataggaccataaattttggaagcagttttcccccaaaccttatcacatttcatcatgtaaatggtcatagaagacaaagagttattactgtaaaatgtgttcacaaaagaccaaccttttcgagaaacactggatggtccacaaaaacacgatcaactcctcgtttgtagcagtggaagaagccaactttctctgttctttctcccactttaatctatttagaagactataattatgtaatcataatcccttaaaaaaaaaaggcaatttggatttgtaaatatataattattacctcaactttaacttctgtgtcccaagcatctttgtactggtcataacgtggagaaattgtcataacgcgatgcccattagcctgaaacgaaataacttcactggttattgtttgtttgaccattaatgttgactaagggaaaagaggagaagaacttaccgccatagctggtggaagacctccaagaacatctccaagtccacctgttttgctccaagggcccacttcagttcccacaaacactaaattcataccactaccgcagaagattttgggtgaaagaagcctcccatctcttcttctagttgcagcacttagttttagtttggtgttgagactactcagttcatccactttggtcaatacccttaaaccgtagtgggttattttctgcttcattaaccaaactttctctgaacttgatttggaatctgacattgaagatacttcatagttgacatgtgagcttcttgatgcaaaagctgaggctgcaaaagttgccattgcaagaacatgtagctttttcaatgttcttttagaaaaataagaatgaaactatatatgaataaagtaataaaaatagtatatagtacactccaataaacacatggggagaaatggttggctgaagtggtattcttttacctaacaagtaacaacaacctcatgtttcgtttgaggcttaggagttcttttgttattgtttttgtttggttttatttttctaataattgaaatttgaggctgaggagttgtttcaagtggaagatgggaccaacttcttatgaatatggtgatatagaggtacaatatttgaatatgcgtagccccaccgattttctttggtttgtatgtattttttaaggataaatttatgtatctatctcattattaattatcatatctttctttttcttattgtgtattctcacatggattgataggttgaccttaacttaggtacttctgtagaggtgtacattaaatatatagtttcatgaaaaaaatgggaatgatgttagaattaggtgactcttttccttgatgaagatagataggtgactattatggatatatttactcatatttgaggagataaaaaactattacaagagttgataaatgacatgtatggagactattagaataatgcccattgtggggattttttttttaaaaccaattgtggggaaattacatgatagttaaatacattaaattatcctttaaaaaaaaattcataactggttgttatgaccgttaaaagagaagtttggcggtcacatttccttctaacttgtgcaaggtgattgcctccaaaaagacagtgaattaacaccctcatagatgggataa

SEQ ID NO: 243288 - DNA, 5770 bp, Cannabis indica
attaataaataaattataaaataacaaaaaaaaatattatttttattaaagatgtgtttttgtaaattaaaaaaatttaaagagaaaaatattttttttcaatattaatatatttttgtaatattttttaaaaaatttcgcctatgtagttttttgactcataaacatatgagattagttgaaaaatatattcttttttgtatctattaattaaaaatactctcatattatattttattaaaatatactttatttttttgagtgggttatctaatataccttcacgctttatttaaatctaatatataatttacaggtcaaatgggaacatcatctataaaagtaaatatattttaaagaataaagtaaatatattttaaagaatataaaaataaaaataaaaattaaaagaaataaaataaagtgagtatacaatgtaatttgaacgttttggatttagcactactagttgcaaataatacaaatttggagtttacaagattattcaaaaccattttacttagattactttttcctgaataaatttattataaaattatgtgataaaaatattaagtatcaaaccgttatttgagtgttgtctttatgtattatttgtaaatatttcacaattcaatttttttaatgcaattttgataatttttcaacaggtttttaagacacacatttagaaatttgttatggaattatggttcattactacaattaatttcttaaacaaaattagattacaatttaccaaaaaagtatcataaataaagaataaaatgagtgataagccaaagaagaaagaagccaacaaccaaaggagcttattccttgttcaacactttgggaactttaatatatggatcttcaaaatttggaactgcaccaattagtgcttccctgttaagaacaagccatttcacccataaatatataataaaaaaaattaaggccaaagccttgtaattttgtactctaacacagcataaattcacaataaagactagaacaccttcttcattacctgttctcaaatgtttcgggaatatcatcgcgcaaattgtcaccctcagtatctgcatatcattcacaacataaccaattttacttcaaatacttgtaatgaaaccttaccataaaaatttaacactttgaaagctgcccattactaactagctacattcaaaacttgacatcattttcagtagaacaatgctaaggaattaccacacaaattaagatgcctaattaatttccagccaaacaagttcaaaaatccatacaaagtaggctttatatcaaggaacaagagagagttgaataagaacctgctctaattgcaggctcaacactatgaagatcaacagcttgaagttgtccaaacctgtcagtcaccaaaccattcattccataattcacacacaaattataaaccccagcaagctatataacttgatactccaaagaagattcataccaatccactacttgacgaattttgggaccaaagtcttctacctgataagggaaatgcagattttgaattgatttgtgaactagaataacaaatctcttcagatgaataaaaaccaaacatacctcttgaggagtgagggaaattctggctgtttgagccaaacgcgagacatctggaggttcaagggaggacccactcgtcggagttgagcagtttcttctgaccaaatccaaattgttcttcttaggaagaagaagagctttcccattaaatgggaggctcagaactttgattcccttaccaaaaactaaagctctgctccccatatttcctctgcctcactttcgcgagtctttactctgcgttggtacacaatattttatctctaaataactaaccagtctctctaggaacatttctatactgtcaagaaaatgaagttcagatttacactgtaaatttgcaaaatcacttttcagtcataactcaaatgttcaaacttttaagcaacttgctcataatactgagactggtgctataatcttggaaccattttctattaaggaacatttcaagaaaatcaagttcagatttacactgtaaatttgcaaaatcacttttcagtcgtaactcaaatgttcatactgtttagcaaactccttataatactaagactggtgctataatcctggaacaattttcccttaaggaacatttctatactgtcaagaatatgaaactcagatttacactgtaaatttccaaattcatcttttcaatcataattcaaatgttcaaattatttagcaacctgctcataatactgagactggtgctataatcttggaaccattttaaggaatatttctatactgtcaagaaaatgaaattaagatttacactgtaaatttccaaattcacttttcagtcataactcaaaataaaactagagaatttatgaaattcagattcttggaaaaaaaatcatgtatttatgaaaaaaattcttggaaaatacctacagcaagcttctccagtggaccgcggtggcggaagatagcaccggcggctatggcggtggctgttgagaccagagagagagagagagagagagagaggatgagattagagaattgaaaatgtgaaatcatgtgatgatattaagttgggcttgggcttgaacttgggcctagaatatagaataggcagcccaaacatgtgaattttcagggcaataatatacaaaacattttgaaatatataccaataatatacaaaactttttgaaatatacgataaacattttgagcaaatagtcaataccatacttgttacatgtacaaataagtcatgtgaagccttaaacaaactacccaaagttgtttataggtctaatattttgtatttatttgttctagttcttttccataatcatcaatttttgtctaatttgttaagttaaaccttttagttggtctcaatcaaaccaatttttaccaaacttagatgttcctctaaatattctctaacaacacaaaaaattataattttttttttaaaagaaatgcaataaaaagtggttgaacttatgaatttcaagtctaaatataacaagtataatgctaacacaaggtaaaagatatgccattataatttgaattcctcaactctagaactattattaaatcagcatatatacacaaagccacattcttctcatacaaattaaagcaaacaagtccatgaatgaatgcatcactaaaaagatgatcaatattttgatgctcaatgcaagctccactcaagttaggggatagagcttttaaccaaattcaacttattccttcattttaataatccttgaccttctgtgatcattggtagcagcattgcataagctatgctagaggtataaagatactttcttttcgattcaattttcgaaaccaactcaacaaggattcttcatttcaaattcaagggagttcagaatcttatgaacctctaccttaaatgggaaaaaatggtcaccagcaacaaaagttgttaccttatttcttagttcaatccaactacaaccaggcattttctttactcctttgtctagcattgcctgcctaactatctcagcttcattccattgcccactaccacaatacaaatttgatagcatcacatagctaatttctttatgaggatctaagtccttcaaagcttttcccaagtatgtccctaatgtaatgtgttgatgtgcagagcatgctcccagaagcgcctcacacgagcttaactcggttgaaactgtggtggcgaattcttttgcttcttctatataaccacctctaccaagcatgtctacaatgcatgctacatgatccatttcaggggaaagtttataaactgatttcatagtttcataaaactcctgactttcctctatgagacccgaatggctgcaagtcatcaataagccaatgaaggtcactttatctggttttagtccagttgcaaccatttctctatatagctttagagcgcggttaggttttccgtgtaaaccaaatgcaaacaacatggcattccaagaaaccagatctttatctcgaatctcgaaaaatgctagattagcaccttctaaatccccacatttagcatacatgtttactaagccattgccaacatagacatagccatggaagccattacgaaatatgcatccatgaatcactctaccatgctctaacactgcaaagctggaacaagcatgaagcacagctccaattgcataatcatctggcttgaacccatttctcatcatctcaacaaagaagctaatagcctgttcaccatcgccgtttcttgcataccccgagatcatagatgtccacgaaacaatattcttctcaggagcttgatgaaatgcgagaaaagcgtctttggtttcacccaatttcatatttgcatcaattatggcattccatgacacttgacttaactttccactagaatcaaaaaccttcatagcatcacttctacaacctaactcagcatagaaactcaaaagcgagttccttgtctccactgctgaactccaaccgcttttaatgattaagctatgtaccatgaatccgtacaaacatagtgatattgattctgtacaagcactcataagagagctaaaagtccattgatccggccgccaacatgaactctccaacatatctttcaacaatgccaaacaacgttcaacctccccatttcgtgcataacccgctatcattatgttccaagctatccccactctccttggcatagctaagaacactttacacgcgatgtcaaactgaaaagacttagtatgcgcaaacaagagcgaacaccaagatgtatcgttcttgatactcatttcatcaaatacactggcagcactagaaggactcagacacttcccatacatatcaatcattgcattattgataggcacataagattggtaacccaaaacaagtaccaaagcatgaagtttagtcccatatcgtagtttgcaagcaccagcagcagcacaagcactgaaagtggaagtgaaagtgaagtgatcaggcttggtgttcataattctcattctccagaaaagagaaagagcttcttgataaagacccaattgagaatagccagcaagcatggcattccaagcgatggagtctctgtgtgacattttatcaaatagtttgcgagcgttattgatttgacccgacttcgaataggccactatcttagatgtaatttgaattatttctgactgcatatcgttccattttcagaattcaaagatgcccattttcctggtttagctaatatgtttggcggcggggaagctggaagtggaaacagaggttttggagggactaaggatgagtcagttcacgaaggcaaggctccaacgagctataaacgacttcgaattggaccgattatgaaaaacagttagattagaacagagacataggcagcttcaaacgactttattgtgattggtatttaggtggcgtttttattttttaaattttgttaaaaaaaaaaaaattacttcacattttttaggaattactttacatattaatttttaatttttaaaaaatttacgattgaagttactctgatgagttgctataaaaattttagttgcgatttaagttgctcagttaattgctataatagtttttgtataaaaatgtaaaaaaaaataaaaataaataactactttattttttaatttgaaaaata

SEQ ID NO: 243289 - DNA, 2821 bp, Cannabis indica
ttaacttagtattagtttcccttagtttactttttttcttatatttttcaaatacactatcatcgatcatactacatctacttgtgaactgttcagggaagccaatgttggactttaatataatttaatagctagttgaagtaattaagtgtggaaaaatagatataggagattccaattcccaatatattaaaaaaaataacaatgtatttccacaccaaaattggatatgctggtcacctgtattttcttttttagtgatgagctataaggtatagttataaatatgcttccaaagcttttacacaaacattgtaattagagaaattttcttcatgcaaacaaatggaagataaaaactaaaaagttcctaccaaagtttgcttatgggttttttttcttcactgctagacggtgcataataacttgtcttcgccattcatgaataggaacctacacagtcaattttaagcattgtaacgtacataattagaatatatgatgcagtgaattgggtttgagcatatttttcccttttttttatataaattttgtttttgaaatatgaaagaaagaaatactctgaaaggcttctctttgaaaaatgataaagatcactagagtttttaatttaaaaactagtataaaaactactaacctctcgtaaggtaacatctcaaatagcaatactcttctcttttacatttctatttcgctactggattaaaattaatgctgatagaatagcaaaagggactttcaatagaagaaacttaagataatttgtagatggtgcatagtgattagtgctttctggtatgttaaattgacattaaagcctgagatagtgaattgttctcagcggccaattttctattttcaaaacgagagaaaacatatcttaattaaagtggcttgtttacatattgtgaatgaaattggcttactacttctctgtcaccaaagtacttatgttacatataaaatacttaccgcaggaaagccaccatagtccccaggttctgtaatgtccttagtaacacagcttgcacctgccaaacggacctgcaatagtgatgtggccatagcaagcatgataagatgaaacatttgaaagctttacacgttctctgagtaaaaagaatagacttgggagatggtaagaatgacttgaatacctttgaagcaatagagacatgatctcgaactaagactcttccccccatggtcacgtagtctccaactctatagtaaagaaaacgtgaaacagccaatcaaacttgtagatgttttgaaagcttgaccaagttcttgatgtcatgttggtaggatattaacagaatctacagtaaaatcatcattacttacgttacagaacccgcaattccaacttggccacacagcatgcagcattttccaataactacattgtgagctatctgaaaaaagtaatcagattgcagtcaccaatactagaattctcaattcacaatctacaagaaagcaaatcccaacctgaactaaattatctatctttgagtgatctcctacaaccgtatctctccagctgcacaacagcaggtggtatagttagtaaaaaaaggatgaagaagagaaacggtccagatatggtatgaaaaaaaatacaggtcttacctgcctctgtcaatgcatgagttagcaccaatctccacgttgctacctatcctagcatttagcatctatcggattttttgtaagcagaagaagagagaaaggaaaatcataggacatttcaatttatgatctaagcattgaaccatataatttgaccattaaaacttaataaaatgctgttgagaataaggaaacaaataaaacttataattatattttgcaatttgatttagtatcacagcctgaccagccagtctgttgtctgcaatcacatgacctcatcatatgtgcggtcaaggagagaagtactttaagcataatgaagaagtgcccaaaattaaagaaataggataatcgagtataaacatggaagaagcagcactaacttgaggtttctttaacatatttccatgttcatctacaagaaacccaaagcctgcaggtgaaatatggtgtacaatatcacaagcaaggaagcagcagctatggtaaacatcttataaatggcttcaagtacattagtttcagcaattaatagttagctcctacaatgtaaaaagataataatgactcttatattaccacataaggttcaagataatttagaaagagtttagtttcctgatttcccagacttgggtacattttctagactcaagaacttcaacactggtaaagctgataagataatcctacaatgaaattctctggctcaagcataacaaatcatttttttgctgaaaaagtagtcctttggtggtagcagcagatctcacttcctaaattatgaacacccgttagcaataaaaacattaagaacattaatgcacttcaacactggcccgtatacatggagatatgacagtaaacagggaaacaccagaatggggaaagcataggctaaagataggaattttattgctgaaattagggtggatgcatagaaaatatccaggtggttcttagagagaccgggaaacctgcctagagctcaaagctcactacattcacacttctctcatccccactctacatttatataacagtttaccaaccaaaaatcactactaacaacccagtcaatcccacgcatgatagctgtcctgctatagctcctaacaggacatgtcttgactataattactctcgtttgaaacactaaacc

SEQ ID NO: 243290 - DNA, 1345 bp, Cannabis indica
ttttttcaggttttaaaactaaaaaataaattgatttttacatactatgacatcaatttttttatatggtgtcgatttttattacatatgtttttggttcttattaaataactgatgctatagtgtacattatggcgttagttatttaataataactgacatcataggatttttttatggagtcggttatgtttagtcttacaacattatttgaattagcatcggtaacaaattttgttaaaattgatactaaaagagtttaaaaatcacctctaaaatccacaattataatagtgctttagatattgaattaaatcatgcaattgaattattgtatattttatgattacccttatccaaggccggccctaggcataggcaggctaagcccgtgcctagggcccacactttttgggggtccaaaataaaaaataaaaaaaattattaggcttttatttaagtgtattataaacaataaatattcatagcttagttggttgaggtggatggcataatgttcaaagtcatgtgttcaaatctcataccactctttttttgatattttttttatatattttttaaggtcccaaaatttaattcgtcttggcccatatattttcagggccggctctgcccttatccatattaatattgtgcaagtgactgttttcttagtattactttttttttatcttcgtttcttgagttgtatctccacctatttattttaattgtcaaataataacaagtatacatgatttataaatttctccaaataatggagcaaatggattgtaattggttagtccagttgtgatatacagttttaactactttttgtatagattgttcattgtgcgtattaatttatacctgaaccacctgcaacttgaactacatatgaaagaaaataattaaactaaaagcacactaccatataaaagaaaatgattatagtatcaaactttataacaaaactttgcataaatgattaatattattaataggataaatattattttggactttgtgttttacaaaagttatcgattggactttctgttttgttaaatgataaaatagaccatgtattttctaaaatagtaaaattatgatcctaaacttaatttttaacaatttttttaatataaccaacttgaagacaatttctaacacgaacagatacagaaaatataaacagttttgtcataataccttcagatcgaattattattaattttgttttgacaaaaaatcagttcaggatcctatttgtactattttaaaaaatacaggatctattttgtcatttaacaaaataaaggatctaattggtaacttttgt

SEQ ID NO: 243291 - DNA, 1280 bp, Cannabis indica
ttgtgtaattttttttatttggattgtatattaatttatttggctagctgaaagtatttttgtaatattgttacattcttttagttaaaactgaaaaaatttaaaatgtggcgtttggttggaaagaatgaaaacataggaatgagaatgagaataggaatggaatggaataaaatttaaaatgcataaaaaaaattaataaaaaattattaaatttttctcatcatacattggaatggtcttttcttctatttcaaaatagaatagtcatttcatcaaaatcgtggaaatgttattctattagaatgacattccaacactttaatatatgtaaccaaataaaagaatgaaatgaagattgtttcattttctttttattccattttattaccttcaaccaaacaccacctaaaagtatctttgtggataactagaggattcttgctaatttctcaagactctctacttattttagtggcggtatccaagtggttagatggggtctcccaagatctggtcgtattcatgtgtttgtgtattttgctataggtgctagagtggccgagtgagggcggtggcaaatttctttgttcataaatgtggtaatgtgtaggtctgtcttgtgaatctttgtaatggtttgcttcattttgagaagtgagtcctcactaagatttttcagtttaatgcattgaggttattcaagaaaaaatagcatcagtaggcagtaccaatggagtggaagagagtaaaactgaaaatactaagctgaaaaaaaaaagcttttataggataaatgtaaaattttagataaaaaataatattttatgtaaatttaagttaacgtactcaaattgagcaattcacaatgtcaaagaacctgtcgtgtcagtaaagatatatttatttattatttggtgtgtttctgtatttcattattgaatttgacgtgtatggatagttagctgtgaacttgatgagatatataaaaatattaaaaacaaatcaagttattattgtcaagtcaaattcagtacgctatactacttccaaatatttgtcaactgtaatgccaagcccatccatatctatatatctatactctataataagaatatggaaccttgacaagttgttcttgttttatttatttatttttattttttgtgtgtattttttagtaagtaatttttttattattattatattgctcaatactatacagggagaaacagcaaatgggagacaacccatccatatctatatatgtttatatatat

SEQ ID NO: 243292 - DNA, 1291 bp, Cannabis indica
gaaaattgggtagaagaataatcgaaaaaccccgtagccatgaaataatcacttcaagttttttttttcttcaacaaaaagaatagaaatatcggaatatttatatgaatataaatatccatgaatattttaaaagtatatttaaagatgtattgtttaaaaaacataggtaaatttggaaatattgactgaaaatattatcaatagttaattcctaactcactggaaactctttgatgtgaattttgtgatagatcaactttacatgtgaaaaaatcataaagtagaaattaacacaacataaattaagattgaacttaagatagagatgaagaccttcagagggagctgtagtgggctgagatgttattgatgaagcattgataatagcaaaccacacaacatagtacacagtgacaatacaaaagaatggtagtaggaatgatgatgaacctcctgatcctgatcctgacatgatcatgttatcaataataataatggacaagtggatttgcttataaatatataccaagtattgtttgtttctgactgccatctccaagtccaaccatgagccaaaatggagccactatcattaaaggcataaaacgacctctatccaactacaccctttagtctttagctaattaatgtttgtgtcaacttgggttaggtctctagtacataaatgctaaaaggtatgcctagtaccctcctcggtgatgttattggtacaattaagtatcgggtcccatgtaaattaattaaataacttttagaaaatatcactaactaattacaaggtgtcacatctaggtgatgctaggcaccattggtgcccaataacaatgcttgtctctagtactgttggtgtcaaacttattctttcattaaatttggagaagtgataaagagtgcaatgctaataaatagagaaatactaaaagaccatggtacttagtacttttatgagattcggtattcttattggtaaaatttcatatcggatcccacttattttactttaataataattatagaaaaccgctaaaaactatcttacatcgtgaccctatgagatttgaatagacaaatgtgtttgagccctcgattacatgattagtttataattactttgttaaacaaacacatcaaacctatcacttactttgaattacacggtggcgtttggttgtgaggaataggaatgagaaagggaatgagaataggaatggaatggaataaaatttaaaatgcataaaaaaattgatgaaaaaattattaaattttt

SEQ ID NO: 243293 - DNA, 773 bp, Cannabis indica
tatatcatacaagagaaggtgaaagtgaaaaggtgaagggggctacctgaagggtgaaattgacatggtcttgaatgggagctagatgtgcctgtgctgccaaattgacatcattcagcttctgcttaattttctctgtgattatttgctcttctgctgccgctatatgatccatcttcttctccttcttattcttcagagaaaaagagagacttgttttttattagggtttaaaggaagaaggatttttagtttggccttctattctttcttctaaaaaaaataaaaatcctttctttatttcttagtttattacacgggcgcgtggcccacaaagagcatatcaaatattatgcctccaaatttatattgcagttaaaaattctcccacgaatttattaaattgtgcttctaaattttgatgtgtactctcaaatgttgtgattttaaccaactaaaatgtattttgcttgatttttttttttaaaaaaaggtattttacttgagcaggatcaaggatgttcatgtatagattaccacttcaataagattaagctttttgatcactattatccgcaacaaatttactttaataaaattagacaaatatttttaaattttataatctcaataataaaaaaatattaacaacaacaacaaaaaaaaagaagatataatatagtacatgctaaagtaaatatccagaagaaatatagaaaaatccaactcttcataatatgtcagtcacatatttactttttaacaattaaaaa

SEQ ID NO: 243294 - DNA, 2579 bp, Cannabis indica
agagagagagagagagctttactctatttcacttggcaaacaagtcttacagctctttggtaatggacctcaccatgagtgtgaaatcaaatggggatgagatgagactgtattgttttgtttctctattttacgtaaaatgattaataatattaattataattagtaattaataaaaacatgacacttgtcggttctcgccaatgaacattgctattgggcaccagtggtacctagcaccttctaaatgtgtcgtcttgtaattggttagcgatactccataaaaattattatattaaactatatgggacccgatacttaattgcaccaatagcgatattgacacgtaggagatattgacacgtaggagggtactaacaccaatggtgccctttagcatttctctttccttaaaaggttatatttttgcattcattaatgaaattaaagtagtgtgatttgaacttaatttggttgtacttactaaagtcaataaataaattgtaaatgttattttgatttttgaattttatgttttagcctaagttatgacccgtttaattatatgagttccggattggttatattttagtcaataattttcataaatagttttatctatgaataaataaatgaaaaaggttgcactttggtggtgctctcttaggatattttctcataaaaaaggtttacattgttgaattttcttctaaaagataagatggagacttattatttattgtcaatggaagtaatttaaatcataattaacatacatcaaaccttaataagtggattgttaactcaagtggacccaattttttggagaataaatgacaaaaaataaaaaaatcactttcaaattgtctttgagattgatttcattggacccagttatgaaagtgattagtttccattctgaataaataatgttattgaataaattatatattacccatgaaagcaaatacaacagtgaataatatggttcaaaatggcaaaatattagaataagaagaaaaatgaactgaaaatggtacacttttgtaaaggacaaaaaaggttttatactttattagaatagtccttccacaatccaaagccttatgataatatatatactatatagtcatttcattttgtttttttggaaaaatatgaaatttaataattgttttggcaacatttttctaaggtgggttgatcacagatttcactgtaaaataaattaatgaatttttgaaagttggagctaatttgtggtgataaattatatatatatatatatatatttatatatataaatacttatctaggatcctcagataaaggaaatgtgtaaactagattagtagattgcacatgcaaatcattaatcacctttttttattttaaatatttaattttctcatcttctttacaactattatgagcatatgaccgaccccactgaggttatgaccacaattgcaattaatatagaaaccagtgagtgagtgagtgagcagtaattaagcttggaatcaatgtcacaattagacaagctgcacaagtctttatagtggtggaaatggaatatgactactctgataacgacttatagatatataacacaacacaacaaatggagtcatttgacagaataaaaggatgtctgctcccattatggggtccatcaacagtgaaagaggaaaacagggtcttggtgggtctcaatcacattattaattaataacccatatatatatatatatgtgtatgtgcatgttgtagttgcaacccccaaaaattctcatttttcaccttagctgcattagttgactacatcttatttcttatctaattgaatacatatactaagataagcccattaaggagtttcatttcacatctttaattatgctataaaatcaacaaggccaaaagaatccaaagcttgaaagtgctattactacttaatactaatactaatactagtgtgatgtgtgatgaggaggcccaaataacttttttgatgaatggtgtgtggtagtaataagataacagagaagtagcaataatagtaaaactaagcgtggtgctggtgttggtgctggtgctggtctgatatataatttttttgaataaagtcaaaaaataagagttgggttttgtccccttatttgtcaacaacaagtgggtcactaccagcagttgaaatcattgaaccaactgcagacacaacacaacagtgaacacccacttctctctctcttttttgctcacttcattagtcatcttcaaaaccacccttatatttgactcaattcaatgaatcatattacttgtactaataatactcatatgtaatcttcttcttggaccatttgactctgttttaataaggattatagtaagaaagatgataatataagaagttcaaatcaaatcagaggcattgcaatacagcaaattaaattcatacatggttgttgttttcttcttgtgtgattctctgctatttatagattgtgaagtgattattattaaggttcaaagttaacaattaaatatgagtaaataacttgaaacttaatgtt

SEQ ID NO: 243295 - DNA, 1793 bp, Cannabis indica
gcttggcaagagcaattattttctattggtggtaaggaagttctcttaaaagctgttgctcaatctattccgacatatgcaatgagttgcttccgcctctctaagtcactaattaaccaaattgaagtgatgatgaataaattctggtggggttcgaattcctctggttcgggcattcattggaagacttggtctctgctttgtgctccaaaggtggaaggaggtttaggttttaagagcttcattcattttaatcaagctttactagcgaagcaggcttggcgcatcttctccaatccttcttccctgttaagccgcattctcaaagctcgatattactcacattcctcctttttagatgctggtcatggctcatatccctcccttacttggcaagggattcattggggcaaagctttgctttcaaaaggtcttagatggaaagtgggagatggtcacagcctcttgtgtaaaagtgatccttggctgcctggtgtcaccaattttcgtccattggttgtggctagaatcgatgaacatattcaggtttcttctctaattatagcagagaggtattagaatataaacgtgctgaattcgtattttattccttctgatgttgagcgaatccttagtatcccattgaccctcacaccatcttcggacaaacttatctggcaccatgaaaataatggctgctacacggtgaaatcgggatattttatggctactaatttggaggagcaacaacctagtatatctggtgcacaatcacagcaatggtggaagaaattctggcggttatctttaccttcgaaggttcgtattttcttatggcgtgtgataaatgattgtcttccggctactgctgttctgcatcacaggcatataactcagtccccaatttgtccgctatgtcaaagagatagtgaatcgattctacatgctttgttctattgccacaggcctaggaaaatttggaaagactcccctttctcacttgacagtatactccttaacagtatgtctttaaaggaatgctttcttcatttttctactctctggtctgactctacttaaacaatttatcacaatcttgtggtatatttatggaatgaaaggaatagagaaaagcatggaaataaaaccaagccatacgatatggttctctattttgctctgtcatatattgaggagtatcaaattgcccagaaatcgaaggctcctccttccttgacttctccctcacggtcgactacaacttctgatgccccgtggctcaatcctccttcgggcaagctcaagttaaatacagacgcggcagtagacaagtccaaccaacgtactagttgtggagctgtgttaaggaactctaatggagatattgtggctgctttttcaaagtcaattccgggtgtttttcggcctgaaataatggaagctttggctctactaaatgcattaaaatggctgatagataatcaattgactgctcacatcttagaaacagactctcttttagtggttaaagatttacacgcatctactgctactgtttctgatttccattgtctgctatcacacattacacatctagtgtccaatttcccaagagtgcagatttctcatgtttatagatctgcgaatacggctgctcatttgttagcgaagtatgctctttcggtggactctgtttgtttttggttggaggaaatacctcccccgttaaatgcttattgtattatggatgattaatttaatataattggcattttcatctcaaaaaaaaaaaa

SEQ ID NO: 243296 - DNA, 2772 bp, Cannabis indica
aaaatattaaattattattattaaagaaaagaaatatttatatataaaaatcaaaatctcacagaaaatctttgcactaagtaagccgcttgcttcttctatacctcacagctcactgtcgaaactctcggagagagagagagttttctgctgattttgctcgacttactgacaaaaaaggtaagagtttttaattttcagtaacagaagattgaatcctgtatatatatatatatatattattagtttgagatttggatctttctttattagattcaattctttctgtctataaatctttctgtcattgcctacatttgttcaatttgaagaaaaccaaatttgatttttcattaagatccgcaaaaacaagctcaaaacagagtactgaatccttaccctttgacagatccatatccatctgggtaggcttcaaaaaaatgttgggtcgtcctcagttttctaggaccggaagcttccggcctgagaatttgggtccaaatgccatggccatgattggaaacctttgctttacgttgtttgttcttggagtcttaatcttcactattatagccgcgacttatgaaccggaagatcctttgtttcaccctacaaccaagatcaccacttttcttacttcaacttccaatgccactttcaaatctgataacactgtgacaaggaccggtgaggatttcatggcttccaatcagactgcgttctctacttttatcaacataacagatgtggacaaagtgagtagtggtgacaacaaccaagagagtgtcactgctgaggggaactcaactgattgtgaggctaatgtggatatcccaattgattgtagggacccagatgtgttccatttgatgatgagggtcgccatagaacggtttccggatattcatttctatcggttcgggaaatcagttcctgcacctgaagcatggagctgtgatatggcttggcggtttaggcctaaggaaggaaagactgccaatttttacaaggattataggaggtttgtgatttcaaggtctccaaattgtactcttagtgtggttcagattggagactaccatagtggtgtcaatgcaaggaaaaagaagagaaatcagactcctgggtttgagaagagacctctgaaacaagaagaggttaagtctttgcctgttgttggggaagctgtaaatgattcccttcctgttgttgagtccgaaggatctttcagccacggcaagtacttgttgtatgtgggtggtggagacagatgcaagaacatgaatcattacctgtggagtttcctttgtgctctcggtgaagctcagtaccttaaccgaactttggttatggatttgagtatttgcctgtcttcaatttacacttcttccaatcaggatgaggaagggaaagatttcaggttttattttgattttgagcatttgaaggagtcagcctctgtgttagataagggccagttctggactgattggaataaatggcagaagaaagatgggctgaatcttcatcttgtggaggacttcagggtcacgccaatgaaactttcgagcgtcaatgatgctttgattatgagaaagtttgggactgtggagcctgataattactggtacagggtatgtgaaggagaaacagaatctgctgtccggcgaccttggcatttgatatggaaatcaagaaggttgatggatatagtgtctggagttgcatcaagattgaactgggactacgactccgttcacattgtgagaggagaaaaggctaggaacaaggagctttggcctaaccttgatcaagatacttcaccaaattcacttctgtcaactttgcaagacaaaattgaggatggaaggaacctttacattgcaacagatgaacctgatcaatctttctttgaccctttgaaagacaagtatacgactcattttcttgaagagtacaaggatctttggggtgagaacagtgagtggtactctgagatgactaagctgaacaacggggctccagtcgaatttgatggatacatgagggtgtctgttgatactgaagttttcttgagagggaaaaagcagattgaaacattcaatgacctcaccaaggattgcaaggatggcatcaacacatgcagcactcaatcaagctaatctcaaacacaagaccgtggaaactttttcctgtttcctatgttttttagaatatccacgtgcatttcataaattgttttgttagccttagtttgaagtttctagtataaaagtagcttctgtacgagttttgtacgttagaaaagatactgtcaataccaaggtcacttgggattcgtttatgagtttgatttgtacttgagtttgtaatattaggattttaacatcaatttcatcgactgttgtatcttaataaggtagtctcggactagtcttatcataattatttgtggtatgttctctcagaactctcaaaccttttccgaatatctttttatcaatttattttggctgagaatgcaactgatcacatcttgaatgtgaatatcaattgggtttgttccaaaatcaattattggttcttgttatttgctgtccgtgatattgaaagagagaactaacaactctgtcccactgtttaacaagttttgttctaattttaccaaaaaaaaaaagaaaaataggtgattacgtaatatacgtatgtttcatatcttcacgatataaaagaagagaagaaaaaggttaagaatcttacattagggagagc

SEQ ID NO: 243297 - DNA, 5469 bp, Cannabis indica
aaaaaaggaaaaggaaaccccagagaggatagtcttaactatacacaagggtatcaggaaaaataatgcaacaccaagggcaaaataagtctccattatgcattctctttcttaccttcccatagtacaatccagtccacgcacggaaagatgaagcctctgtaatattgcaaagagaggtgaaaaacaataacaaaaaaaaacgaagacaaacagaaaatcagggtcagaatgaaagtgcaattttaataattccctggccacattatgaaagattaccttcctgatggaaaaaagtaaaaaataaataaacagttttatagcagcaaccagaaaatacatatttccatacagcatcagccagaaaacatccctagctcctccgcaaaagcatcagctttcaaaattctagaccgcgttcagcgctatggttacgttaaatattgcaagatgactttgtcaaccacaggttaatattttgaagaaaaactcatcacacaaacacctcagtatcaagaaagaattttattggatttacaagcataaaaaaaatttacattgtatattcaaaacacccacgtatagaattcctgggataactggcccaaggaggatgcaagtataatgtttttcagatcaagaaacacaagggaaaagtttttgcaatataaagttaaaaaaggaaggaacctgcaagcttcagcaagaacctgattagctctgagcacactcgaatggatgcaagtttccttcagtgaactcatgcactcgaaagcgctcaagaatttcaaaacccctggcaccaaagaatgttgacattagccatttggtaagaagataaatttagaagcaagcaactggagggaataaaaagtaatagggccaccatgaaagcaagtttgaatcatatgattacactgcagtattttacatggtatgcacaaaatttctaacaatgtgctctacatgaccaagttctagtgtgcaatattattttacacatgcatgcaatttttgacagatcatgatgcgatcttcatgtatgacaaaaacatgatacaaaagacaagttctggacaagaaaccgccaatcttcagtccaaaaatcaaccaacaaagaggaggaaaatacttatcatgcttctaaaacttgtggtcattaaaaggttagatgttcaattacatcaagccataatgttctaagtctaactcaaggtttcataaaccagtatgcttatctttcattatcttttccacccattcaattttgaaagtaagccttgctccatgtgcactagatgtttcatagctcaaaatcataatgtaaaaacaattcagaaaaaggacagaacctccacacttatagccacaatttactgtgctttcatacatagaaataatattcacatacttcaaggaaatatatttatataagaggagaaaagaatgaacttaattcttttgttaacaaattcacaagccttacaggattgcatcacgattgcggcctaatctccgttggttcccttccatggcagctaaaaagtcagcactttctggccctactgctccactggctacaattgaggggacggaagcagttggagtccaaatctagaacaaaaccagcaaacactcagaatgagcctagcaagtatccagctactaaaagaggaaagagtgggaggaaaagtgaggggtagaaaaggaaagaatcgatccctcctacagcagttaccttaattgtgttatcaatcccactcgtagcaacagcacagtcgaaaggatgaggctgcacacagttgacaactgcatagagacatgaagaagaccataaatggttaacaaggacagaaggtaagggtccacagttttctgtagaaggggaaacaaaaacctgcattatctccatgaagcatctttattaatctgccggttttcttctcccaaataaaccatctgccatcatcacttccactagcaacatattcacctgtaactcaaataaaaaaaattaacaaacttgcacagcttctttaaataggacatctaccatccaaatcacaagtatcaccgaaaatattaatagagatgcggatgggtgttataaacttataataggacagctgtcattttgggggggaagactggatagttagtagaagtaaataagtgatgagattaatatatgtgagtgaattgtggtgagcttgagctcttgtgagggctccgggtccctcaaagaacctgagttatcagtttctatatatttcctgtattcctttcaatttccacaacagaatcctttctctggtctattattttcctgttttggtgtttccctggtttttgttccattcaatatgttttgcattgcaacaaccacaatctgaccaaaatttacgagaaatatacatctccctcaacacataccagtaaagaattagaatactgaatgttaaacacaatctcaccaactaaaccactcaacctgcagtacgatccttgaaattaagagaacaaatggacaaaatgaaattacctctttgacccagaaaattagcctgctttatgtcagtccccacgttacagtggccaacatatctttgtttcatatcaatagctatcccaggctgcacatatataggaaaacaaatatgcacaattgcaatcagcaattaaatgataagaattatagttttttaccatcaagtgctattacatggtgttgctggaatatatacatgtattgttttaagttaggagatcaagcacaaacctttgcagttgtagattttctaatttctacaatcatgtttcaagtctcaacagatgattctccaaacatgttcccacaagtttggggaaaatagttaataaatttgctgtaaattttagacgtgtgtttggcatacataagcatatataaagctacgaacttccaaaaaagtatcgcatcttcagaacaagtgttttagacttaattaacttaaaacaattaaacttccatacatgatatctgtaacaataacataaatctgaaaacagcttgatgcgagagaaaataagaaacctgatatggtgctctgtcattgcaggatgatgatgagggagatccacacgagccatttgcaccaccactttccctagatgaatcattttttcgatggattcttaaatttaaacttccatgcagaatattgggttcaacatcatgctcctcatcacctgacattgatgtgtcaaagtccagttccaattcctcttcataatcagaatcttctctttcagatcttgggctatcatcactattagcctctacccggtaaaatatgtcacttaatgaaggcattgcttcacctcgaggttcagacctcaaaattccttcattttctttcttatttctttctgcttcgcctagccaatgcaataaaaaagaaataagatttttttccaaaaaggcctgcaatttgcccccacaaatatacatccccaaagttgtcagcctaagtgggctccagttcaaaattgtgcttgctaagaggttaaggaaaaacagttaattcaagggaggctttttttaattaaaagaaaataataatcaaaaaataaaaaagaaaagcagaaatgaagcacatgcacatccctttattttcaaactagatatttatactcatccacacctttatccaattcagacagaaagacaccggaacatatatatcacttacgaaaaagggaaaaaaatggaatgagtttttttgttgctccctctctcttcaggattaatataatattctatcacagaaatcattcttcataagcaaagagaatacaatgaactacaaattcgcataagaaaaccgaagaggcatgcatgaaatttggtcttggaaattgtgacaagaacaagtagacaataaaattcaaagcctggccaacgtgaataaatattgtagcaaacaaatgaacatgaagacagataaaatcagaaacctgcagcaatgtccttcttaactctctcaactctttcttctacatcagaattagaaggagccaaattttgagcagcacaagcaaaatctagagcttctttatgtcttcctaactgcaaaaaaataaaataaaataaaataaatctaaaaggcaaataggttgtaccaaaacataacgggggtggcaagaccagtggtctctttctaaattttcaatattgatttaaaaaaaaaagtaatgatatgtccacccaaaatatgcaccaaaacatttcacctagtgatgtggtactgttttttaaaatagtgtgtcccaatttagataaatgtgattgattaaaaaacctgccacgtcactgtgtaagtttttagtgcatattttgagtgcgcatatctgataagcctcaatacaatttatttactctaggagactgagggaatagcggaatagctttgggcaagggggttatttagtattcaagcgttttagtaactattccctatttttgtattagtgactgttctaagttgaggggctgggttgtctttttgtactatgactgaaccttgtaaatattgtaggaaaatctattctatttgtagcattatccttgtgtagctgtaagttagctattgtcatttattgttccatatttttagggttaagagttttattctgatattacagtacgattttctttccctttttagggaaccttgtacatgtttaatacatgatttgtttattagaaataatatattgaaaattattgtactttgtcgactaatataaagttgagggattcattttagctagcttggaaatagaataaacttggtctaaggagagaacaaccctctcgaaaggttgtactttggagagtctagcctctcaaatgctagctgaattccttgccacttttatcaataaaatattttccttgagggaattcattgtttgtgtttaatttctaagataaaaagtttctaaccaagaaagttcaatcaatttggtgaggtgactgcagacatgacgcctaagaaataagcaggtgattcttccattgtttaggaagaagattgtgacgctatgaaagttgaagtttctggaatcaaggaatttcttcatgattctgatacaccaccaattaggttgacttattctaggagacctaagaaacaaactgtaaataaaagcagtaaataatagcataaagattattagtttttgctgaggtggcagtcttatgcataagctgtcaaaataattagttattagttattcctagggtgtatatatattagtgaggtttgtatttgaagggtaaggaaaaagatacaagttgtaatagagtcttgaactcagggagaccccaggcttctcgaactgcctggcaccattgtaatcttgttggaattcaataaaacttcaattctttctacaccattcttgtacctgttctagggtgtatca

SEQ ID NO: 243298 - DNA, 2493 bp, Cannabis indica
caaaaatattttattttacgattttattacagtcgtatccctttttggccatcaaatgtcaactcaaaaagacgcggcgacatattattggactatgtattaaataagctaaaaaaaatatgtcgttaccaatttttgagctggcactcaacgggcttaatacacttaacagccaagaagagtacaattgcaataaaatcataagataagatactttgtgaccactttttttttattagagttatatgtgtaacaattgcaaattttaagggagtttcgccgcaaataacctatttggtaaattttgtttcagtagcataatggggtttcaaatcatggtttaattttattgtttaatacaggtatgcatgtgaagggagtgaggtctttactgagaggttgagaaccaaaaagctaaacaagctggttgagagcactgcttgttactagaaagttaattgagttactcttcttgatgcattttcatgaatgaatgtatatttatgataatattatatattgaataaaataagatgtggttcattgaaagaaataaataaaaagtaaaaaactttaggatctctaggggaatatcacaataatctatgatagtacaaatacagatgaacagaatttgattttcctttttcatttttcctattattattattactacatgaagaaagaaagaaagtggccacacccaaaaacaaatagtcaaattctgaattgtgagtggttattggtgacatgtaaagttattagtagagtaatataatagtctttggttgtctaatcttttacctgagagttcctggagccactggctaaatgccatggtaggcaaccacaacctttaactttccatcatcagtagcatcaatttgttggctaagattcaaagtgtcatttaaagataaagtgagaaaaagaaattaaatcaaaaaattattcttgcttttttcttcttgatgctatctctgaggcccaagccttgcctaattctgtctggaacttccctgttcagagtttgaaattaaatgagctttagcaacatatcaataaggttagaaaagaataaggtagagaatgtttttcataccagcagttgactggaaaaactcatccaagtcctttccttgttctgcaaaaagatagaaacatgttttcgttagtttcgggtgtgagtagaaaaattattcatctaaatcagtaattaaagttaagtggtataaattagagacatcagaaagagtaagagtgaagtttgtgatgactcttgtcttgtctaaagaataagaccagataagaaaatgaagagaataaaatgattaggatattatatgcggaaaaggctcaccattttcatattctaaagcttgaagtatcatctctacctggatggaacataaaactatttatattagataacattcgaattaagcattaatcaataattaaaaaaaggcaaaataccattatagaaatgatttgcaatcatccatttaaagataccaacaattcttttaagaactgctaatatagtatattgtctgaaaatatattataaaccacgcaagggataacaagcataaatcataactttactatgtgaataagataatgtgggcacattgggaatagtttatacatcccaaatctaacatgcagacctgtttgacatggttttttctaagccaaaaagcaacttttgggcttgtttggatgtaatattaaaagaacttatagccctttcggaaggtttttaaatgaagccaccctaataacatggttttgacaaaagcatcaatataataagacaaatagtgttgagatttcaatggaacattctgtttccatattaatacttgaataaaaaaatctcagtttatcctaatacgcgcttttacagtaacatagcattcaaatagtgtatttaaaatgtatctttttctaatgtataaccaaaagtgagtttaacctatgtccaaatagacccaagagaagtaaaagaaaaaggttttcatgtatactctgcttggatagctaacttcacaagagaaactccataagattagggaaaaaaatatggaaataaaaaggttccacttcaatgtgttatcaaagctcttctttgccaagtcatgtgagcttgactttctatcaaaatctacctttgggcttatgagactgaaagccaaacaaacttcagaataatataaaagtaatatttgcaaattcagacgaacaatgtatgtggacaccattttctaatgttttataacaatctaaataatttgctaaaccagtcattaagacactaggaactacgaagcagctactcttcatcatactaagcatcatttaaatggaaatcatacttagctgaatgtatactgctattaacatgatgggatcaatactatatttcaaataagtagtttagtttttgtaggagattagataaatgaaacagatttattacgtacctta

SEQ ID NO: 243299 - DNA, 4106 bp, Cannabis indica
attacatatatacttctccaagtacttttcccttaatctcaacgttcttttctttccttttggattaaaacacttttattcccttacgactaatttcctcgtcatacaagtaaaaaccctagctagtttgcctaagcaatacacaatcatctcatttttgttctgttccatggattcctcccttacaaaacatgagaatatccgaacaactcatcttatttccaaaactcatgatttgatcagtaccaccccatgtatgaccccattttgcttcttctgcataatgaaagagccagattctaaacaaagaagaaccaaaataaccaactgctttaagaaactgcctgttataggcgaacaggaaaatgttttggtgcttagtggtctttggtacatcgccatgagtcacccgggcgactgggagctcccttcgcttggcgtttttgagtgcatgactagtttaatccacaaagctctaaacgacgacgagtggcgttgcagggaccaaaacatatacatcccttactacgctgctcatgtcattggttcttacaccatgaaaagggtcgagtttgctgagaaagccgttgagtcgggcgtcattccaccattgatggagcttcttagaggaagaaagatgagttgggtagaacaaagggttgcggttcgagctcttggtcacctcgccagctatgaaagaactttcgaagccttggctcaatacgaggaagaggtggtaaggttagccatgcgtttagcttctacttgcgtagatgtcgtttacgacgactttgttagagttaaggataataataataataataataataaaagtaataataaaaggaggctaaaatatcattgtgacttacttactagagggtcagttgcaaatagagaaatggagaacttcaaggcggaggaatggactagccaaattcaatgttggtctctctatcttctcaactgttttgcttataaagggaggtcttataatatcatttgtgagaaggagtttttgagaagtctttgttggatgtggggtggactggcgaaccatgtttcacctgctggggttggacttattagaattttgtgttacaataaatatgggaggaaaagaattgctgacatgaaagatgttatagaatatctctgtattctctcgaggtcttctgacgattggcagtatatgggaatcgattgccttttttacttctcaaagatttcgatacaaggtataaagttattgacattgctatcttgtttcttattgatttaatcgaacttaaagaccttggagatagagcaaacgtgggtgaagaaatcacaaaggcactccttttggattatacttattttaaggaaaagaagtcagtgaagtcatttattactactaaaaaagttcaaaaggttttggaagatttatgggattggaaggtagagaagaggagaaaagaaaaggcaatatctgaagagaagctcgaggagagaagggttttggttgggttgattaaacaacaagcaaaccgtttgtattgtttaggagaaataggagaagctaggaggaagtactctgaagcattagctttatgtcctttaaggttgattaaagagagaatagttctttatagtaatagggctcagtgccaattgttgcttaaggatccggattctgccattacagactcgaccagagctctttgcctttcgactccgccaaattctcatggtaaaagcctgtggagaagatcgcaggcttatgacatgaaaggattggccaaagagagtttgatggactgcattatgttcatcagttcggaggtgatcaccaagaagattccatattatgctgcgcgaatgatcagcaaacagatggacgccacgtggctttttgccacatctcggttaagattgtcacaagttgagcagaagatgattagtggcaatgatgagggacagtactacagaaaaatgatgatgaggcccaatttgatggacaaaagaggtacatatttcttaaggaattaccctagccatttaattaggccaaaaatcaataaatacactatacacaatttttagaatcatcatcattggtacgtagtactgattatcactatatgcatattctcaactaataataccaagatttataacataatatagattaaattgtgcattggtttaaatatgttgtaatttgtgagtctcaaaattaacacatgaaagtgattaatgagttgaaagtgttgctacagaactccaaaatctaatccttactattgaagcaattataataatcatgacttgaaattcaaatattctttcgtaaatgtttttcttttttctaacaaggcgtgcctaattagtttacggaactttccgtacgcaaaatggagttaataattatgtacatatgtaattaacaaatttattattttatgtacaaaattaatggtgaactttttaggtgatctgtcaaccattaccgaagaacctttgattttaaaggaagagagaaataggagtaagatggagagaggaagaagaatttcaaaaagagcagctggcgtgcaacaacgtaccacaagtcaaatagtgttaccatgtgttagtactgctgatgatatgatacaatattacagtgggtcgcctaaatcatgccaacaaggatattcaaaaacttcacctctagattttatcagcttttagtaattaattattagttatatgtcactaacatagaattagtaatattattacgttcgtacttctagatgttacaaaaactacaaaaatgtttaatgatgtacttcgatgattcgatcttcagccccatcctcattaaaagcttatggtcaattgatagtattatatattttgcttttgatgatcagcactggccatgctatgttgtcatctattatattgaaaaaataggcatggtacctttcagaattctctctttagacgtatagaatggataatttcactctaggaaaaaaagtacattttatggttttaattactagccgttacatgtatataatggttttcatttaagaaaaattattgttgtgggaaacgatgacttcttgtgggagccactcaacagaagtttgagatgtgtgtctcccatatagttctttgtgtaatccagtacttagaaaatacgataacgttatagattagatctttgtgtaatgatcttccatgaatacaagattaatagttccctagttttctctcttgatggggcaaaaataaagtgtcactcttgtttttttgggatcactaccaatatataacctcatagttaagttataattttaattatttctaatttagcgcatgatactttaatactcattgactcataattattaaatgatcactttatttggatcaaacttttgtatagcaagccacacaaattagaaatttcttttaaggtatgtacacatttagcccatgacactttaatactcattgactcataattattaaatgatcactttatttggatcaaatttttgtatagcaagccacacaaatatacatatgaactcatattgaggattataatctaatagttttagttagtaaggcgttagagaaagttttggagtttggattaaaaacgttggactcaatctctaagtatcattatgtttgttttacaaaatattatagagtccaacattgtgttaactctaaaataaaacgataagaagcgtgaatattttttttgtaattataatatatattagggataattgcggtaaaggtccctaaaaatttagagttgatgcagactagttttcaatctcgaaaattggcagcaatagttttcaagatcacgttttctgtaagttcgtttgtccccctttctaactgatccattaaacctaaataaagtaccatgtgtcaatcttttattagtacaaataataattttaatatttttttaaataataaaaaactaaaaaaatgattttaaaatcataaaatatttttttctttctttttcttattggtcttcttcacacgattcccagccaccgaccccaacttctcttcgtattccaatctctctctctctc

SEQ ID NO: 243300 - DNA, 1376 bp, Cannabis indica
aacgttaaaaaagttaaaaaaaaaaaaagtaaaggtgacaaaagtcggagttggtcgggttggtcggtttaagttgggcgggtgttggacttattttcaacccgctcaattaacagattgggcggtttgtaattttttcgtgttatttcggtttgtaatttttatcggttttttcggtttacaaatttttttgtactgccctataaaaaatagccaaacttaaagctaccatatttaagttaaaaaaatttaaatccatatattcagtataaaatctacatttaaaatcatctatactctttattttataatcatacatatttagtacatagactcaatttttatgataaaattttgataaatatgtccaaaatacttaattacctacaacagagaatactttagtcttattaatgaccaaattcgggttcggaaacaaaatgtctacaattttatattacaaacttagcaaattagtattattgaaaatagatggtacagaaattatatatttcgatgaaatataagaaccaaatgatatttgccccattttaaattgatataattttttcatatgtataattattttctaataaaaatttcatacttttcgaaaaggaaagttcaatgtgtacatgagcatattgctataaagtattattgtgtcgtacactctatagaatgtggtttagcaaaaaaaaaaacactttatagaaagtgacatattatcactagtgcaaccgaatctaaaatcaaattaattttaattataaacatgcgagactattaacactacttttagacatgtgtttttttagcatttctctctaagtttttggctaaagaattaaaaaaaacgatcatagtaaatgactacataatacccaacactcataacattggcatggcatggtatggacaggggtgtagcataaactcaatagcagaagcagtgacgtcagggattagtggagccataacagcacatggaagacaatcgatggaggaggaaacaggctattccttcgtcaattgcaccataacaggcactggaaaagtctggcttggtcgagcttggggagtttacgccactgtcgttttctcaacaacttacatgtctgatgtcgtttcttctgacgcctggaatgattggagggacccctctagagatcagtttgtttcttttttttttttctttatcttatttgttttggtatagataaatttcttaattgtgttctaataattagaataataataataatttgttatgatggttattaatttaggtcagtcttttttggagagtatcagtgcgagggaccgggggcaaactccacatacagagtctcgtacgcaaagcagctccagagggc

SEQ ID NO: 243301 - DNA, 2764 bp, Cannabis indica
atatttaccacggtctaagactcaagtggtgacatatatacaccttactataatttgtaaattgactataattaactattatttttgttatgtttatattaaatttttgtattttgacagcatatatccaattaaaaagttaattaactttaataaataaaagtctctatcactaaacataatcatctataaatatatagacactcattcgcacaagccatattcttcatagccaaaaaaacacaatttaaccaatgcatcttttcaaacttacacaatttacaacaatcccatgaacatatgtgaaaataagaaaatcttctcaattagtataagaatgatcattctcaaatggtaatattaaccaaaggtgtccaattacctttatatagatatttaattaattaattactaaaaatatgattacaaaattaaaaagaaaaatatttagcataatatatttcactatcaatacagcttcaagctggtcatcacacatgatgatcaaagtttctcacatcacctacccatttttttattctacctagcttttattttgagataggaccattttgcctaacattaaactcaattggggactgatagttaccctacaaataaaggagaatgcatgcaaagcttcaaaatatttataaatatatagatatataaatattaaaattccttctgagtcagttgatgagatgatgatcagatctagatataacatatttatataacttcgagttcagaactctcctataaaatataaatatataataataataatgggttccatattttgggggtaagtttgaaaaaccttaattaataaagaagtactagagttaaaataactattcggcagcagaacatgcagagggccagaactctgctcttctaaccttagaaatgctctccaatactccaacgggtgacacgtgtcccatcacagttacccttttcgtttccagctctatgctaaacgacgtcactcctgaaataatttccacaccagcaaataataataataatttatttatatatacaacaaaatcatgcattacttttagggtttccgttatagtgttgttttgtgtgtgtttgtgcttaaattgattaataattgatcctaaatattaaatatttaatttgattagatcaaattaacagttaattttaaatattaaataattaaacttcacgttattatacttaaaataaaatatacatgaaatatatttaattgataaaaccgatctaatctaacattaataaatgactaaaattaattaaatcagaccaaatggtaaaaactaaatttattcgtcacagaattcatgatttagaattaattcattatttgattttattttatttttaaatgagtattaattcaatatttctaaatccatatatttaaaaataattagtgatcgagtattttgaaaataaagttataccttccattttagaaagatgtttcttgagtttaccagcgcatccttgacagtgaagagaaactcgcattacaaccacctgcaaaataaaccaagcttcaaccgttatcatatataaatatattaatatactgatcctataccaaatagtaattttttttaatgcaatgttaattattaaaaattagctacacccattacaacagaccataaaaatataatgtacaaaattaagcattaaatcaatgaaaatgaactctcatcgtgctcaactgtgaacaatataagtatttaatgactactttcgtattgattgtagcaaaaataaataaataaataaataaatctgtgttaaaaaaattaaataaatactattaactcataatcaattaattaattaatatgaccaaatgtagacgtttagtactatagtttttcattgttattgtctttaagaaccatatattgtcgtctgcatatgtataattaatgagtaataattaattattttatgggtatgcatctatataaatcataatagtcataatcataaatatcaatgacatatatatactttttaaacaaaatgaagggactagagagatatcacatttcaagtaattatttcatgttgtcacatataatatatagtactcatgccacgttcatttttggccccacattatcataccatatgtatattattgtatagaataattagtattattgtaaaaatttttatagtatacggtttattaataatattttttgaaatataatttttataataatataattcttttattatattctgttaaattttattgtaaaatgaataaattagtaaataataatattaataaatgaatacaaattgaaatacattactataaaatttattttttgaagaatatttttagtgagttatatactataaagaacacaatttaataatgtaaaaagttgaaaataaaaatactaattattttattgaatataggtatatatactatatagcatggtacaatatatatacataattatcttattatgacatacaatatatgactaactaatcattagcctataattaaaataaatagtacattcatataattaaatttatttattattaaaattatttttttagaagacgaggagaagttagaactgcacactattaatcaataatgttggtaaataaaaatatatgcttctttcaatgtaaatatatatatgcagtagccaaaatttattattaaaaataattaaaattttgccgattaatagctacacagtaacgc

SEQ ID NO: 243302 - DNA, 4394 bp, Cannabis indica
aatccataaaaatataaaaagaaaaacgtaaattttttattgctttttttcttttgaatgaattttttattgttttttagtatttctaaaataaaactttgctaccccaactctcattgtcaatacctctcttgtaatcaattaataattaaaaaaatacttgattatgattaaatttaggataaaagacaaaataaacaaacatgtattttcaataatcatataattccaatgtattttacaaaaataccataaaataatacgaaattccaagtttatatgcaaatcaactcattttcaagcttagcttttggcctcgccggcaaaagatgcttccgatatctgaggtcaatcactaacactctctctctctctctcagaacctttattttatacggtgtttgtttttattaagaattcattaacaaattggctggtggttagctgagatgagttcaattaagttcagttcagttatagagttgatttatatagcatgtgattgcaacttgttattaggtaactttggttgtggattttagttaaactttgctaaatctttgatcttttgtaaaattattttgatttttgttaatatcattatgaagatgaagagtgataacatttaattttttttatagtttttgagtattgttgtttgtattttgttggaatttgcctcattgtttggtagacattgcaatgcaaggttgggtttgtatgaaaattattgaatttggagttaggagttgggggatctgattgatctgatcttcactcatgtgaaactaactacttttgtacatataaaaagaaatgcaaggcatagagcaaaggtttcgagctcgaaggctagagcttttgttttggagaaaagaaaaggtttcatagagctattgcagcatctaactgtttgttgcgattcaggactttgaatatagatttcaagagctcggttccctgggaaatgattcatgttatagaagatgatcaatctgacacgatcgttgttgcaactaagattgtgtttgtttgttgaaaacaagttcaggaattttggtaaagttggggatattgaaaatgttgttgacaccatttatatattattgatgtctttcttttgcaatgtaatgcaattaacaactagagcactggccattactttgtttcaactttttgtacttgtcttctatttggtttcttttttcccttcatgtttgtaatctgttttgttagttaatcaattggtgtcttttgagttttgacacccacttttcatcaaaaatatatactaataaaatgggatttgggagagtttctgtcagagcttttttttacaaaaatcaacaacagaaattgcaagttaactgtcctcaaaaatggcaaccctaaacaatgaataattaataactaagtgataaatgatacatttggtttggttggacaataaaagaaaaaccaatgaaggcttttcattcattgaatcagtagaaactaataacatacaatacagcatatctcaaaatcaaaaaccaacaacaaccaattcttcttgaaaactacactctgcagtatgctctgaaatttcaattatctcatcatattataatttataatctcaatcaacagccttcacttcaaggtaacagatctccttatcatttttcctactaacattaagaaacaatgtttacgttaattctaattgaagtatttattgaaataaatatgaaagaagaacgtacatgtatagactatagaattagttaccatttttgcttttcgtacgggagctgtccttccgccatgtcattctcaccatgaagagaagagaagagaagaaattcattccctcatcatatcaatcaacaaaaatgaaactcattatccaatgtttgcctctccattgactaaactatttccatccttactcgaaatgctactaagtggtttactaccactctttttctccttctctttgtttgtttctgagttatctttgttaggggcaactaatttccgaataaacttcttctgtggagaattttctgataagctacttttgctggaactccttccttttgttgtgctagccttattatccttggactgttcggtcttttgatctcctacattttcctttgcactatcttttgagtcactggtattttctgtgtcgggaagtagagctcgtcgactaagccgaagttggcccttttcatttacctgtacaatatgccatgtcacatcagatgttttccgataaaaaaggaagcagtatgaaagaagaaaaattcagtgaaagaaaaaactacgaacaattaggacatgcaggtctttaaggaacagaacaaaaaccgatctcccaatctaactaccatttatatgagaacatacaaatataaaagaattttatgtgtcatgtcatatgcatgtaatataaaagcactgataagtttggtagaaaacattcaacaaactgtgtgcataaataagaaatagtagagcaatacctcaataagtttaacatcaacacggtctccgactttaaaagcctgaaacagaacaatgacaggaaaaccaatttcactttatctgcccctatagaatttgacaagtgaaaaggtaaaaaataaaaaaatcagcttacgtcttctggctttgctatataatttgaactcaactcactaacatggcaaagtccctgaaaaggaagaatgagagagcattatcacttcacaagttcacatcccatctttaggaagactagatatcggggaaagaaaagaaagcagaacgagctgtacctctcgtccaggtgctatctcaacaaaagctccataatttgttattgacttgatctcacagtccctgaaagttcaaaggccagaaattttatccacttaacaacttcataatcaatcaacaaagtcaaaaagtgcataaaaaaattctattttagatgaacaagatgagagtacaagcaattaggatgcttcacatcatataaacacagagaaaataaacaataaccaaaaaaaaaaatcagaggacacaatcatataccgataaatatcgcctacacttggaaccattgtcaaattgcttataatggctgtagctttttccaaacttaacaaatcccttgcagtgattttcacctgaaatgcaatgaatttgtttgttaaaatgatatctggaattaaaaaccagttgcagaaaaggtttcctctgatcttacagtcccatcctcttctgtgtcaataccatctactcctgtctcttctataatgctctttatcttcttcccgccactaccaatgattacatgaatcttctcagatctgacctgtcgtcaaacaagatgaaaacaggaatcagaatactgttgccaaccatcatttctaagcataggagcaagcaatatatatggctccaaacattaacagaccttcatgacatgaatcaatggggcatgctttgaaagcgctctggatggaggaggtgagcacttcaacatttcagctgcattagttcgtgtacacacactcaatcatataagaactggaaatttggtgcacaatttttagagctatagtaaaaaatactgcaatatgaaatttgagaaagtttcatcactagttagtatgcatctttgtatagttaccaaggatatgcttccggccatcctttgcttgtagaagtgcctttctcataatgggtaaagtaattccagccacctagaaattgtggtcatggattaattcttgctattacatatgtgtgactagtaaagaatacatcaaaattgaacatattaggctttaatattgagaaaatgttggaaaagaacaatataggatggatgtagactaactcacctttatgtccatctgaaatgcagttacaccatcttcatttcctgcgacctgtaatcgttgaattatttgctacattccacttgtaaagtttggagcctactaacagccacatgctttataaacttgaatttatttgaacattttccaatgagtttaactttaaacataagggattcaagttcactagagatttcagcaataccttaaagtccatatctccggaggcatcttcggatccagttatgtcagatagaataatcggactaccatcgcccccaaattccttagtatccagaaccatacccattgctatgccagctatgtgggatttaattggaaccccagcatcctgcaacgctaagcaaccaccgcaaactgatgccatgctattacaaaagtaaaagtatgatattaagtagtctgctttgacgcttttcaaggaaatgacatatattactattacacgcacagaagaatgaagatcttattcatcccaaattaatgaattacata

SEQ ID NO: 243303 - DNA, 5291 bp, Cannabis indica
atttttgtaaaaaaatggcaaaagttagtataacatgtaaatttcccaaataaattatgacgtacgttgaataagttccaaggaatagattacaaaaccagaataatattacatcaagaactaagaactagtgcaaagaagttccagcagtcagcacacccactacagaagtgtgcacctgagaattaatgcttagaggccctccccaagtaatctggaatggtaagttgaaatgatgtcttatacttcaaaccgaggagaaaccaaaatcttcagattaaaatggaagactcaaagcaaatatcttagattcctaattagaagtacagtgcagtaaaaaagagattggctgtaattgggtgcaactcctcaaacattctctcacactggctggactatcactataacctacaaagctgtaatttgataatggaacagagtcacccaggtctagactcaaacatgtagtttacatctccaaaccttaaatctaaatataccacgaaacatatgataagaaaaaccgaacttttctacgacaatgaaactaatacaaatgccagcactaaaatatggaaaactaattatcatttataataacaacataagaaacatccgtttaaaatgtacatcaaagcaagattacaagtttagattcagtaacccttgcctaaagtttcttttcatgttttttcaatctgtcactttgtgttttgtattatttataactaaaacttaaccagtttacataaaaataagaaaaatagaaaaagtaataataatttctgcagaactatcggaatttacagagagaacaacaagaatacacatacaataatcattcagatcaagcagaccaaagttagagtctgcaatgactcagaaaagcttagttcaccaattacctgcttaatgtaaaactgcttttggttccttctcttctcaacagaatactttgcagacagtcatctcctcagtctttatatgccttaggagaaattaaggtggcattaagagtatccgaacagaatgcaaggaaaaattgcctgcaaagaactagtaactattggttaatccgataaaagtgaatctaaaattaggccagtaaagcagagtaataatcctgctgggaaaaatgacagcaaaaaacaaaaacaaactgacaaggtacaacaagacaggacaaaacaaaacaaaggacacatgatatttagaatgccacgattacaaaatattctcctaattttagaatgctgctataactcatgagaaacgagaagataaaaaggacacaattatcagaaccaactggaggcagtgagctaattgtatctaatatgaaagaaaaaaagcaaaacaaaatttgattgtagttcgtccatggaatgcttcattttaaattaacataaataaacaagatttgataattgaaaggagagcacctaagcttatatgtacttacttaatcctacctcttgcatctgtaatccgtcatctcaccttgtcaccgcgaacaactaaatgtcccaactatatcaaagaaattcccatgtctttaaatatatcttcaaaagctcaggcaagttattttgcacttgctgtccacattcgtgagtcaatgatcattgattcagttgaaactgaacattaagtgaaaaggagcaattcacttctgtaatttccatttcttaacttaatcccatctgtcatgtgttatttctcttgtacagttcattcaacagcttcacagcattagcttttttacctcgtctagcaaaagtagcactaatacagaattgtgtactttcacaaggagcataccctttctcactcatttccttcaacaatcttttggcctcacctagatatgaatttttcagtggcctgtccaagtccggatgctttgatagcttacaccaaccacagataagtatgtcataagttgaagagttgggaagtattcccctagacagcatttcattcataagctcccttgcttggctcatctttcccacctttgcaaaatcaccgatgagcacattataggtgccagttctggggacaaaacctttgcttatcatttcaatataaagtttcatatattcccttttatttccaattttaccatggccagaaagtaaaatattgtaagtagaagcctcaggaacacaacctctctcctccatttcatttaataactttccagcctgtttcatcaaaccaccaccagaaaggccctccaaaagaaagttgtaagtatcaatgttaggagaaactctttcagacaacatctgaaagtatgtgtcaaaggcttttgataaatggctgcttatgcaatatcctcgtataagtgcattgaaagtagaaatatctgctaaaaatcctgctcctatcatttctttcaacactgctgtagcctttttagtcattcctaacctgcacaagacagtgattaaattactgtaaacagcccggtcaagtttcagcccaaaacgcacaagtttctcatgcatttgtaaaattgcatcagcccgtctactctttgaagacacatcaagaagcaccctgtgaataattgaggttaggggagatccataaaccaacattttatttaaaacatccatagctttctcaacttcaccagctttacaaagcccttttattaggctatttgaagtgtttgaatttggaataaaaccttggtttatcatctcattccagagtataaaagcacgttgtgaattatcctgtctacagtatgcattaatcatgatgttgtgggtagccttgtctggagcgaaacccatctctttcattccgttgtagatggattctacttcatatttcccaacccttgacaaaccgtttatcaagacattatatgcaacaacatcgaatccgatatttctatctgtcatttcttgggccaagttaagagcagtagactctttccccagtttaaagaaactatccattaaagatgtgtaattgacaaggtcgagtgagacactcctagacatcatatcttcaactaattcttgaacttcatttgtcattctggtttctttcatagttttcacaaaagcatcaagtacaaaattgttgtcctccaatcctgcaaatttcatttcattatacagttcaagagcaagttcttgctcacctgccttgaaatacccatcaattagtgttgcataaatatgtacatttggcaagatattttgttgcttcatcttcctcactaaatcaatagcttcatcaagcatgcctttcttcacatagccatttataattgaggaatacataatgacatctgggtaaatatgcttctgctccatttcatgaaagatgcacaatgcactactcacatctcctaattggcaatacccatttattaaaatagaatatgtgacatggctaggtagtagattaagctttaaaagaatttgatacatgtcctctgcctccttggtttttccagctttaaaaagcccatctatcatggcagaacacacaaccacatcaaaaataactccgcgcaccaccatttggctttgaaacatgaaagcttccactacaaattttgacttaaacaaggaatcaattaaaatagtatgagagaaatgatttggatgcacacccatcttctccatctccctcataagcacttttgcctctattattctcccatgcttacataggccatacaaaatggagctatatgttaccatatcaggaaatatttcattcataaccatttcttcatacaaagaaagagcttcatcaagcctatgctgcttacaaagtgctccaataatggtcgagtatgtaacaaggtttggtttcatatacattacgccctcactccgaacatcatcagcatcccaatcagcacaagcctcttccttttgtaatcttagaatctcatcaaaaaggcatttggccttttcaaaatcacccatcttgcaaaagccattaatcagagaattgtaactaacagtatcaggaaattcaccctctcttacatcctccatcaacttgagagcatgacttatatgtccaactttgcagtacccatctatcaaggtgttcaaacctaccacatccccatgaatccctcccttcattaagtcctcgaaaacccggctcccatgatctacaaacccaatttggcaaaacccctttactagtgtattgcacgtataagaatcaataggaatacccctcttcaccatttcggacagaagtccaagaccttgaaaagccaaacctttcttacaaaatccccaaatgacagtattataagtaacagtatcaatttcaacctgtctaagaaaatccaaagcaggcaccaactctcccactttgcagagtgaatggaccattatgttatgcgtaaaaacattaggcacaatcccacaagagagcatatcatagtaaagaagcctaacctgtgaaaccaaaccacatgcattgaattggtatagaagtcgattccacaacggtaaaacgggaacgaaaccgtgatttcgcatagcgtagaaggcgtccgatgcattcaaaaatctcccagcagccaagtagaggtgaatgagtgtgcaaaagaaagaagtatacaagtgagccttcatcaatggcggaaacgggaaaggagaaaatgtagtttggaaatgacgggaaggagcagaagggggtttaatttgatgggttttggatattgaaggagagggaagagaaggggtggtacataaatggtgtttggttggtaggaaagtgaagaagtgagtgtaaggagagaaacgacggaggagaaggagggcctttgcctgagcgttcaaaggcactcctaatactgcttccattctcatttcaaattttaaatgaacgttctgaagtgttacactcaaccaaaatcttgacggggaatagatcttaaatttaattactccaacgctaacaactaataatagggaaattctatagtgcacgttattaataagaatacatcgatacatttttatctgttttagctttcgaaatgattttttagctaaaatttttctcattgtcatgtaaagtatagttatttaagacatcttacaaaattttaagaaattcaaaaaagtttcacacactaaaaattgcgtttaagtagtgtgttgcacgcgtgactattttattttatatgcgtgtaaaataaactgtttgaacattattttctatattgtaaattatttcaaatttctcaaaattttgtaggaaatcttatatagctataacgtacatgaata

SEQ ID NO: 243304 - DNA, 2771 bp, Cannabis indica
ggcttattcattttttatgctctaaggggttggcctgctccctgctctgccaaaatattattttttttgtgaactcttttgtgtcctaaagaagggaaacagacagaatgatggtttttactccctccaagctcatctgggcaacaaaacaactgtcatgttcaactcccggaaaaacgtcaaggactatcgccattggttcttcttctcttctaattttaaagcctttgagcatccaaatcacttaacagagtggactcagattcctccactactttgaatagctcccaccaaactcttcttgagccacacggttgtttttgagactcttgccagggaggagctcaacgtgggagatctggttacctctgctaactgacggataaccggactcattcaaggccataaatccgttaaggacactaacttgtcgaaggtaacgtgtctgaatgctcaaaacaaggaggtcgagaggaggctctgggaggagtatatccagaggttaacaccaagtattaagcttatcgaaggaagaaagagtaggtgggcctttttgctcgcacccagagtgcagcagatcgaaagacagagaagaaggaaaacaagaagttggtggctcctagaccttcatttcctttcccggttcctaactctggtgctcttggagctagtacctctagtgtctgtaagtctcctgtgtctttgcatcatgctttttctatcagaagttatgctcattccaggccagttggctttgataggaggttacttaggttgcaaatgccccatccctgatggggttgtagggaaaaagagtggtacttctccaacatttgggatcttttaggtaagtcctaaatgggatctgacccttcagtaccgatacctctggaccactcatgttatctcacttaagttggtttcttcttttgtatagtttcttaggagacaacgataccagcatcattatttatgagtttgctagggaaaaattaggtcactttggtaggattaggtttctttctacttgtcttatctttatgactctcttataaattgtccttacatttctttcatttctttttgcagctagactaatggacaccatcttcgcctccatggatgctctaagtccttcataagggaacaccatccctcctgctaatttttaaagagtcgtagtgacttcaagagcttcaaacctggaggttgtatgtgtagatgatgaggatgagttaccccaattggagcaaagaggaagagtgaggatggtgactctacatctttaaagaaactcaaggcaaccaaaatgccttcccacggtattggggactcaggaatcccttcctaagctcatactttcccaagaatctcgcccattccccttactcacgtccatctggatgaagctcatcaacaacttaggattgctaagcacaattatgttgcatatgaaaaaaccaaagggaatactgaggcggaggtcttgcagaagtggttgatggagaaccaagatggcccgctccggggggattatagtggccaaattcatgaccttaacatggatccaatgacaaactggttttcaagcttcttggggtctgcttggctcattttgcttctgagatgatgggttagtttgcttacgacttggttcagcttcgaaccaagagatttgtcgtctatgctctctctaacccagtttacaaggtccagaacatgagcacgactttgaccttagtaagtccctaatcatccttattccatttatttctccactaacacaccttttttttttgctaatcttagtgcgtgaaattggttagattactgctgaatttagtcgcctatccaagaccttaattgataaagggtttacattgaatgaatatggtggcattgatgaggctctaaggaagctcaagtatgcagacaagcatgaggaagctctcaaggatgaggtcttggtggtgaaggctttgcgggagtgagaccaacgagtggttggagagtccttgaagatggctcaggaggagatttgggagcttcaggacaaggtaaagaaacttgaggaactcccccagaaggatctcgagaccgcagccagtgtgtgtgtggagcttaaggagcttcgtgacttctgagagaaggctaaactggaggctgctaaagctgctaagaaagctcttttggctccaatcacttgtgaaaattgtgtgaggcgatttaagcacgacatcttcatgacctagaggtccaacaattataagcctaagttcaactttttacccaatcccgcggctgttctggctcatttagagaagaacaagaagttggaagccaatctcgtagagaccttgggtcctcgccttcctcccaaatgtgactgatctgccatttatctatacttaataacttttttggtatttttggaagacttttatttagcatgttcccgcagctttcttttacattagggtagacactttttggcctcttcccaaggctctctctctttatatatatactcttttcttggcattcctttatattctagcctcttttattttttgagcaatatatatttgtatgagttatttatgctttataccctactacccccctaagtgactaaatggtttgttactttttgtcactttgcatgaacttaaaaggatggtgtaatacataaagggtcttaatttacagtaggtcctctttgattaaaaatttaaagatgaaattaaatactgaactcctaactattgata

SEQ ID NO: 243305 - DNA, 3995 bp, Cannabis indica
ttttggaagttgaattttggcgaggaaagaaaaaggtaaggaaaatgtagagaagaagagaagcatggagaacaagaaaacaaatcaatttttcatgtttgatatggaaagttttgttgaattgaaaattttctttccataccaaatataagaattcattatttttttcttcacttttttttcttcctacattttccttacctttttctttccctactaaatccaacatccaaacataggttagtgaaatctgtttttccattctcattgatatttgcattttttctctttcttgcagtggactccacctaatgtgagtgtacccttgttgaatctagtagataagatatttcagcttaaaaggagaggctggctaaggttttctttcctcttctctttattctatctatcttaaaaatgcgtagacgagatggggtttaattaaacaatgtcttatcatttgtatgattaatgtctaaagcacttgcaagttattatttggggcatttggaaatttgtgacatttgtctgtcattccttttcaatttcagtaggtgaaagaaaacaggttttcataatgtgatctttatagattaatttcctcaacagaaaccttgtcttttgttcatgtgttgctttccttttagtatgcatgacaatatccatttgtgatcgtccactccacacatatcttcttaccttaagtttaatgaattcctaaataataacataagcttggtttgactcctgtttatatattaacttgcagaagacaggtcttttggatatccaaacaaatattgcaattagtaatggaggatgccattgatgactggctgttgagacagattcattggcttcggagagatgatataattgctgaagggattcggtgggttcaagatgtaagaactgaactacaagacatttttttgcacctaaatgatcctaattaacttattgacataattctttaggaacatgctttgttacctcacatattaaatagatttcatgatttatttgttcatgccttagctgacaaaattatccccctggaccacattttcttccttgcaaatggaaaatacatctattgtttagtctatcataaaatttataccacaggcatggtatttatggctactttaatctttcatataacgctgctgttgctgcctgctttcaattggaaaagtatcagtcaaatttattagtaatggttatacaaatggttttttaattcataactttgtttatttctcacaggttttatggcctgatgggacattctttcttaaagtaggaaatgcacgagacaaagaagagaatgctgaatctgatctaaaatgttctcaaaatgtaaatcaaattggtgccaataaggtttctaaacctggctcatttgaggctcaacttgaagctgctcgcagagcaagtgacgtgaagaaaatgctctttggtgagtaatgtctctttagtaacttattctctttggttcatgtgatatttccctttttattattaaacttggcgtcagtattaaaattagaggaaatgctagttgatgtcagctaatgataatgtcatattgggatgacagtaatgtttctacttcttttgataatgcgatgccttttgtacaaagccatgcacttgcagaaatccatgaattttgtgccatttcttcaaaaatgaaataaaataaaactagtttagattcataaaacacatattttaaccatctaagaaatactaaataatttgcctagaaactaaattaatctcttttgattcctctcagatggagcacccacaacattagtgagcttgattggacataaacagtacaggcgttgtgcaaaagacatctattatttcacacaggttgtctgcatgttggcatgttctactataattgtttttcctgttacttccattttctcttaaaccaattaagatgtgcatatgtttgtttttttttttggtaattgcagtctactgtttgtataaagcaacttggctatgctatccttgaactatcgctggtatcagttttcccggagttgcggaatcttgtactagatgtgcatgagaagatgcgtgtgcatcaaccagtataagaagatgggtgtgccttccatcagtcctggtagtgatgattaaatactgctggaggaagtggattagatattttggttgatagggaaaatcatcaattggtcaattgggtggttttgtggcaatttgtgtaatattcatttggtaaatgataggaaatatgattttgaaacatggtatgaagtgctggaaaataggtttgttttgcctcatttttaaatgtacagatgtagatttctgtagagcgtgtacagaagttttgtatatttcattagctaatttattgatttcttctattagttttggtatggaatttcaagattgtgggcagttgcgtgagcaattacaatcgcttgaggcgtcaagactttttccagctgtatttactcatcaaatattaaaacacgatgctacacctttgctcaaaataattaaataaaaagacaacaatttatacataataacacaccttattacaagttatttatatttgcttaatcccacttctgatacccatattaattcgaaaaatgcaggataacaccactttttttttttttgtaaaaacctgaacctttattaatcaagacaaatacaagaaattcaggttacaaaggaaggtaaagaaccattccatacacactcactgtctaatcctaaacctgccctagcacacacatgagcaattttattaagctcacgaggaacatggacaatgaccagattaggactgaacaacaatgagttcttaatacaaaggacaatatcattaacaacagaattatgacatttagcattataaactttatctactatgcgtttacaatcagtttgcaagacattaacaggaagcttggtggcttgtacccaagaaatagcagccaaaatagctttagcctccgcaacctccggtggaactgaaccaaccataggtacaattaggccagccttaacatcatcattttcatctgtaaccaccacacccaaactatgcttcctatcagaactgctaacacccgcatccgtattaactttccatccttcatgctgcgataattaaacctgctcattacatctgagattgatattatctggtttaaaaccaggtagattagcatgctcatactccaacaaataactcacagcctgatcataaagatgccagggtggcagcaacttcttattatgaaaaagattatttctgtaattccaaagtaaccagatgaaacaaaaaaatatagcacaatcatatttgtctaagagatcaacaactagagcaataaaatcataaatacttaatcttttattagtaagataaaagtcaaaatatggagaatgtttccaagctttcttaacattcacacactccaggaaagcatgctccacagtttcccatttcaagttacaaaggggacaaataggaaaaggtataatatgtctaagaaataaaagggaagcaactgggacagaattagataacacacgccacaccagatgtttaacttttgaaggaaccaaggaagaccaaattttcgaccaaaaacgcttactctgatcaaaagatgaagaagaaggaatatccctagaggtgactgctaaatgatacgcagacttaaccgtgaaaagaccagaaggattcctaccccaaataagatcatcactacaaccatgaccagatatgggaacagtgagaatatgatcaacaagctggtcatcaaaaaactgatgaagcttcataggatcccaagcaccagatggggagaggaaaaaagaaagagtagaatcagagggagggggagatgaatatgacttaactcgacagtttggaagccaatgatcttcaatagtgcgaatagttgaaccatcaccaactt

SEQ ID NO: 243306 - DNA, 1136 bp, Cannabis indica
ttacacactatgagaatctacaaatttattaccagcaacctcaaaaacatttattcattctaaatactgatctcatgattcactaaccatatatagttcttcacacaaaacataactagaacaagaaacaataaaggctcaaactcatcatatggtacgtataaatacctgtgcattcttattcctttttctttcgattgtgttacaattacttcatgtgatgatcattgcaggaaattgaggacaagaaagaggtggcaaagtggcgaggaagggtgagcggcatagtggaagctccggcggagaaagtatgggggttggtgtccaaaacgaagcggttacgggagtggataacaatggtggaaagatgcacagagttggaagggaaagaagggattccagggtacactaggcttatatcaggcttcatgtttccacaagaagatggagaaaggtcatggatcaaggagaggttggtgtccatggatatggatatggataccccattgtgtagctacgtttatagaatggaggccaccaatattgctgggttagatggctctgtgaataggctgaaagtggtggattatggggaagactcaactctggttgagtggtcttttgaggttaatccctatgatgggttatgtgaggagagtattgtagattatttgggatttttgtataagtcttgtattcataggattcaggccgcaattgatgctgcaccatccaacaaagcttaactccaatatatatgtcatctcttcaacttaacatgtatttattaatgtttttggtgatgctataaatgtataccttttgtattggtttttctccataatctcccctagctatgtttagtttaaaatttaaatccaacatacttcacgcttaattaaaatgaaacaattcattttgattaaaaaaaaaaatcatattcttactttttttttttgggatttttcattcttatttggatttaattggcacttgattaatttcgttcaaagagttatagagatcttggagctttactctcttcttgaatcttgaatttatcttgaagaatagcacattaatgttcatttctttttattttttaagtttgttttccaatttgcaagaatatcgtt

SEQ ID NO: 243307 - DNA, 3414 bp, Cannabis indica
ccattgccaattctccaacgggccccctcttgaattatttgtctcccccaaacaattcctttctatatacatgacgctccttgagggcatttggccgtgagaaaggtcgaatccgggtagtagcaactcttcatcaccctagtcaatagagaatgtggtttatgtatgaggcgccaaccttgttttgctaaaagggcttggttaaattctgtcaaacttcggaagcctaagcccccctcttctttcagcttgcatagcttgtcccaagtgctccaatgtatctttttattttcttttgtgtgccccaccaaaatttggccgctaaggagtggaggcttttgacaagtttttttggaaggcggaagcagctcattgaataacttgggatagcttgaattacagctttgatgagaatttcttttctggcttgggagaacattgttgctttccaacttttgagtttattccacactttgtcttttatcacctcgaacacctctttcttcttcttaccaataaactaggcagccccaagtatttagtgtgatggggaactagctttactcccaacctagaagcaagaatttgacccatttgtttagatatttggctcatacttacttccgattttgctaaatttatttgttgccccgatagccgagagtaacgattcaaatttgtagcaaggtatcacactcttcttttcttccatcaaggaacacaaagctgtcatctgcgaagaagagatgagacattttatccccttccttgtcgaaccgaattcctcgaattttttcagccctctcagccgcttgaattagacaagaaagaccttccgaacaaataaggaataggtaggggataatgaatccccttgtcgcaaacctcgtgttggttgaaaattccctatcctttccccatttatgagaaccgagaaagacacactagtaacacatcgcattaccttctcaatccattccttcacatagcccagccctttcatcattgtaacaagaaaactccactcgacctaatcataagcctttgacatgtctaactttaaggccatttttcggccattaccgaatcttctagttttcatgcaatgtaggctttcgaaaccagtgatagcattatcttggattaaccttccccccacaaaagcgctttgctcttccgatatagcttggtgaagactagatttcattcgccctactagacatttggccacaatcttgtagactacattgcataagctaatcggccggaaatcagacatttggttgggcttgtcaatctttggaattaaatagataagagtatcattaatatcatccacccgttttccttcattcaaaattcccaaacacaccttggacacctcatcacctaccatcgaccaatattcactataaaagaggccctacattccatcatttcctggggcttttagagggtgaatagcacgcatagctgaatatatttctttcgaagtaaaagtttccataagaagctcatttgttaggtgagatattttgttaggaattaggcgttgaaactcctccaaatcctcttgggttgctggatttgcttcaaataattgttgaaaatacttgcaagccactagacccaccttcttattcccatacacccagtttgcattactgtccagcaatccttgaattgtgtttttccgtcttcgagtactcgccttcctatgaaagaacttagtatttcggtccccttctttcagccaaagggcgcgactacgttgcttccaaaagttctcttctttatccaataaaacattgtgttgccgctcaatatctttcaaatgattccaatcttttggatccgttcttctggagagaatttgtattctatcttcacattctttcagctgcatatgcatctccttcttcttaaacttattccatttttgaagagcaactccacaattggcaaacttaagttttaactccctagccgtggcacttctgctttgtgccccccatgtctcatttattatctccgcacagtctccatccttagcccaagcactctcgaagtgaaaccgagagtgccatttggccccaagagtctctccttgattaccttttagactttggaggataagagggcaatgatccgaatttatacagtccaggtgtgttactttagttgctggaaaaagatcaaaccaatccggattcccacaaactctatctaatctctcaaatatgagattgttttgtcttccattgcaccaagtatacttgctaccttcaatcgaattccctaaggcaacattcatctaaagcttttcagaagttattcattaagtatcccggttttggttgacctcccaatttctcctttttccgcaaaatttcattgaagtctcctccaatcaaccaaggacccgagtacatcttcccaaccctattcagcagcttccaagaatcaattcttcagttaggatccgaatctccatagaaccccgtaaaccgccacccttggtcatccttttccctaatgaaagaaccaatatggaaggaggagaaggaaagaatattgcagtttaccacagtagaccacaaaagaatgaggccgccacttttgccattggcttccaccaaaaacaaccaacaaaacccaacaaaacccgcaactctttagctttcgaattttacaatctagactctgaaatgaacaccaagtccggggtccaacagatcacaagggatttcaaggaatggaccgtccaaggcttccccatcccttgaacgttccaaagtaagattttcatggctgtaggcgaccttgcatagcagagtgcgcctcttcttcattcaggctgactttcgaatccccattgtgagaagcataccctctaaccttcccttcttattcttcgcatctttcttgacagccacgcttcacctttgctcctttggaactgtcttctggctaggaccaaagacaaaagatggccctccttcaattccatttgcctcattggaataactaatcggtacttcaaaaagattcaaagtcccagagatgtccttgggagggttcgctattttttagagttttcccagacccgtcccatcctagtcttccacgattcttctttttcctctaccaccctcatcttgattattcaagtgtcccaagcttcttatctcagcttcattttggatccccatttcagttacagccctctccttctcctccatgctacttcttgcttgttctttctccacttggatctcttcccgaccaatcatctccttaccattattgtcgacaagtagtgcaaatgaattagaagttctcagaccctgtttcggttgaattgcccctacttttccatttcctctatttgaatttccttcctgggatctttcc

SEQ ID NO: 243308 - DNA, 6541 bp, Cannabis indica
agtcacccagtgactaataaaaccaagcccaagtcccaaagacttgaacactccaggtctaaccatttggatatgtacaatcttcatctagctctagactcactgctgttcaacatttgctttgtttttacctacacatgaaaaatatatttgtgaatcgacaactcactaagaaaaagtataaaacacaacatataactgacatgagactaggcgcccatgcatccaatcacaaagtccataactcagtctcgaatgttcttgatatagtacgattgaccataatatcaatctatacttagtactctagtcatactgatgtgatagcatcaatccatactataagtacaactaaccataataccaacatatactcagtactttagtcgtgttgatgtggtagcatcgattcatactttactaaattgccaaacaaatatcctgttgatgtccaggtgcaactctatgtacaccaatacttctattactgataagttatctaattggcaaacataaatatgtacgctaaacatgtgtatatatttgtgtgctatactaatcttacctcagttctacaatcaagtgtgatggccaacctaagtgaaatttactagttgacgattaatggccctaagtcacaatcacaaaaaactggtaagtgacacactaaattactttcggggatttaaactcaaaattagaagtttctctatcaataaatagtgtagcaatatctcaaatatcagaaaaatggaaatcagagaatctaataaaacacctcaataggataatcggatccccaaacggttcactattttttagggttctgccttagaaaatggttcaccgtttttgtagaaacgatggaccgtttcatagcaaaaaatctcaaaactcgaatttctacttcaattctaccctaaattattttttcaaacattccagaacatgtaacaaaaacataataaacataatttaaccagaaacaacacaatcaaacctcaagaaagaaaatcgccattgttgagcaagctttgagttttaaaactcaaacttgctcaactcccactacaacatctaacactagataaaaacaccacaaaaaacttaattcaagctcccaaaaaagctcctaacctttcaaaaccctaatagagcctaactcaagaaataacctaacaaaaccaagcttttcttaatataaacaaagagaaaagagagatagggattagcttaaatgagcaacaccttaccctcaacacctagctcaatctagcttgaaaatggaggataaaaggcttgaagtttttggtttgctctttggttttatttagggccgcaagagagagatgtgagtcgagaaagatgagtcttgaattttgtgatgtttatctctaattaactttgatttattcaactaagtaatcaacataaaaagacttaaattaaattctaaaattcccactaacttagcataagtcctttgacaaaaagaccaaaatgtccttttgttcctccttaagcaacctttaaaacttaggggtaacatagtcaaaatatactaccttacaatcccaacactttaaatgtccatataatattgccctgctaattaaggctactaaaccataattaagtgactctaatggctaaatcgttattcctatgttatcgagcacaaaatataaaaacataaaaatttatatttaacatgcatggcacacttaaaatttaataaaattttcgtaattgaaaaattatctctctaatgcttaattctgataataaattttattttctactaatgcacgtataatcataaataaattgttaataagctactaattatttattaatttctatatctaaaattacagtcattacatttactctcgagttgttaattaagatactaataaaaaaataagaaaagaaaaagcaagttattatataatatatgtattaaatatacatataaattaattttagagtgactttggtaaaaaaatatttttaggaagctaccatcaaatttgccttttagtactataacaaaattttcataatctagtattcttagtaaagcagatcacttaaactataagaattgacttatataataagttaatgtctaatgctgtattgctgttaacttgaacaattatacatgtaattttaagctcaaccaaaaaacttgctttaaaagtgtggaggggagcaacatctacatctgaattcttcgttcgcaaaggtttttatgcaagtgatcagagttggtaaacagaaattctattgaaggaataaacaagcaacaatttgtgacaaaaaaagaactagtcgtgcagtttattactggattatacattttaagtcagcaaaaatgatatacatcactcaaattagccagtgaaggaaaaagagaatgtatctgatgactatcgaagaacactccaaataaataaataaataaataaatacgtacatgcacctataaatagtaagtagtaaatagggaaaactgctttttttgagtaaacacttagataagaattttctggtgtgtctggctttatataaatatttatatctgttgtactatgaagttggggaatgagcttgatatctgttgtcagtgtggtagtttcaaacggttgaacagcacaagaaaactttgctcaggaacaacatataggaatcctaaatcagcacctttgacaaatggtcccataccctgaatcaatcaagttcaaaaagaaaatccagagattattattaaatcatgccaaacatacggaaagctttaatagacgaacaagacaattttgtttcctcccatgtcttttgttcgaaaatggcttgtaaagtttaattaccttgccgttgagctgtagaagttctccatcaacccattgtggattccggaacccaaattcagctattcttccttgacctttatagcttgcaacctatataaagtaacaatatataaaccaacaatcagtagcaaatacacggaagttttgaagcgttatgcatttgaaagttcaatacagttgaatctggcgttttccatttccaaagaccaagccaaccaagttacatgtagaacttgaattaagttttcttttgtgtgcataagtagttggtcactagtataattaccactcctaattcctctggatacatccctcggtttgaaacacggttccctctcccaattttagcacggaatgtcacctatacacccagataatcacaaaatttagtatgctataacatacaattagctactaagcagtacaagatgtcaagagtttcaaagctacaaaacctggccagcaggaacattcaaatctccagttagtttcactgcctcaacatattcaaagaactccacatctgaagaattattgtctttagcatctgaacctttccagtggccaaatttacgcctcagctgtactacctcagtgccatacgggccaaatgaaccaacatataggcctatgaaccagccaagaagattggatttagacatacgtaaaatagcaaagagaaagatggaagtgggaaagaggggagtatgaaagcatgtctcaccatcgaatggatctagatctccttcacaagtggtaattcgactgaacttggtgtattcagatagcgtactccttttctgtgcttgactgacagcaagtttaactatttcacgaacatttcttgaaacctgttatttaagttttagttaattgctttagaaaaggcataacattttgcttcactttatagagtctaaacgaagaaagaaaatcatatgattcaactatggttaatttattaaacttaatatgaacagtacaaattggaacacctcactggtttatataatttgaagaatcattccaggacccgcatgatgttcatatatagatttgtggccagtaaggctcaaactcacctttgaagaaatcttgtcagacttcaaaaatgccttggcaacctcaggaggcataagctcagagacaccttgagctgctagagctgccactttgacttttgacaatttatcctctttggtatcagaatctagatttctgccaggaatatgcaacagaaaagaatccctctccatatcttttatttcagctgggtgacgcacgtaatcatccttagaggaagtatcttcaatgttatgtacaattccaccgatgaaaagcttcatgtccatttccttttcctcttctgttgtatcactatctcccagagtgacctcatcaggttgaatctcatccaagctactactttcttcatcttcagaagtatcactgcaatctgctttctcattattttcttgcatcaactgcttcatcgaatcaccatcctcgatcacttcctcattaacattgacattcatgactttaaccttcagcccaggaattttatctttaagaaaattgatcacactttttataccctcctcagttgcttcctcaatattaaggcctttctcctcgctctttcctgccttgtcttcaatttcctgaacatctaccacaggctcattctcaacttcggatgtagattggctttttacaggtttatttaatgagattgcagggcttttcgaattgcctttggctcgttgcaagtacacaacctattgatagacacaacaacatcagggaggtcaagatgatgagacagaaatagaaagaaaaaaaacaaaaagagaaccaagttaaaagaaaaagatgtgctattctattacatatttctcacaaattcttagacctttctaaatagaaaaaagtgatgataacgttgtaaaaccattcaaagtagaaaaacgaaatggtaacactcgagactgccatagataaacaggaatttgaatagcaataatgacctttaataatggattcccatccccctaacagtgtgcacaaatcctttatgttctatactacatagttagtacttattacttagtgtatgtcgatattttgatggttacctaactctctagccgttagaaacagcttgtagtttatgaaaaatttgaatcaattatgacaacttaacatttgaaattgatcacaatttcaattttaatgaaaacttaacatttgaaattgatcacaatttcaaattttaattcaacttttttgacatgtaaccaccataaagacatgactatctagaactctttcataatatgcacactgaatttttttaagtccaacatttattaaattaaatcttcactagaaccacaagattagttattgagaggaaatttgtacatacctgcataacataagtgtcatcatgatttttaacaacataaatttcaaaaagtggagttccggaagatgcagtgaccaactgtctgcaacaacacaataatcagaaacattttccaataaatttggatgtaaaataaacaagaaacattctaaccttggactgtaacttctaccaacaaatctccccactccagggacaatgtgtattaacctgccaaagggatcgtcagaatcttttgggtaaccaacccaccaacctacctgttcagagattgagaaagttagtgagcactaaatgacgtttttgtaagccgataacctataaatcaaggaaaataacaagaaagaaaagattcaaaacaaattgcttttaaggccaacaagatcaaaatggtattagatggtcattaacaaatcaagtctttgaagaaatatgagattaaagccagagcaagaccaggtaaggtgattaccagtccacttcctgtgtgtttacacaattttgaagcatcgtgatatcgttcttcatctattgcaatctatacaaacatagcagacctcataagtgaaagttttgttaagtgggcagagaccaaaatatatactgattttaaatgccaatccaatcccacctgcaactgattcatgatttcagcaacactgtccttagacgtagcttcttcaatggccattttcaactttacagcttcttgaaagtcttctttctcaattgcctcttcaagttgaaactgcaaattatatcatatagttaaagagaacgcacaacgtacgtcgtaatggcattcatctgttttgattacaaattttgatgaatccgttcttcagtgaaactcatgacacaaacccaatttgattcattcttatctctaaccaaatccattagacaaaatgccttatattgacaggcatgaacttcagaaagctcttattacctatacttaccctgacttttcttaacaaattatacttaatcagctataatcatagtgaattaacctcgtttgcacaactttctaatatatatgtatactttgcatattttcttcgttccacaagataatttgattccttgagaacaagcaattattcattgtcccaaatgaaacttttagtaactaaaccctgacatatgcatccccaaatagatatagtggataatcccaattcttgttctacccaattcgatccttatctcctttcaaaaaaaaaaaaaa

SEQ ID NO: 243309 - DNA, 2602 bp, Cannabis indica
tttgggagcaaaatgttgttgttccaaaaatgtatcaagtcgttttgaaattgaaggccttaaaatcctcctttggagagttgaataaagaatcttattctgatattcaggcagcagagatgtaagcaaagaaagacttagtggagattcaagggttgcttcaccaaaaccctttagacattgatgtgtagaaccaggaattggaggccagggagttgtatgttaaagtgcataaagactaatgtttgtttttacaacagaagtctaggattaattggtcaaaggatggtgatgaaaatttgtctttattccattctagcatcagagagaggcgatgtcaaaatagaattttatccattttagatgcagatggcaagatattagaagatcatgagggcataaccaaggcatttcttgagttctatcagaacttattgagtactcagattattaataggagaactgtagaccccaaattaattagaagaggcccatgtatcacggagcaacatgtttagttgcttactactgcttatacactagaagaggttaaaattgtcgtatttagcatcccagcaggcaaggctccaagactggacggatatagcagctcattttaccaagacaattgggatttggttgggaacgttgtgtttgaagttgtcaccacattcctccacacagaccagctgcttaaggaaataaactcaacaatcaacacacttgtgcccaagagcaagtgttcaaatgtagtaagtgattacaaacccattgcttgttgcaatgtctgatacaaagttgcaactaaactgttatgcagtatattgaagctcatacttccagatattgtagctaaaaccagggggattcataaaaggtagattcatagcccataatattatgatttgccaagatttgattaggcattatgggaggaagaatgctacagctaattgcatgattaaattacatttacaaaaggcatatgatactatggagtggagttttttacgataaatgttatacgcttttcagttcccagtgcatttcattaagctaattatgatctgcattactactcctaaattttctctacttttcaatggattctttgaggctaagaggggcctaaggcagggcgacccaatgtcaccccttttatttgtgttgggtatagagtacctcaacagaattatgaagagaataggtgataaagaagaatttcattttcattaaaggtgtaggggattaaagattaatcacttgagttttgcagacaacgttcttctcttttgcagggttgattttaagagcatctatttgatgctaaagggcctcaagctattctctatgacctcgggtcttcaccacaataaacataaaactacaatttattgtagtgggatgggagaggaggaaataagaaggataatggatgcttcagggttttagagaagtagcacttcatttaaatacctcagagtacctatttgtgccaaaaaaatatcttccactgaatgttcaattttagtagagaagatgatagctagaattagagtgtggagcacaaggaatctgtccttagctggaagaacagtactaatcaactcggtactattgacaattcacacttattggagccaaattcttatccttccaaggaaagtaataaaggaaatggaaagtatatgtagaagcttcttatggatagggaaaagcaacatgaacgggccaggtaatattgcttgggaaaagctatgcaagactaaaaaagttggaggaattggattcctagatattgcaaagtggaatcaagctgttgtgtcgaaacatgtttgggcagtagctactaagaaggacaacgtacgggtgaagtgggtacatagtgtgtatattgatcatgaagatttggtgggggtataaggcccctactcaaagcagttggtactggaaaagaatagtgagcatcaaagaggttgttaagctgattatgccacgtgatcagtttatagctacagatttcaaatttcttctgtctacaagctgattaatcaagaacaaggagattaccatgatggtaatcaggtctgtagtaggcttaatgtcccaaaacacagttttgtactttggattgcagtacacaacaagctgaacaagagataggcctctacattttcacattatagatgaagatgcatgtttactgtgcaataatgtagaggaatctgtccaacatttattttttgagtgcagattttcacaaaactgtttacagcagttgaaagattggctaggttggagagccagatctaacaatctgcaaggtattcaaagatggatcaatagagccaaaaagagtaaattcaaaaagatttttttcacttctgtgattgtagcccttgtttacaaagtatggcaagctcgaaatacttttttctggagcaaggaatgtactgatctgaatgtgctggtccaagaagctaaatgacttgtgaaaatagaattgcttgtgtaatgccaaagtgtatagaagaaagagatatagaattgtttagattgttataagatgaaatatgtatacaaaaacatgctccatgaagag

SEQ ID NO: 243310 - DNA, 8083 bp, Cannabis indica
agggggcttttactatctcggcattcactctggcgatcgcaagatcatcgtggatttgccaaacaaaacttccttcaaggacgacttcttttggacgactggcctctccccgattggcacaaccacttttcgtataattcgtaagtgattatttgtattagacttggttaaattaattcatgtcttttattctaagttatctgactgaaatttcgtttttttttcgacagctctctcgaaaagacctgcccccacccctgagatggccgagtagcacagactcttgttgacacttccctatggccttaggtcatgcgattttcttctaagcgaggttaatctgaggtctgtggatctcctaactgacaaggagtttacttgtgattacaaatatcccaagtattcttcttcgcagcaagttcccgtcccagatgaggagaaagctcaagatcgcgtggctcgagcacagtaccttcttttttccaacaaaataaagaaaaagaaaaaaaatatttctatagctagtttataaaatcaacttagaatacaattgaagaagaaaatcccaagttctaggaaatagaacttgtggttgaagtcaaccatacatgtaaattgtgacaacagtattttttatgagagagagagagagaacaccactgacataagataatcgtaatttgacgttagcaacacttttgagttaaagattatttccttcagcaagagacagagaaatttatacaaagagtatcacaaattttcacagccattcaaactcaccatgtgattttgaagaatgatatccataaaagcatcaacaactttcaagtactcatcaaagctgtcatagtgactgatgacctgaaatcattgtcattaagaatttaagacaatatatgtataagtgaagaaaaaatatatacacatatatataggcttaaacaaacaccatgggaaacaaatttttccctaaaagcaaagagaaagaggaagagcaactacatagtctaactaaatgcaagactttcacctagctacgaaagcaattattgacatgtagactctacgcaagaatcaaatcaagctcttggtaacttaatatcatttaaacaaataaaaggggagaaaaaaaaacaataagtatggttctaattacctggataattttatcaaccacagcgctggcatcttctatctgagatttactttcaccaagcctaaatccaagtaatctgtaattcaagcacttttcaccaacagacaaaaggaaatcagtgctgactgaagattgtttttgttttgttgtgtctttgttctttagaattatagagaaataatagagaattgatggtgatgaaaaaacttgataatcttattcactgaaaacaatgatacatataggctttacaagaataaaatacataaatgcaaaatatgcacaattaattctagtactttactttaaatcaagaaagaagatatatactaataaataggtcagctctactaaacggtaactacaagatttcctagttgcccatgtttttctggttgatttaagcaaagaaaagaaaaagggagagataaagattgtattagatattaaaaaaagtttacagcagattataagatatcgtccacttcaaaggagaaggagcgggggaacaactttttttacacccaaaggctccaatatctaggtaaatcattaaaagaaaatgtggtcgaatacttagtcctaaaggtccaaacaaccactgagaatataataatattctcccacagttgtatacaatctaatattgtattctgaacgaccacattatacaagttgcatgtatggtagtagtccagccttctattagaatgtgtttaccattttgttgaaaaatattaaaatttataagatcaagtacacctttgacaaatgaaacaagaccagtggacaaaacttcatgctgaagataaaagatgaaaataaaagcccagtcaaggatttcagtactgagatgattactcttttgaaaagaaagaaaaaaaatcagcttcaccaatacctgattgaaggaacaatcatagttgcattcaataagatgaaggactttcactgcactagagctaactatttcaattggaagcaccttgagtagatgatgaagaaccaccgaaacacatggaaaggctccaaacaagtcgtcttcgttctttcctagtccaagctccatgactacagtttttgcctgtctcttttagtatttcattctaaccaaacagccataagaccctgacaaactatccaacttaaaccatgtcaaaataactaatcatcatgcaacagaaactccatatcaactttctcttatgaataaaattaacatatatatatatatatataataaactcatgtgtagctaaaacagtaaagttatagctagctcccacatgcttatggagaatgacggtcttcgcagttctttgggttgtttggttagaatgaaatactagaatctttgaaggctctgaaagctcagcagaggctctttgggaaaaaatcagattctagactgcttcatgggagtacaagacaaagcattttgaaaatgtttcatatttagacttaattagagattggagagctttgttgtaagcttctttggtaaagcctcataggtacttctactgtgagggatttagtttttgtttttgttccctagggaaacaaaggtaaattgtttattcagggtagcgagtttgtcttaggtttcctagttttggtttcatgttctggaactcggtttatctttgtaaccacggtctttcttcgccacaagtgagggcttttatccatatcggggatggggctagtctaagacaaaggcctcattctctttttcaaaaaaaaaagaaaaatagctagctcccacaaggtttgattttggagtcccttttgagtacctatgtaacaattactatagttccctattcttcaaatattatagggtgggcaagggacctagtttcagtttagaaaaatgatggaagtgctaaaatcaaaatggcaatgctatatgttatccatatttacggatgaggacacgtgtaattcccaaagccggttacaactcaattacttcaaagccaatagcaagaccaactaagataatgggccatatccattagcaaagtcaactcttccggatgatggcgaaacgactcgtccaggcaagataatcggccagcgcagcgagaatttgaaagacatcaattggagcgtccctaggatcacgtccgagaatcacatcttttcaatatggaaagatagtaattgacgatcaagcatttaatgtgtctttattatccacgaaaacaggacacggttttgacaactatcaatatgatgtggcatccacatcagcatacagtcagcgcctcatgggccgggctccaccagatgggctcaagtcaataatattatttgtatttaccctatcagtgggcaaagtaaaaacgaataagagccctagcactataaatataagaggacccattcaaacaaagggttggaatctcactcctcaattgctcaggcaaaatctagggttcaaacacttgtataaatcataaggcttttccagtttaatcgtaataatattaactcgtggactaaagcttgttaacgccccaaccacataaaaactctagtgttattttctttattattcaacaatttctttagctttcacatatattttattggtttctgaaaatctcagcaaacactatatatgattgagaatgaaatatcacattaagttccaacaactagtgatttaagtagttacaacaaactaggcttttaaggtttgcatatggtgtcacatatcagatagtatacacaataagaacaattgcatttagatccctcccacggaaactgtttaaggtaaaataaattcactatataacatacctcagaggcatccttaaatatgcattgcatgataaactcaatagttggttccatcagagtgacaagcaatctcatattgcttttcaaatttccctctgcacctccctttgctaatatcatccgcgagtacatcgttttgatgtcattaacactattaactagaaatactgttacataattgttaggtgacaccatgttaaattcttgctataaatttttgatgttatgcagaatgcatttatctatgcaatagttacaaaagggtacaaataaataaacagctttgcaataaagtcacacttgatcaggatctctaagaaacatgttttcttagatctaccaatgcccttcatctttttgtcttccttattttcttgttatcctctcttcccctatttcctagcacctataaattaaattaaatcacttttcacattcataaagcatgggttgtttaccaatgtcataggagggcaacttccgcaaactataagtcatatataaacgacaatacgaagatgccagtggatctgctaaccctcgtgtcatcattaccaagcgttggaggcaatttgcatgattgttatgcagaaaacgtcggcaaggcaatattgctagctccaagtagctgaaacagaacatattaaaaaagagggttccaaaatctaagaattacctttaaacgacacatttatacatacatatatacgtatacagatgaacataaagtacaataatatatatatgtatgaataccaaaaaaaaatgataaattaaataaaactagtctagaagtaactttaaacgacctaaattagtaagatcataatttttaacaaatgttgcatgacaacctacaaatgtattagccataagtaaaaattatcctaaacaaatcatttattggagtatggggggaagggaatagattttattcatttgctaatggtatagaaccatgaatagatcatagattccatagtcattactaaggaacttacatgcgtggaagtagctctttgatggcaccaattttgcaaaaccaattatagcaagtttctttggcctcagagcaaatatcacttgtttcaaagttttctaacataaatcacaaagaagttttagaaagagggaacaaaaaaagaagcacaaaacagttacacagtaatggagccaacgttcttgtcaaaacctaaaaattataaatgaaacaatggtgagaaaaggaaaaacaagacaaggaggaaagaagtgtagaagatatgagcatgaagacaatcacttcatcttttccgtaatgtcataagataggacacaaattaattacagggtattatagttttattttatttttattttgaagcatttgctacataagctgaaacacaacacaatgaagaagtgtaatctataggttgatcattgtttttaaatgtatagcagagtgcctacaaatgatagtgttctaagtcagtgaaaacctatttgttagtcaagaagtaacactatccaagcatgaggataagatttgcaaattgaaatgaagctaagatctcacaagcactgattagtttgagcacatgcataaggatgaacgtgagaaacaaaatacatgacctatctctaattgtctgtatactaaactatcaaaggctacactaacttggctagagaaagacaaacagctgacaagaacaagtccaaatagaacaaacagctgacgagaacaagtccaaatagaaagacctggtagagagtataatttggttccatcttctgaaaattcagcttttcgcttgatgcgctcccacactaaatccccaagcatgtccataatttctgtagcaagaacaaatacagtaccataaaattgtgatactgatgtatccgacaagagcctagcaacctgcaaagccaagaaatggttccaaatataattaacacgtacacataggaggttatcattgctaaacttgatgttcctagaaagaaattgaagtttcgtgagtaatctcatgcatctatgctcaaactaaatcttagtgaagaaaacaaataaacttaagtgcaccatatagatgaccagaactgatatcttcattgtatatttcaggagcctacttaaaggcattgttataaaacttcccacataaagcaacaaattcattagtttctatatagatagatatatatttatatatacaaaagatagaaactataattacgtattagatagaaataaaaaattacaaatgccaatatgataccatctcatattacagccaaagatgttaatctctgattaacaacttacttagtgttaatataaaaagttcacaaagaaacacaattttgcaaagtaacctttatagacaactttaaagatgtgacacgatcgccagcatgccaagcacggacaatctcatccttgagttcatgtagagaggagacatattcctgccgtgtaagagttctagccccctcttccatgaacttttgtgggtcttccaactcctccaaatgtttacttgtcgaagatttctcgaatgctgcaaaggggcactattaagtgactgcagcaggtataccttctctaaaataaggtttgtaaaaagaaaatttatggcacttattcttccaattgacaaaatgtaacttccaaagcagaagaaaggatagtgttaagagatagattggcatacttgtttcaccacctttaattattgcatcagacatctgcaattgaaggggaaaaagatgaaatactagacaattagtcgaagagattagacactattaaaaagctctagcaattttaagtacttcaaatttacaaataaatgtatgtatgtattaaaaaatgttctcaaagcttaagctacattgtaaattaattaagcttattattagcttgaagacacaaacagaacaaagaactattagactacaagataaacacactgctcaaataaagaaaaggaaaaacgcttacagaagaaactgaaaccattttagagactggaaatctttgcatcaaaaatctcttgaaagagatccattctttatcagggttttgcatagaagcttcattagtaagtttaacagtagaattagtatcagattcttgtaaaacatccacagagactgctccattgtcatccaaagctctcaaaggatcgtagaagttgttgcttccattgtccacagcaacaatctacaaagattttcccaaacattgtcaataatttcaaattccttatttatgttatacatacatgatttcgatttctagatagcacaaaagcaattaaaaaaaacatacaggtactcaagcaatactctctagcttggatgtgataattgatcatgtttaaatatatatatattgtgagaaaatatgaaaattcagatatgaggacattttcacgacactatcttagcagaaaacagataattaatgttgaaaattgaagaatttttcagcaaggacctggagttgagactgagacgatggagctaatagaggatgaatgtcggtacgtgtacgatgtagcgcgtgggtgatacggtcggcggagtaatttcgaggtctgaactccatggaagcctcactctgctctgccacaactccgtatcttcttcttccttgtgcgctccgcaagaagaaaaagaaaaggttattttttttctctttgcatcaatgggatgttgagttttgcctccttaatttttgtttgttgcaaaaatatctcttattatagaaattattacaaatattctcctataattgtattttgttcaattctcgtagatatagcattaatgaaaattaatctaacctacttcaaaagtctacaagatataaatgtataaatttgtgcattgagctactgtatatttaatagggaaatttcactattaatatctaataaaatatttcatatcaaaatttagacccctttcttctttttttttttttttgttacaaactgattctattattttaaaagtttcctaaaataaactttcctctctctgattttccctctctctctttgcctttctctcttcacgaaccacgcgaccacgaaccaccatcgacccaacctt

SEQ ID NO: 243311 - DNA, 2412 bp, Cannabis indica
aatgtaaaaataaaagaggacaatataaaaagggtatagagtgtaatttcctcatttaaaattaactgtaatattttggtagttttttttttctttccatatttttaaaaattgaaatttaattaatgtattatatttttataaatttccttagcttgtttcaccatcattgatacttacacaactcacatagaaacaaggtaagaccgtctctcttgaaaaaaaaaataagaaaaataatatatatacattttaattagttataataaaaactaattaatttttgataaatcccaatcattttcttcttaccataatattttaacactgctgtgaaacatttaaagtaacaaaaacactacactgtacagtctgtttgtgtttacagttacaaaattacaaacgcaattataactatctgaatcaacagggcatgaacagagactctatgaactgttactgtactatgcgacacatcagttgagtcaatctgagtagtaaacatatgttgaaccgttctacccgaaccaggtttaggcatatcacaaagaccaataccagaattaaaagatgaatccaaataatcatcattcacaccattattcccactaaaacagagccctgtgttgttataaagccttagcttttttctcattctccaaaccatttctctcccaaatggaacttccccacttagccaattgtcatttaatctcagctcacttatacttttaagctctttaaaactctttggaatcgaaccgttgaaatagttcccatcaagatgaagtactcgaagatttggtaagtgaccaattgaaactgggattttaccacccaaattcatgtttgatagaatcaacacagttaaactcttcattccttcaaacgcatttccgggaatcgtttctgattccattgaattgccttttaggatcaaagcttggagagaatctaaactcttgagtgagtcgggtacgggtcgacccgatagaagattgtagcttaaatctaaaagagtaagttctttcaagctatttatcgagtcgggtattgaacccgttaatcgatttcggctaaaatcgatcttaatcaacgaatgacaagttgttatccctaatggaatcgaacccactagaagattttggctcaaatcgattatactcaaaagagggaaactgaaattgggtatcaaaccggttaatctattcccactcaaatctaacgaccataaacccgtgacccgatttaaagaacccggaatcgacccgtttaagttgtttttatgaagatcaagaactcttaaccgggtcaagttacccaattcaattgggatttgaccaacgtgcccgttttctctgagcaccaaggtctgaagagttgaacccaattgacccaaaaacgagggaatgggttgaggattattggtcaaacaacggtagaagaaaagggttcgaaggtgtggaagtttagtaatggaattcgagatatatgatcgggtcgggtcacaggtcggaaaagccgtatcatccgataaggctccgaaagacaaggaaacgacgtgaaagacattgtctttgtcaggcatgcactcaatgccgtgccaccggccacggcagacgtcgggtatttcagtggcccagtcgttgccggtagctctcatgatgtcgtaaactgcttcttgctctttcgggtcggttcgggctccgtcgttggtgttcatggaaaacccggtttggggtccgtctattaaggcagatggtacacctgagtcggacattatgactgtgaatggttttgaaagtggaagaaatgaaaggagaaagagaaagagggagagatacgtttgtttggatgttgagaaaatttgagccattattgattttggaagagaaagtgaaagagtgagtgagtgagagtgaggagacaatgaattgaggtgtgtgtatatatatatatatatttatatggttggtgaagagaattgtaagtaataaattagttcacgagaaatggaggaagagtttgcaattaatgtttatatgcattaatgtgttcacgggatttatattttatactatactccatcttaggctatgtttggtaggatggatggaaattaggggaaaagaaatgatagaaatgatggataggaaagtaattctcttctatattgtttgatgtgaaattgaaaatatagaatgtaaattaattactaaaattataatgctatactttctaatatagtaatttattatatttttaagaaaatatgattatatgtatatatatttttttgtctttttcttaaattctcccattttaggaaggattaaacattttgagtttggagtgaattcctttcccaaaatccaattacatatataactaaaatgtgattttaattgattc

SEQ ID NO: 243312 - DNA, 2711 bp, Cannabis indica
gagaaaattcttggtcctggccgatagacccttaggcgaaggtccagagcgaatgggctccgactgatgtgcttttggcacggctaacttctcaccaaggagcaacccccgaggactcacccgcagcacgagaccatcgacgccccgcaagaacatcattcgcaatatctacagtagcctcttctaccgctgcatctccctcacgctcctgtgaaagagcatggttggacccagcgtcgtcctcagccacctcttccacctcacatggaatacaacctgtctgccttcagcttgtcacctgcccgaatcaacccacttttatgaggtgaggtaaggttagaaggtgatggcaaatcttcttgtcatagtctgccctgaaaaccttcagcaagccaaagaaatgcgcctctttgtaaaggagggggggggggacatgccgctacaaaagacaaaaacagggggttaaaaggacattgtgagaagctcaatgttagacaattgatgaggatacaagtcgaggaatcacttactgggcatccgaaaaacctcctgtactccatcttgctttgacacaaagaagaagttctctttccattgcttcctcgcattagagagggcgcccactaccgacgcatcagaaggaactttcttatgaaagtaatagcaacccctaaacgaggagttgtgttggaaactgtataagtaatgcacctttctcaatgtgggagccctgccagtggcctccttgaaggctgtgaagaagcaggtcaatatgatccacccattgggcatcaactaaaggggagctatgccaaagtaatccaaaacctctacaagaaaagggtggagcagccaggccacactcgccttgagaatagactcactgaaagccaccatgttcacgggtggaaagttggcacagtccttcgataaaggttcaaaacctcgctccacagcaattcgttggctatcctcttaatgttggattatgttattgtactcttgacatcacccatcccatacaggagtgatgggttgcgagtgggaagaggcgcgctaggcttgctcgattgcatggtttgtccatatctacaaaagcgcaaggaaagttagaatgagacacagtgcacttcatgcctttcatctaacgggcaagagcctttcggctcgacttaggcctagttggaacttcgccctttacccgatagatgggtggcacccacgctcaagggtatgggtgaataactgaggaagatggctcaggcggaaacatgcgatctaagtgagaaaggttacccacaatgtcagcattaagctgcttgagctgggaaagacgggcatacatgtggacatgcccttgattctccaaaagctcaatctctcttttaagtctagccaaatgttcttgggatttggtaattgcttccaagcactttagaggctcagacatcgattggtaatatcacgcccaaggatctagaccttcctcgtctgaattagactaaagctcaatagaaagaactccctcgtggacataaggtgatctatgattttccataagtaggaggaggaaagaaaaatgctctagtggggaactaactactagcaagactcggatgcaggctatataagataaataagtaaccgcaagcgtagcaaaaatatagatataagaaacgaaacaaggtgtgtgggttgagaaggtacttgtcggaataaatgtaggtaaaggtaagcctgttgcgtcaaaattcacaaagagaataggcattgaaagcctaaggacgtaagtagagctcagaggaaataaaaactagaaggtggaagtgaatataaaaggatgaaggtgaagccaagctatgaaagaagagagtgctatttataggagataggatgattcgtcaccgcaggatcaaaataagatcaacgattaagatcaaacacgcatggccatgaaagatcacatgtgcccacctaacttattgaagaatcccatcaatgtggttgtgcgttattctagccataacaccgggtgaggcacactgcaaaaatggggaaggcagttcacttaaagttaaaaagatcacttaaaagtaatcttttggactgtgggcaagtgttaaccacaaaaatagaagaagtaaaatgtttctttaaatagcaaacagagaggtgaataacacaagatattctatgcaaacaagaaaggacaaaatgcggcccccgcctcctttatttttgaatattttttagctaaattgaattatctcttggaagcatccacacctgcggaccccatgctcacaccctacctgcacggcaacgcccgcatccgtgcccacgcccgcgtctgcacccactcgcccacatccgtgcccactcgcccgcacctgcgctcgcccgcactcgtctgcgcccactttctcgtggccccgcgcctgctcgctcgctatcacctgtactcgctcctactcgcccgtgcctgcacccgttctacccattggccctgcttgtcctattcactcgtgcctgctttccccgctcgcccgtgccccgtccgcactcgctcactcgtgcctgcgcctctgcgtctgcttgccacacttccccatactttcatccagacgcagtgccggtgccagcggcttttacactctgccgatccacctttttatcctgacaccaactgatctaatgagaagatgtcagga

SEQ ID NO: 243313 - DNA, 2525 bp, Cannabis indica
gacataacacttatccaaggtatgagtataccttatcgccgatgatcatgtcagtttaaatccagttaactgacaaatcatgagaattaaacttttaaacatataatcatgagtatattccactatgttgacgacactataatcatgaacaaatatatatatttatatatattctggacttaataaaatttatatattaaaaataatcatgaaataaatcatgtgaaccatgcaacataaaatgatttatgatctttcattaattagtaaattttattatattgaaatgggttttctttagggaaaaaacccaacagaactccgctgtttcacttgaaagggagcgccacctggaaagaactctgcacgaataacgagtaggcactgaattagatcccccaattccttttgcatgcaaaagacgacaagaaaagaaaaaaataaagttgtagagaaaaaatgaagctttgagtagaacaaataaaaattaataatatcgccacagacgattttatttcaaaaaggagaaagggctccacaaatcaacaactggaagaagttatagtagatcctatggctagggaaacaaggggtcccacacgttgcctctgggacacacaaaaatgtcaaggtcctttttctcacgtcatttggctgccagaaacacttcttatttcttgctaagcacgctctgacatacataaagaggagtagaaaacactccttgacagaccgcatggttaccacgcgaagggaaataagtatcataagtatcctttgaagaatacagctcatttgaggaggtttccatgactgcaagattgcagcacgtgtttgcaatcaacatcctagacaatagcaagctcccatgacccaaagaatctcaaaagcttgggggtaaatgttatccaagtttctttcgattagacatgtggcaataccgaaatgggaacatggtttccacacgaggcatctaggagaattaaaagatataactcctacacttggaaggagataagaggtaacgaatctcgggagcagcatcctcaactaaggaacctgaaaagtggtgtaggttcctcacaaatttaatctggattgaatgagtcgccctacattttagggataagttgaagaatatctcttttttgtattcattaatcaaacatactcttatattatatttcattaaaatctacctttgtgagtggattgcccaatatacattgctaaatgcgaatagggaggcaccagagtaagcgatacgtatcaactgtaaaagtccttagcttgcaataagcaaactaagtgaaaaagacagatcggctcaaagaacaagtaagcgaggtgaccatcttgctatgggaagacttcctatagcttcatccatctaataggagcgaggcttataaccccggcgagtcagaagaattctttgtaaataactgcgatcgacacaagacatacatcgtcgacctcggaaggaagaatggtctcagctcaatattgggatcactataatcaagcaactgacgagacatctctagattcaacaattaaagacgtgtttaatacacgatatttttgaccaagtaaaagcgggaaaatcacagctatgcgattttcaaatcgtaaaccgcatttacactatataataattaatcaaatcccacgatttgagggatggttgctgtaaatatattctggtcaactttgtaattaactttctactatgtaattataaatagtggcatataagctcaaaaaaagggacgaaaaaacttatatgaaagaggccttgaaaaaatactcagaaatctgaataagattgacttgtagactatgcagaattttaactgcaaaaccacgtaaaaacccttgtgttcaaatattattttttctatagcttttatttttttctgtgtggaattattaccgtgaggctcaaatttagttaacaaaaatcttctttaacagtttggtgctttcattgagagcctctgtgaaaaagctcagaaaaaacaaaaacctccacattctcttaaagaaaaaccttctccctcatggctaaaaatctagaaaatattaacaccccacatgaggaaactaaccattgttctggataagagcccatgggctccaaaagatctaccaatccgcagtccaaaagggccacccgttccaagagggctcaacctgagggtggccccagtgctcggaccacacgtccccaaaaaactcaacccgacgttggtcctagtacgcggacaacacgctcgaggagaactcagcgtgggaatggtcagaatcccgggggcgagggatgaggagctcaatcttggaggtgtcgaatctgtgggagaaagaacttatgaaatggaaattcgccgcctaaaacgccgtctggaagaagaggcgcaacgtcgaaacactgggttagagcgtgaggcagcctaggccaaggcgtcgcaggggacgaatgctcaaaatcaacctaaacctagagtgagaagaccacgaggtag

SEQ ID NO: 243314 - DNA, 4586 bp, Cannabis indica
ttttgtaaaattcccataattttcaattggatttgattgggctcatatatcccgcaatattaatgttacggcccataaattggctaaacatactcttacaatctaatctaatctaatttgaagaggtttctgcactaattgtggatgtcttcataaaaatatcttgagttaattcatattacttgaataaaaaaattaaaaattttgcctccttataaaaaaaccatagaattttttagctaaaatacataaaatagaaataattacacaatttttcaattttctagtggttaatttgtcataaaaaccttgtgaattagtaactgaaataaaatcagagctcaaaaacatggtttccaacaacaaaagactcaatacataaactcatcatcatcatcatcatctcacaaattgaaatgggtttatatatgtaaagccattaatttcatgtttggccaaaacaagaattgaattaaataagggggggtctcctttaatcagtatggtctaaaatagggcccccatgcaagattattctcaactaagaaaaacaacaaacaagagtgaaatgttgcaacctataatggtgatgactaatgagccagaatgagcaaattataatatgcacagttgaaaaacaagacacagaaagaaagataccaaatggggctgaaaacacctactcttgaatggagtagtagtagtagatatgagaatgctgatactaatttaacctcccaactgtagctttcttttttttttaacagaacaaaaaagggcagaagattaaaagggaaaaaaaacaggtaaagtaaaatgagaacaatagcaaaaaacaaacttaagattggcacaaaaaccacaacagtatttcccttgattctttagtatcaaacctctcagatcttaagttgttccaggaactgtgctgtgaccgtcttcgattctactaaatcattcattactacaggtttgctcctcgcttcgtctgtttgagtaggtgattgattatgcagtgtaggattcggggcaggggatgatgctggatggtcttttttcgaaactgcaggttgatcttcttttggcattggtagaggatcgttttttctaactagaggaacgaaatttcgaacaggtggggtggcaaatactggcacagcttgtctgatatttacaggaggaacgattcgtacaggaggtgctcgcataacctggtgtgatattgcagtaggtggaggaagtgggggagcagagaacacaggtacggcggttcttattgttacgggtggtgctatgccatggcaagaagtcctcatttggcggatggggacataaggtgctgctcctacagcagggaacttcagaggacggcacccacggctttcaggtggaagagcctgtggttgtaacatatgactgtcgttaagtaaactaggatagggtctgtgccgagaagctgccttttgacaaattaaggggagtattttcgatgtggttgctgggggaggttgtggacttgttggccttgtgtgctgaattggaaacttctttggaaatggtattggtgcattaggattcgccattttttccttcaaccgataattcgacaatgctcgagctattgtgatctgctccaactcatcgctgctttctggttcagatgaagaacttgctgtttctttcgccactgcccaaacagaaaagatttcaatcaaatttaaccacacaattaaatttaagttaacgcatttgatacttgaaagcctttaaatcttaatgatactcacattgttttaaagatgaccaggctgccattgccgcattcttctctgcttgttttttattcttagctggttctcctgtaaaaatgatccctgctaattcaactgtccctgtaaaaactggcaggtgcccgagacccgaacggtatgtcgtatattggggcaacggagctccaactctttgagctatttcctgtaacaggtttttgtaaaccccagtctcatcctaatagaacaaatccataatcagtaatcaaaaagatatgaaaataaaccagaacaaatgccactcaaagggagtttggcaaagacattcacacagttactacatttcctgaaatagcaacttgtaattgaatgaaaaacatttatggttatttatgaaatttactagatcattaactcaccattgaacaattgggtttaattaaagataataaaggaaatgaaaaaccagaattatatcacaaacgcgtaatatttaaggtaaataataacatttcaaatcaccaaagattattatcaatacattactctgtgaaatggtcaaccagaaaaaaataaggcaacttcccagtaaagcttgaccaaatttcttatgactcaaaagtaccctttactctcaatcaatttattaccataataaacatattcagagttgtaaggacagctcatagaaagatttgaaagagaaaaacaatgaaaaaacccaaactggtttctcacttgaatcatttcattactaaattactttttttttcaactatctgagaacaagggcattttggtcattccatagataaagttgtcgttgccggagatctaaatctaccggcgatcagtcaagcttaataataataataataatttaattgaatggaaaaataataataataataataataattgttaattaatttcaaatttctttacttttcatgtaatggaatgaaatgaagccattgatttgatcattaaagaaatctaataaagatcaaatccaaaaccctaacgaaaccctaacggaagttttgaggaagaaaaataacaagagagagagaactgaccagaatcctagcggcgagagagtgagaagggccacggctagatagagagttaagagcaacttcggcggcggagtgttcagcctgacggagagttgaacaatagtgagggctttcaaaggtctcaccgttaaagttaacggtagctttgaatctcggcgcatggtctggaccttctctaatacatgtataagaaggtaggttaaagcagctcctttgagctagctcttgaagctggtttttatacattttcgtatatactccgattcttctctctctcaaaaccctaattcaagtttcactacacaacacactcaccttcctcttcttcaagaaagtgggtttccagggaaccccagatcggatcatatgggtctactcaaagtcaaactccagccggagataatggcggtgaagaggactatcactaccactccgaccaccaagatcaagggttttggtttttctagggtttgtttcagaaaagaaaaaaagtttttttggtagagagaagaagatgaagttgggaaatgaaaatgaaagagaagaagtaaaaaaataataataataataaataaaaataattagtaatgggagaaattatttatttttatgattatttttttggggaagaaaaaaaataataataaaaaaataattaatttaaaaataaaaatggaaaataaagtattattatattaattaattttttgttgctgagagtcaacttaacgttataggccacactgcatggatgtgatctttcttttctaaatttttgttttttatttttatttttatttttaaatttaatttaatttattattattattaatttctgtttaccaacgccaactctctctttcccgcccccacttttcttcatgctattttatttattttttatataattattagtaagttaaaaagataattaaattatttggtattttagatgtttagataattataatttcaaaagaaattcttaagttaattttttattacaatttcttgattaatttttgtatttagaaatacatatcgaaatatttatttttattgcagtgttcgttatagttacaacattatttttgtaaatttttaaatagtttacattgccaaaaatagatttgaagttttttaaacacgagtggtaaacttgaatataaggaacttagttttcagttgctacaaagtatttggaattttttagaaatttataaggataatgttgtaactataacgaatattgctatgaaaaaaatattctcgcatgtgattttgggcatgaaggtttactaaaaagttgtaacatgaagttgtaacaatcactgaaatgataaaataaatgaaatcttatttattgattttattttttaaaagaacaaaagcataataattataattaattaggagctaaatgtcaagagaaatactaactgtgtaagtaaataattaattaaatagcttaaacaaaagaaaaatctatttattaaatttattttattttaagaacaaaagcatagtaatcatagttaataaggagaaaattttgaatgaaagcactcacattatatgctctaaaataaagaagttttattagacgatcagcaaatcgcgtcgcttactttgttgctaggcgctcccgatttttctctgatcgtagcattcataggaatgatattcctaatgagcttcatgctctcttgtatgatgaatgctaaatttcaataaagtg

SEQ ID NO: 243315 - DNA, 2772 bp, Cannabis indica
aaagaaagatgagccacgtcctgatgtgaggctataagacccacttctgggaggttatctgttgtcataagtttctctacatgaaactccttggatgagaaggactggcagaaatttatcatctcttctaactctggagtcagaggcaactggggaagtagtttagaaaatacaaaaaacaagaaattagtatatatcaaacagaaggaaaaatagaatctcaaaataaaaaggagggaacaaaacttacttgcaatattaaaatctaaacatagggtatgaactctcttcggtgggaagccagggtaaagaagtagtagtccctaaagtcgtggatacactttgtggaactggtggggtagggaatactcctggtgtatcactccaacttgtagaagcccaccttctccatgtggcccctcattggttgggacatgatcatgtaaaagtacaagatctcctccagcatcggcacagattttccatgtttcacataaaagaggtcccaccttgacagcaagcactacacctaaggaataagcaggaaaggtgctattccggctacagcatataactctacaaaatagcacctcaagggtaggtgttcccccatttaaatgtgagcccaactccaaacaccgaagcatccttctgcgcacttgttgggcctctccccgagtacagagagcctattccagaacaattttagaacacttttgagtcctcgtagggtctcatacttcctcaagttattgtagttcttaaacatattgatgtgctggtccaattcccatggactgtcgttcaggaccaactttggagcatcttctcactccattgcttaagcatagtttttgtacaaaaagaagaaaatccaagaagttatccactctaacaacctagcatagaaagggagttgggggtcctcccccaaaaacttcttagagaggtcccaactagactaaatatctagttttgagaacttccaagaggtactagttccaaataggaagtcaaaaatgagacaggaagagagatgacagaaatcaacatcaaacccccaacgagacgaattttgggtgaaaagaagagtttaccaacacttctgtcacaaatcgatcaactctagaaatttgtgagaaaaatattcgaaagataatgtggttcgtgatgattaaatctacctaaaatgatgatcacacaaaaaaaaccgtaatctcatcccagaacagagcatccaaacataatttaaagcgatgaattcaaaaaatacaacccatggacaaagagacaacatacctaatattgataatggagatgtttggcttatcgtcgtgggatctgcctgaggaagttgatcgcaccaatcacgaaggcaagatgcaagggcgatcaacgaattgattttggaatttaaatttaggctagcaggttcttctactacaactgtcctaattactagagagggaagacataggaactctcgtgccctaatccttagcagcagacagaggcaaaaatccatagtgttttctaggttaaagaagaaggctctgattcaaatttggtttgtagttctagggatcgcaagaaaatttgtaaaccattaagggtcaaaaattttgaaaaaagaaggaaaagtggtaactggaagttaccaagtttatttatacccaaaaaggtgatccacgtgaagaggagatatacgaccatgatcttctccccaaaagcacaatgtccatccaacgattagggtctccaacaatctatgtgtatcctagcatataatgcacgccataatcaaggtatgaactagtgatgaaaatgcacctttttcagtttttgcaccaaaaattgaacaactgtcacaatattgcaaatttggaagatgactcctcgatggtcgcgacttgtcacacacacacgcgactgacatgtggacacatcatcatcatatacgaaagccaacttctgcggtcgaatgtcaattaaaatgtcactattttattctttaatttgcacatgtccaaattaagatagtgatgcaagcttcaaccatagcattctggaagcttggggggtaaatgttatccgcacttctggaattggacacgtggactccagatcagcattcaagacccatcagtgggatcctcattaaaggcaaatgggtcgagcccatttggatgttaccttcgaggaacatgttatggttccacactcgcaaagtcttctacctttaacaaattgtgcctggagaacatgtctggtactatgataccggagaggcaagacagcacgttcctagaagactcttccagtttccctttatatgcatgcacacaaataaggaaactccaattattagatcataatagtgcatcatatcaaaatcaaagggtaaacttctcacaccaaacattatgcaactatttcagattaattgaccacaatcagtgtacacggtgtcgacccaatcaacccaaatcgaatccacctattcagcagatcatcttctccttgggctagccttcatgagaaagcccacgagtattgtttactgtaagctctccagtagaggcaaatgggaaacctaatgtaattctcaaactattataaataccccattaatctcatggattaaggaaaaaaaaaactttcttgtaaattttgtttaggcaaacttgagaacatacatcgtatgaatttcctaaggcatttacaagcaacagattattgaataatactgacttgtggactaaggctagttaa

SEQ ID NO: 243316 - DNA, 2433 bp, Cannabis indica
tatatatatatgtagctctgaatattgactgtccaattctaagagtggtagtccatatatatataggagacttatgggatatatattgctatatattctatatataaagtggatgcagatgtatgtgtgctcatatttgtgaaattaataaataatattatatatattaatgtttataaggtgataataaagtgatctcatcatggctatgttccatgctgatttggtaaaacagagaaaattttaataaaatgatggacaaagaaaataagacaaaacgacaaacctatctatctatctataaagaataataataaaggaaatgaatagggcatataaattagctacgtacataatattagataggtggcactagcttgccatggatgatacgtaccggccggcataataagtcaatttaataccattgtgttttttgtagtagcaacaaaaacaaataccaaaaacacatttatatatgtatagcaaatattattaattatctgagatttttatatatgatatgaggacgtgtaaagtcttaatttggtcttatgcatgaaccttgccattgattcacttctcattattatgttgtcatttgtattaggaatcgaaatgaaaagtaagttcacatttgattcattaataatttgaagattaataattaacgaattgaaagtgaaataaatcaaatggagtagttataataagttaagaaagacgataatcgagcaaattaaatttgaagattacattcgaaagtgatagttgtgttttgttttcttaaaatatatacacatgaagttttcaagtagatcacaatacataaagtcaaatcaaaaatgaaaaacttgagttgcaaaatgtttactgtaaagctttacttgttgagttgcaaaaatgtttactgtacgtaaagatttgttaccaacatatcgataagtgagtttaataaagttaaattttccatttagaaaaaaaaacttgatttatgaaaaaaaaaaatgtaggaatagagatcaaaattattgatcaaattaagaatttataatttaggacggccgcaaatttttaaagttataattattatatttatgtatcatgtgtatccatccaaaaactttatatctatatataatagcttttatatatgaataatgataatgcttttaatcctgaaaataataagtggttacaacttttttttcataatcatattatatatagtagccatgaattaattgactaaaatgtaggcgcactttagccatgggaattgataatattggtttttttattccttaacctcaaaaatggtttgtggttttataataaaagttcttatatagagaaaagccacgtgcatatatgtggcttcattattattggaagttgattaataaaatttttgatgaataaggcgtggatattaaattttagtataaatttccaaattaaataagttaatttgaaactacttttttggactcataaattacaagccaagagcaagaagctcaaagcaagctgactaaaaacccatataataaataaccaaaaacaaaatatttatatatagtactatatagatttatataaatatactataaaattagcgtggctctattatctccccaaatgtgcactccctcatacgattcttgatccagaatttctttaagatatttacatactaactatggtataccactaattttttttttcgatttgatgatattaatagtgtctttctttgaactccattactagtttgatcggtcttggtcttggtagttagctgcgatgtcaaatcacatgtcaattgatatttgactaatatatattaccaatatattactataattgagagaactaaggaaagatggagaatatgtgaaagaatgaaacaaattaattgatgaatattttaatttattagttggtaaagaggataaagatcaccgggatgatcatgaattatttatatatttatgagattattgtcttctctttttgttatattatactatataaatggtcatatatgattaatgcattattaaaagaaaatctctatcattttgttataaaaaagaattactagtttaagtgtgtatttgtaactctttcttctttgatctctctcactaattaaaaaaagtgattcgaccaattcatgaatcaatatgtatttgactagctatagctatttatattaggggttgtttttttttcttttgtgttttttggtttttgttattttaatttagaatattagcgatacaataattttattatttttaacacttaattgtacttaattacataaactccgttgagtttgcatgaaaatatatagtatcaattattttttaaatattcttttaataaattcaaaacttaaaattagttataaatttaacactatat

SEQ ID NO: 243317 - DNA, 5765 bp, Cannabis indica
ggtttccttctttgtaatttctcaacttgaaatgcatttttcattttatatgtctaaactaatgatttaatcacaaaattctaactattttagaatgaaacgtacttgctatatatatgattatgacatatcatcactcattttggttagtaaaataatgttacatttcaaaattgttatcatcagtaagttctgtttatatgtatcttaagtttggtgtacaccaaccgcttaagaaatttactatattttggatatgtcatcagcttgtactttcactttatttttaactgagtttagtgttgtcttcttctaagatatgagtctaaacatacaaacatgggaggcatcatggagaagcatggttcaagccttcttggccctttatataaggatcctataacaagttatagcctcttccagaagttctctgctcagcaccctgaggtaaatttgaagttttatttatctaagccttatgctgatgagagtgtttgttttacttttcagaaagaaaaaacaacgaaaaatactaattgtcttaacttaaaaatggttggtaggcttattggtctattgttctgaaagagctttcagtttcattccaagaagaaccaaaatgcattctagacagatctgatcttaaatcgaagcatggcggatcatggcttcctggctcagttttgaacattgctgaatgttgtttgctgcctactgcatatccaagaaaagatgatgatagtttggctattgtatggagagatgaaggttgtgatgattctggtataaacataattacactaaagcaactccgggagcaagtaatgtatgctctcacttccttaaccttggttcaggtcttgttaaatggaagaaatcattgatatttgagttgctatgaacatatgtttcgctctacttctcatgactttgatcaattttgagtctcaggattctatttttaagagtaaaacacttacactaactcatcttgatggtgatgatttcctttgatggtgtttctatgatgttattcgcagctcggttgccaaggcgcttgatgccatgttttccaagggcgatgcaattgcaatagacatgccaatgacagctaatgcagttataatatacttagcaattatattatcaggtcttgttgttgtatcaatagctgacagctttgctccaaaggaaatttcaattcgattgcgtgtctcacaagccaaggctatctttacccaggtcaatatttttccttcagaagtttactttaacatttagaaaactaactccaatgaaagataatcccacttctccaagaaaagtctatctgcaaatatgacattagtttagcagccttagtttcattacagcataatgaaaagagaaacagataatgctgctgaaaataccacctattgtaatagcatccgaatgagtcacacacatataacaggtgtaatagtttagttttatcgtaatttggcaatgccatgatattttctgcatttgtttcaaactagttgagactgtagagttcaatccagcccaatcatatagtcatacaaaaatcaatttttcatcatagtaagtgatcaagcattggagaagcttttatttggcctgtatcatgctttcagttacagattatttttagttctttttatgcacagtatttgttttcttaaacaaaaattaaatttcaggatttcatactaagaggcagtcgaaagtttcctctatacaggtaagacaaactttgaatgtgccagaacttagctctttcttctgtacttaaaagtttaggtggtggagatacaaatacttgtgctaatagaattcaagaacagagagacaaaaaggtagtttaattggaaaaaaatttaaacaaagatatatatgaatgaagacaatggttctaaccttcaatgcacttcatgcaattttgcaaaacactaccagtaatctacagtttgtcttagctactaaacaaatgatcaaacaattccaaaagaaaaggactactgaaaaaaatgttttctgatattgggttagtgattcttgtaatttactcattgcagtcgagttgtggaagctgcaccagataaagttattgtcctccctgcaattgggagcaatgtaggcattcagctaagagaacaggatatgtcatggggagacttcctctccagtgttggcactcgttcaaggtaataacgcaaatgaaagattcattatttattttaggaaaaattggaggataagtcccaaaaacttcaacttgatccggataagttcccaacttcgaaaattgatggtaatagtccccaagctcactatttttgtaagttcattagtctttttctatcagatccgtttactaattaaaaatgacacatgtcgataattattagtccaaaccatatttttaatttaaaaaaataatttataaaataaaaaaaaaaactaaacaaattattttagttttatttcttcttcttcttattgctgctaagaatccacccagtttgggaactattaccgctaatttttcgagattagagacttatctgcatcaagttgaaatttttgaggacttatgacgcaatttttccttcattttattagaacatttaaatgatgttacccaaacatatcctagattacatttaaagtttttcatgctgtcatgtttccctttgattgcagaaattactcgccatgctatcaaccagttgacactttgatcaatatactattttcatctggaacaactggtaaataattttttttcaaggatcataattagtgctaactaacacacagttaacaggaattccattacttatttttcatgttcatcaggagaaccaaaagctattccatggacgcaactttctcccattaggtgtgcagcggagtcatgggctcatatggatatgcaagttggagatgttttctgttggcctacaaatttaggatgggtgatgggtccaattctaattttctcaagctttttgtctggtgcaacacttgcgctctatcatggatctcctctaggctatggctttggcaaatttgttcaggtaacaccattaataatatcttttactgccattcttatctttattgtttttagatggtttagtaatggcgggaaaaagttggcaaaagtttgataagaaacatgtcatgcattgaacagattgttctagcgatacagatagaaagaaagcttttttgtgatcattaattctatacaagctttaggataattacttttctgttaatgagaactagcttatctctgcacttgtgatggagtttgaacataaaacagctacaagagaaaaagacaatacaagcattgtaatagacccgaaaagactttctgtatttcgggaagtggtttccataggcattggaattgacagagttggaggcctctcgaactatcttcacatttgtaactgaatactaacttcaataaataattctttctattcaaagttatgtactcattctctaattgttctaacttctcctctaattatttataattatcttggctactgtcatatctagatttaggatatagtaataatttttgctagatatcacatccaatcactcatctactcagattcttctgtgatacttttccaggatgcaggtgtgactaaattaggtacagtgccaagcctggtgaaagcttggaagaatacgcagtgtatgaatggcctagattggacaaaaataaagtaatcttctttttgaatgtttgctaagcttcgttgcatgctacttggaagaccagtaactaaagaatgaatttatgcaggtgctttgcttccacaggagaaacatctaatgtcgatgatgacctttggctatcttcgcgagcatattacaagcccgttattgaatgttgtggagggacagaactttcatcatcttacatacaaggaagtctactgcaacctcaagcttttggtgcattcagcacaacatcaatgacaacaagccttgtcatacttgatgaacatggaaatccttttgtaagaacttattcaatattctttattttttattggatttcaacttcaataatttggtagacagcagttttttttttctatgtaatagaagtcccaatatgtgtttgcaaagtcaattaactcacgaatttgtttgcttttttctttcttttctttgaccgagatgcagccagatgatcaagcttgtataggtgaggtggggttattcccactatatctaggtgcgactgataggttgcttaacgctgatcatgaagaagtttactttaagggaatgccattatacaaaggaatggtatgcttagaaatattctatttcaatgcacccagctctttaattgtgtgcagaaaattacatagttgaaacttatcatttgaaacacaagtaatactttgttgagtttattctatgaagtctttttatgccactcactcagatgtgagaattctttgtcaagtttcatcttggatttgctttccaataagcacagtaaagatgtttctgtaaaaaaattgttacaacttcagctgtgaatttgcagcgcctcaggagacatggagatattatcaagagaactgttggaggctatttcattgttcagggcagagctgatgacaccatgaaccttgggggcattaaggtctggcattcaataagctccttacaaactcttttgcatggggtagttttatgagcttaaactattggtcattgctgacgtgaatactgttcttgatatgtagacaagttctgttgaaattgagcgtgtatgtgaccgagctgatgaaagcattgtagagacagcggcagttagcgtgtctccagttgatggtggtccagaacagctggttatgtttgtggtattaaagaatggatataactctgaagctgaaaatcttaggactaaattctcaaaagccattcaaagtaatcttaatccattattcaaggttagaatttcaccactttgtcttaatttaacagacactatagtactgcaatttcataaaaccataacaagatttggtttgtttgcacacaatacattttcatcattcattaggtcaccattgatatgatttttccgacactcgaaattgttaaacaggttagatttgtgaagattgttccagagtttcctcgaacagcatcgaacaagttactaaggagagtattgagggatcaaataaagcatgaattgtcggctcgtagtagaatttaatggaattcactagcttttggtatgtatggagaaaacaaatatgtagtttggtgaagaaggggttcatgaagatcaaaattattaataatgatttttagttgtaagttgatactgagttattagtgtctgttaacatctcgaccaagtgtgggttttgttagtagtatacaactatttgggtaccctcctcttttagactagcttttgggagtgagttctactcaagtagttgtatcaagtgatattagagccatgcatgatgcaccctcaagtgggactgatgttgcggaagtggggatgtcagcttcaaagggagtgtattgttaggatctcacattgaataagtatgagattggttagtagtatataattatttaagcactctcctctcttatgctagcttttagggtgagttgtatctgagtggttgaattagtctcctaaaggaattggggttctttagtgatttgtttatttatatgta

SEQ ID NO: 243318 - DNA, 13127 bp, Cannabis indica
tagactgttgcaatcgtcttcttactgctttggttgagaaagatagtgcgagttagggtttattttcgttatgggtaatgatagaaatgaaaatcttgcgattcagtaggagtactgaaatgtaatgctcagatttttggtttagaagttcggagggagagggagagagagagtaagagagatggaaggtggaggaaggaggatttcggcgagccctagaccatgcagtgttaggcgggttgtggcgaagaaaaggccccgagttggaggtgtagatgggtttgtcaatagtgttaagaagcttcagagacgagaaatcagttccaaacgggaccgtgctttcaccatgagcgatgcccaagagagatttcgcaatattcgtctacaggttattttctttgcctattttatttttgaattctgtttacttattttaatagtgttacggctcttcatgctttctttactattattattgtttggtttttggtgaaagaaagagggtttggaacttgggttttgtgttttttagcaaataagatgtgagatcttcgcttatgatgaatgaattgattgttaagtattaaatcaaactgtaggcgttgtgtcggtttcgaagtgttgctattatttgaagtaattatgctatgctctccaccaaatttgagaaatttttgttatgtttgacatctctgtttctttactgtcaattgacacactgaggaagtagattgttgagtttctgaatcgtttaaatgaaaggccttggtattaattcactcacttcactgtgttcttgcttagtattctagtaggagattagcaaggagacagtattcattactagtcttattttctcatttatacttcaatgaaatatttggattttattttatcttttatctttctaaatttttgccccttgcagttcaaccgggagacctccctgtgtcccgaagaattttacttttttcgagtctgtggggaatgaaatattaaaactggatgcttgattttgttctgtctgaaattatggtttagttagaagtattggttttagtgtatgcatattgggttgttgtagttttgcaatcaagtgattgaatttgagcgaacatttgtgtaggaagaatatgatacgcatgatccgaagggtcactgttctatggtactgccttttttaaggaagaggtccaagatcattgagattgtagcagctcgtgacattgtgtttgctcttgcccaatctggtgtttgtgcagcttttagtagaggtaatagttaataactttaatatttctgttttgatcttctatttggtatgatgttatttaagatcttaggaccgacacttaattgatgaatgtgtaaaatgtttcatcattggatgcagagactaatcagaggatatgctttctcaatgtcagtcctgatgaagttatacgcagcttgttttataataagaacaatgactcacttatcacagtttctgtttatgcttcagacaatttcagttctttaaaatgtagaagcacgaggatcgagtaagtatcgaaaaatgtacatataaaaaaggggaaaaaagagagaatctacatgcaatcttggtgaatttttttcttctatttcttccatattatgctaaagactggtcttttttgtatggatcagatatattcgaaggggcaaaccagatgctggctttgctctttttgaatctgagtcattaaaatggccaggttttgtagagtttgacgatgtaaatgggaaggttctcacgtattctgcacaggataggtagtttttgctttgtcagtatcgagttttctaatggtatctaacactattggcttcttattattgatataccttatactttctttctttagtatatacaaggtttttgacctcaagaactatacgatgctgtactccatatccgataaaaatgttcaggaaataaagataaggtattctttgttcactttctgaactatcacagcttatgtgtatgtgtatgtgcatgtgcatgtacataactgtagcaccattttattttaatggatacctttttttatctctcaccttgttctttccttttcttaaacagtcctgggatcatgctgttgattttaaccaaggctagtggtcatgtgcccctcaagattctttctatagaggatggtacagttttaaaatcatttaatcatctccttcaccggaataagaaggtggattttatcgaacagttcaatgagaagcttcttgtcaagcaagaaaatgagaacctccagattcttgatgtgagtgtcttcttgaaatctagccttttttatttgtatttgtttgttcacttttcatttttcttaccgttggtttttcgtttgtgtaggttcgtaattttgagttaacagaagttagcagaactgaatttatgacaccgtcagcttttatatttctgtatgagaatcagttgttcttaacgtttagaaatcgacttgtggctgtttggaacttccgtggggagcttgtaacttcatttgaggatcaccttttgtggcaccccgactgtaatactaataacatatacattactagtgatcaagatcttattatatcttactgcaaggctgattctgatgatcccttgtccgaaggaagtggtaatttgtttctgtgacttattttatattcaacacattaagtcaatgagtttagaagttctacaaccctctcataaggctggggaactgcacatagcctatgttgtggaataaaattataattggtattgatgctactggaatcaattgggtgtatttgtgctaagtaatcatgattatcagttgagtctgctatacttaccgatatcttgaggagtgaattggggggaatagatgaaatgacattatttgctctttgctatataagaatttgattgcatctcttctatatctttattctaatatgatagtcttgttggtctatcaatttcataaaatatagatcatataatatcttacactgcatttctattgcagcagggtcaatcaatatcagcaatattctgactgggaaatgccttgctaaaataagagcaagtaacagcaccccattggagagtgaaggttgctgtagtgacaagtgctgtgtcagtggcagcagcggcaactgcaaatcaaagaagcgtacccaagcagccagaactcggagcacagttgctgaagcattggaagatattactgctttattctacgacgaagagcggaatgagatctatacaggcaataggcatggtctagtacacgtgtggtctaactaatggtttctactatcctttcttgtgttcattagatagatttattgatgctgttttaagtggttgaattgattgtgtcgactgttgatgtaagcaagagttgggaataattgtatcattagattgccttgtatcatgtcatataatccgtttaacttaatcccttttgtctcttgtcttgtgccctgtattggaactgaaatgccctattcatagaattgtttttcatagtgaatatgccgtacaaatcttggctctgaaatgaatgctaatttgtatcttaattttgtaggacagacaagaacatgttctatatctatttacggttaagtgaacccaggaatcaggatgattaaatattactggcaaaagcattgagtttgatagtttctctttcttcctttggttacttaatttttacatttttaaatgttgaaagggagtgtgtgtgagtgtgaccactggggcacaacctttagaaaacaatggcttttatctgtcttgtcatatgagcaattctgtggaggacaatccctactctattatatgccttgttttagggatacccaaggtgattattttcaactagatggaccatgcatacattcattcatcgactttgatgtgataattctcttaagcctcctaccaatctatttttgcacttaagttgacattaaccactgcttaacctggaatttcatccccatttcaattctcaacttctgactgtttagcaataataatcctttgaaacttgatcccaattttgtaattgggactctttttgagaagagaatatgaactacccacacaaattcattgcagcctcacatggataggaagttttatcagtattgatgttgaagcaaaggaaaggaagccatcaatggaattaaagctttaagatttggcaatccccatactttgtccacctattagctactactacttgtatagtagtccccaaattgatgacatttttttcttcatgctagtttgcactttgggctagcgtaaaagtgtaccactacactgtcaaccgaacccattaaagtgttatgtgaaaaaaagcaccatagtgcgtctatgtattgtattattgtacaggtgtaagtaaatacgaccacccactaattcctttttttttattttttttggacaaaactatttctttctttctttctttcctttttccttttcattacacataccattttttgttttttgttgcatttaataatttggggaaaattaaattgcttcgaaaaggttttatgaagattagtaggctcccctattattaattagataaacttattgtttcgttcgttggaacttttatagataaatctactctgcattcatgtaaaattttatttagagatttttctagtttgacataattgcaattatagtcttcgttagagatttgccgacccattttgatttcaatgatttcccttttagacacgttaggcggtgcttctatttgtttatttatttagacttcatttatttattaaataaaatttgttgtagttattaaatcatgtatctctttttttccttaaaatttctctagcttgttttaagggaggaaaatttatgaaattctgtagtatggcttaaaaacaagaaagctgacaaaaagaagagtatttaaaaactaatgaagggtaggttttagatcttgaaaattaaaaacaaataaaatatattttttgaaatggtaaagactaaagagaaagagaccaaaaccaaatagaaaatcaaacaaagtttgcaataattttttattttaaaattattagtcttttttaagtaaagcgacacgaccatgtgatttaggagaataaagaaaaaaaaaaaaaagaacgagcgcagttgctttcaaaattacgaataatacaattttttttaaaaaaattaaatcaataaaaagaaacaaaagctatttatattaattttttttattttaaaaaataaaagagagagcgtgaagacacgcgcacatagtgcttgtgtcataaatgtgatttgggaaattggtggtttggaattataatttttgccttatttttatttattattttgaaacgaaagtttggtcttttgttcaagattagctaagcagtaggtgccactaataggactatgctcttctcttcttctattcttttttcactcaccggcttctcttacactcttcaatcatcatcatcactaccgtcgtcctcctcctcttcctcatcatcatcatctttttcttgttctctctttcaccagtgattctcagctccggatttgcttatttttttttctcgcattgacttgggggagtagtagtcgtcttaactgtcccagtctacttgccgtttttttttccttctggaaggtaaaaatggaagatttcccagttactttctttgcatttgctcatatgggttttgggatttcttcccatttcgttctgggttttgtttctttttttgagtttttaaaatttaagaatttttatttgaggaaaggagcgtaggtagtagtgggaatgttggtttggttttggtttttttcgatttgggtatttgtttaattgagttgttagcttgcgtgatttagtgtggcggtgaatataattttgtgtataagtcctatgttttggccaaggtaggtgctttctttgtctagatctgaccgaggatgccgacattttttggcgtggaatctgaaagatgctgcctgttattcgagttgcattttagaattttattatattcatattttgtttgattgctttgctttactgggtaactatgttttactttgttgaatggtttgagctttaagggattctcacaagtagctttagctaccgtgatttgcatacacaagaagataacttagatgctagtgacggcactcttcttttatattacagaatattttaattttggcaacctttactttctaaacttttaggaatattttaagtgaaacacaatcccaaagtgggcttcactaattttctttttctccttttcactcgttcaggattttcttgcttcggtggtaaaatgcagagtgaaattgatggtggtgtgcctcttgactatgctgaaatccatatattcccagcacagaacaggtaaatcttgattatccaagctcccacttccttgaatctagatgtacgtttatgagctttctagtatctcaattgtattgttgctcatttattataagcttttatttaattttaatattattttgggtgtggggtgggtgcattaggtatgaagcaagtgtttgctgtaacgggaaaacacaaaatttggaaactggagttttggaatcactgttgcctcatttgccaaaagttaaggagatttactctaatggaaccaatgcctctgtaaaactcttactaccggaaaacctgaatggtgcagcatggtttaccaagtcaactttaaacaggttcttattgtttaagtgctttcttttctattttttttttagctcttttcatgtttagttttctgcaggcatacttgagcagttctgtttcctgattgtttcatgtcttacttatcagattcttccagactatgagttcaccgggtttgatccggacgactagttctacgaaagacgagatgtcacaattggaggaggctagaaggtttcatctgtcgttgtatggcgaggtgatgcaatgcttaatctggaatatgatatgttatcagttgtcttgttttattaattttttatttccttctgtttaagaagtcattttatattttcattaaaactctttttggttatttacttactagtgtgtattgttacttgacaacagccccaaaatgagaatgcatcatcagataattcgaagtatgtcatttttttttttgtaagatttttcatttgtgtctcattttagttgcagatcactaatataaggaagtttataatctcaggaatgaactcttacgagctctggatttgaggttgatggcattaagaagtgaattagccactagttttagcgaggctgcatattccatttgctccaccaaagaaatgactgatttagccaaattttctgaatgctttggaggaacagaattaaggtaagctgtagaccaaataaaaaaaaaaaacattgatagcttaattggctcagtagtcagtatcttaattacttgtgtatgtaaatagatttatatgtgtgtgtttacttatgtatttacaaaaaggcaaatgggcatatgggctattgcaggaattctttgcacaagtttttagagctgaaccaggagggcaatagtgatctccaaaatgatgtcaagagctcgctgacaccaaaatcaagggatcacgatgtaaatgagaaacaggaaaatgttcaggtatcaaaagcagtgcattcagatacaccagtaaagtttggagtttcgcctgcaaaagctgctcaggttgagcgacagagttcgtcgggaagtgaggagtcttctgaatcaagtgatgaagacagaagatctgctgaaagaagtcgaactatgataagatcagcgtcacccagaaggtcagcatctccaatgcggagggtacaaataggaagaggaggatcacgcagggcagctgcgttgaccattaagagcctcggctttttcccagcaagggataagagtttcccgtacagagatgcatctggaaatagtagcgaagaggaaagatttgagcaaccaaataggaagcctgagaatcatgtacggatgtctgttcaagatgccatccatctttttgaaagcaagcaaagggatcaaactggtgatggtcaaatgaggaagtcattatcaaatatatctataaatgcaagtaaagctgtattgagaagatggagttcaggtatgggggaaacttctgccccatgcgaaccagaacctgaagactttgtgcctaatgatgcagaagatgaagagaatgaagagaatcagaagtattcaacagacatgaaatcagaatcagaaactgtacctacaggtcaggagaccgtgaaaaccgccgaagttcccacgaacttagaacaatttgataagagtttgtctgacccaacatataatgaagcagatactagtatcactgaggaagagagtctcagaaagtcaacagcaacaactgaatggaatagactaaaggaagctgagttgaatcagatgctgatgcaaatgatggaaacaaagcctgggagacaagcaaagactcaaactagcagaaaacaaagccttccttctgggcaaagaggtggattttatgatcattacaaagagaagagggatgaaaagctcagaggagagaattctaggattaaagcagagaaagaagcccaatttaaagcaatgcagaaaattcttgatgagagaaaatctgaaaatggcctcaaaaaaatgtaaaaagatgttgataaaaagcctgttgtgcgcaagtctcaaaaaatcagttagaagtttgcctcagcctgcaaaatcccaaaaaggaaattaaaaaggaaatatcaaaggtaccttctgcaaagaagactttgccaaaaacctcacccgtgcctgctacacgcaagtcatggccatcaacaccaccagcaagagctgtagggacatcaccagctaaaactcctgttgggaacccctctgctggcactactccaacacgtcgaaaaacacagcaacaatcgtcacttcctcggcctagctctaaagtggaaaggccccagcagccactaagaagggagtctctgactaatagtggcaggggcttgaaaaatgtgaaagccgttaatgagaagcaacagcaagcaccaaaaaagactagtaaaccaacaaaaacaaaagtagtgacaccttctgaggattgttcagatgtgattccagcaaagcctggtttatatagcagggtaactaaaaaaggtactgtagttccagtcgaaacaaaaccttttctccgcaagggttctaggaccgctcctggtgttagtgccactgttaacaagactaaaagttctcctcaatcagaagaaatgcttagaaacagcgaaaatattgttgagaagcaagaagcagaggtggttgctgatgtttctgaaacagtgagtcagcatcaagaagaggatgtcatggtagtagttcatcaagatgctgctatggactcagaagctctggaaaatagctggcatgaatgtaataatggggcagaaaactttgactcagtccctgctgaatgtaatgatgccttgcccaaaaatgtcacagactcaacagaaactcaagctgaagtagaagcaataatctccccttcggcctgggttgaaatagaagaacatcaagccatgcccccatgtgatgacaggccatgtcagcctacttctaccgttgctgcaccaattggatcaacaagtccacgagtgcgtcattctttgtcccaaatgctgcaagaggagagtaatgaacctgatattattgaatggggtaatgctgaaaaccctcctgcaataatctaccagaaagatgcacccaaaggactaaagagactattaaagtttgcccgcaagagcaaaggagatgctaatatcagtggttggtctagcccatcagttttttccgaaggtgaagatgatgctgacaatctaacgagaaaggctagtcttactgcaaagaataactatgggcagcaaagaacatcattaggagatggttatgatgctcgtgaagtatactcaggtatgtttctcttctgtttaatgaaatttttaaaggaagattgataaagacaatccttttcttaccttcctgcttcattggaaaaataatgcatgcagtccaaaaagcccacactaaaatgaaactgaaaagggaaaatcatataagatatcatgaaaaggcatcatacttatttataattcttgttctttaaactaatcttttcctatcgattttatgaattatgttgatgcagctcaatcaaatattagcaaagtcaatacccgaagttccttgaataagttgcaagaggactccactggagtgtcaacaactaaaggttgtcttcacattatacttttattttcttggtccatattcttctttctttacatacctcttatgaagcgcaattcccaaattttaatacccatctcctgttttttggcgtgtcagcagcaaggtcattcttctccctttcagcctttagaggtggcgcgaaatgagattgaaagttttcataaatagctactattttgagttgatgatcgaaattgcttttagttcaagaccaaatgcaatgcaggtttagcaagaagcaaaattcttcttttcctacaatggtctaagcctagtttgtaatgttccaggtgcagcaaaaaaacatgttattaaaagatttctttcttttccctcttattttatgggttgtacattcaatttgccctggttctaggatttccctacgcatagatctttgttgcttagatatcttgaacattcattgattgcaatttgttcagtcaactaaccactgcttttgtatctggtttgtgaaatcacttcataatacaatattccaatttcaaatgtgtgtacttcagttatcttcaacatcaaagctctatcttttcaaagacaaaattggctagcaactatgaagaagattacatataagaaatcaaataaattaaccattttcttttttcagaaaaaataattcagcattttacaggacaatcttctgagtttctttacgaaagatttgaagaggggggaatatggtatctgcatgctttccataataacatgaaaatatgttagccagttgatttatggtctctgaggcagtagaatctctcagagctagctgaattgatgatagcttaaccagttcatgtccaatgacaatatgattacgggggtagagcttttccagaatctggcaattattcataggcataaaaagtttaaaaaagattgttacccttattaacattaatcagtaaaaaataaaagttagcataattagagttgaaacattactagttacctcaattgaagctttgcaatggtcccttgctggttgtaagtctccaacaagacagaaagcttgggcgagaatgtcctccacctaccaatcaaaacaactattaaaaaacatcaaatcatccgaagttgaaagcaaacagaatttctagtctcgaattatgtcttgacctttgagaaatgataaaccagattcgaattcccatcaatctgaaagttgagctatgaagaggtaaatacggagaaggctgaaacttacctctgcaatgctcctattgtatgcatgtagaattgacttcagcagatgaagagattttgaggcatctgagagtttgaaaccagatacatcttctgaaactattgcatcttgtaacctgaaggagttaagaagtaaagtcaatagattgtgggcggaagatatgcccattgtgcaataacacaagaaaccacatttcagctgcatacctcctgatacatttccaagctttatctacagctgaacgagaagattctagatcccggtaagagccacatttcaaacaaaacccaggattcatattaggtaagttattgctgcacaaaaatgcatccagcgtcacttcatttttgttatcactgtttaaattctcagcctgtaaaatataatcgataaaaagaaaatgtttgaataaaacagattacaggaaaagaagctaaattcaacaaatacacaatatggccacgtttgaagaggaagattggattggatagaatagaattgaattggattggatagaattgaataattttagttatgtgattttgtaatgaaatttgagaggatattttgaaaaaataatacaacaacctaaataatacccctaacaatgaaaaacttggtacaattttatcttatccaatctccaatcttcatgtatttcaactgcaaaaagtaaaacaaattacaactttgcatcaaatttgttttcctttaaatgattgttgaaaaatggtcaatacattcattcttttattctttctcaatcatatccaaattcactatctatgtgacctacaagtattgtgtacgacggtgatcagttgtctagtgagttgtgactaattagtatatgaaagtcatccagttagaatttaaagattctactccatggccaatatatggtatatatgaagcttatttcaaattatattgcgagataaggatacctggaaatgaggttcacagctacttgttctgctgatgttggcaagcttctttattttatgcttttcgcagttgagaacagaggcatccaacacaatgccaggacaatttgatttcacacaccggaaagcattcagaacaaggtcggacaaatttgcttttgaacaaccactgcactgacagcgaaacgagtactcattttctagaaattcattacgatctttggcgtcccactgcccaacctgtaaaacaaaaccacaattcttctatgaacatcaaactttgcatgatccaaattccaaacagcagcagtgttcaaaaatagggaaaatgacggttatattgtgaggaagggctgcttggagtttttaactttttgattgaccctaagactataccgatttttattttttgacaagaagatagaataacaaataaattattatgataatttctcatgttgcacaaatgggacatggactattagtcaaggattggtatacctgcggaccatatg

SEQ ID NO: 243319 - DNA, 8102 bp, Cannabis indica
ttttctaaaatagtactaaatagaattataaaataattttttgtcaaaataaaacttaattgtaacccgatctaaaagtgttttgacaaaattgattacgttttctgtatctattagtgctaggaattatcttcaaattgattatatacaaaaaaaaaaaataaataaataaactcagaatcatatttctactattttaaaaaatacaaaatttattttgtcatttaatgaaacaaataatcaatccaataattttgcaaattacagaatctaaaatagtcaaccaaagaaaaactagcaaactgaaagcatagtaaaaactaatataattagaaaaattctcaatcagtttttctaatttatttttacatggagaggtttaataagttatcatcctaatttgttagagtattctataaattttcacaaaattctatattagttctctagctctccctctccctcttcttcatgtttatatttatatttatttatgataaaaaataattaaataaatataatttttagtaaaaaaataattaaataacaagaggactgaaactttcttttacaatctctccactattagttattagtgacaagttccatgttttgtgttaatctaattatgtttaataattaggcatatattattctcttattagtcattctaacacaattattctactaattttttacttaaagctgaataaatattaaaatatatataaaagatagctcattattcaactaaggttctaatttagttggacttttaatagctatttgggacttctaaagctccaaatatactttagttaggtaatcaataaattttaatttttagctctaaatattttttttttaccaaaaatcaattttaatagctttcttaaaagaccttcttggaaagatagaagcagaaaccaaacaaaaagtcaaccaaatagagcttaagtatgcaatggtagaatgtctactcttcttccattgtagtgtttgtttgtttggtaatattatgttattttccctcaaaaagaaaaaaaaaataatttacagtgtatatactatgtttacagtaataatatttaattatatttttaaaactttcgttaatacattactattaaattttaagttattatcatttgtatattaaattaattttaaaaaattaaaattttaataatataaactaatcaacttcgtcttagttcaaattctactgaaaagtctactaagaatcaaaatttatggaagaaaaataataaaaaaaaataagttaatatattcaatgagctcattcaagatttactcgttctatacaaaaaataagaagaattttaatttcaacactttaggatagaggtaagtaaaaaagatatttttgtttcgttgtttgcaaatcattcgactaaatgtcacgtaatcattaacttaacactaaacaatcatatacttacagaagatctaaaaatataacttaaatattattaccattaaaaattaaacttaaatatttttctgcaatttgagaattaaacttatttatgcggcaatttacttaagaaaaaaaaatatatatcattgtaagtgtgggctttggaatctaataaatatatggctgtctcctttgtcctaaccaaacatagaataagacaaccaatgaaaaagaaaaaagtaaaaaagacttaaatttgtaataataacaattcccaagcaaagaagatgagatgacaaatcaaatttcaagcaaaatggcatctttcttcacactcaaaataagcaaaaataaataactgagaagaatttactttacacaccaaaaataaagagaaaacaaatatagaagcaagcaagcaagcaagctactgttgtgtagcatttttaggctgcaatatttgaacaagtgaccataatatatccattctgtgtaagcttctgttgctctgtccctgccaaaccattaaaattaatccaaaaactccacaattattatatcaaaatattacacaaaattatattcatcattaagtaagaaatggtacctcaaccacaaaacatatccatgtcttatcaccatgagcttctgttactccttttaagattgtaagaccaaggcttttaatagcttctgctatctcgaggaaatggctgcattcttcgcacatcatctgcatatcaaatccatcactccaaataaataaacactctcactcaaatggaaaaattaattgcttctttggatttgtcatttcttcaaacctttaacaagtttaactaaacaaagatttagaaaagaaatagttgcatacctccacaaccatctgcccattcttgttcagattttccactattatcgaacaaacttttagattgcctcccacctccactgcccagctcgaaccccgctcatagctcgaggattccagcatgcttgtttctttatgacttgactgcaaattcatcaacattttttaacaacagcattagaaacaggccgtgcacgatttgtttcataacaaggcctttaaaaagaaaaactttgagatgtgtaatcccttcttttacagtaaaagcaactttctaaatgaacttcaactctggaaacaggtgaagaataaaataataagtttaccttcacatcagtatatttatttagcttgtcagcatgcttggcgatactttgaaggtaaagcatgtgcttgatcgtgcgttccaacagtgaatcaatactacactgaacaaatatcatgaaattttaacacacaagaaagcaaaaacgaagcataaatatgaatagcactatagcaggactgcaattaaaaatttccacaactttggcgaggataaccgaaatttacctttgctccacttggtattagctcccttagttctttaatacggtcttggatcagttgtctatctcttggcctcggtctacagttttcaccaggtctagctctctttttgttgttcttagcaggtgctgaagacctttcaagctgctcgctgcaagaacttggacagtttgatgaaaacccttttggggacattgcaccgcagacccctgatgaactcaagcagtgtggtgtgtcctctcctacaagggatgcagggccattggaatgatttgatgaatcagtaacaagcgttgtatggcttgaaggctcaggatagttttcggttgtcaacaaagattgcactgatttacaaaatgacttttcactcctaacatcactatgactttgacaaacactagctattactgcttctaggagaggttctggatgaaaatcagaagttaactggctacagattgtttgcccgggcatctcgggaattctcccttcacttttagttgcttcccaatcaaaatacttgcttttcttgaaaaaagatggtccaagtgcctcatggagctcgtaaccagcaggaaactctaaagatgccgtagatgtatccatatggcttgactcagttagaaacttcagattttccagatctttctggaatttaaaatctgagggctcacttacgtgcagcaccccattttggtagtaatctacattatccaacctaactcggtcacaaatagcagagtcaatagggacagatgaaaagttcacagagtcaacttcaaccttcttagctggtacaatagcattgacactgtttattgaatccacttgagtaactttgcagctgctaatctcctttccacccttccacttatcactcatattcatcccaattactttgtgatgctcaagatttagaatgttcgattctgattgagctaacttagtatttttgtcagccccacttgcgggcaactcaggtcctccgttgttaatcacaatatcagctgtcttttcttgctgattatcaagcagtgaccaatcgtaagaactatcattgtctttccccaagtacggaaaaattgaaaaccatatatcttgcctctcttcgttcaaggctttgtctaaattgtgcaagcagtcagaaatagcctctggagcgaaaccttttgaaggtatatctggctgacaggcaaataaaatatatattaattcatgtatttatgctttgtccagaaaaacattctttagttcaaatggagaggcatgcacacgcacaaatatgtgtgtgtagtgtatgtagagagagagagagagaggattaccaaatttgacgaactattcatactggatggcattgaactaggaatgcaccctaatgaagaatcttgaagagccatcaagacatctctaatatgagcaatcatcttcatatcttcaactacctgttcttcccataagcagaagaaacatgtaagctcaacacaaataaagatcatggaacacaactcaaaaagttacacatgtaagccaagtcaacttactttattcaaagatccaagctgtacaactccaagaggagcaacagctacaacagcaatagtctgcatgagataagagtaaaatgccacttagaaaactatatctagagcattaagcagaaatgactatgttcagtaaaattagtagaatcccgatatgacttgaatatggatgtaaaaagaatcatctatcgagctcatatgaatcattatttttcttcaacagtgaccaatgacaccgatcaaattgagtagctttcatcaaagagaccttaaaaacgcatgaaataaattttacagcttgaagattccaaaagttttagatatggctattataatatttgaggcgataaaccgtaagggtaacacttgataaaataacattgcaattcaactgtctttcatcttttgctaatatgttattatcacctccaccaactaaacctgatcatttccaaatctcattttttttatgcagatctccctaactagcatttatcacactagtgaataattgatacatgaccctgttttttctgaagaaaaatttagtactcttacccaatttgttaaattagcccttctggggttcaaaaccctcaacctcttacacaaaccacttgagctagactcaattggcacatatacatatactctaagatgttccatgtgtgttttaattttaagtgttaaaaaggaagcaggcatggcataccttaatccctgcagaaaattgatcttgccacccactggagtactgaaaaatgaaaatcacccaaaataatgttcattaggtctcaggttagtacagtatataagaatagatttgaacatgataagattgcaaactgtaattactcacttcaaatgctgaccatgtacacatttcatgcttatctgcaaagatccactgatgcttcccactcactgccacttgtccaacaatcctgtaacaaccaaaggattaaaatttaaaactgatctagcaacactaattactttttgcactaagggaatatccactattatttaccacatttacaagtttgcaaataagaaaaatacttagtgaaacaagacattacccttccccaagagaatatacatgatacgacatcttagccactgctaacccaagggggtcatcgtgcaacctttccactgctggactatgttcctcactcttgtcatagtaagcgtcctcccaagttaacaccctaaacatcaaccaccaaaatcaaaatgttaagcagattcaaaagccagataacaaccatgatcagcccaattcagcttactaaacattaaaaaaatgaactttttgaagtgccattaacacaaactaaataaagtaacatactttttcgggtaaatgctatgtttgatgagattaaatctatcaaaaggaagcttgtgtgcgtgattaaataacttcacaagttaaatttctctctatagggtgcttttacacacaaagccaaaattattcaattcctttcatttttcccacttcatttcttgacaagcaaacaaaaacaaagtaaaaaacattaaatgaaaaaactcacattcgagcacgatgcttgagcttccaaaacacggcatacttccactctgaatttaaacagaggctcctcagtacttgctgtaaatcggtacccatatctcttccaccaaaaagtaattcttttcaccgatatccccactaaacagaacccccccaaacaacccgaaattaaaaattcccctaccaccttaaaatatttttcggcagaaaattccttaccctaacttcccctatatgagcctctaccggcttgctttctccgtaatccagctctcggttttattggcggtcccaccgtcggtaacaacagacgatcccttcccatcactcacaacacaacccccacttaatcaaattccaaaacccccaaaaataaaaaataaaacctaaagcttcttcttttttatctataaaacaaattcaagtaaacaacactcaaatattccactacagtaagctccactatattcactacacttgtccatttctttttcagctgattttttttcaattgtaaattaattacagatacgaaaaaagagaaaagattaaactcaaaaaccttgaacaagcctggtaacgaagaagaagctcgattaagatggaaaaatctagcttatgtccgacgacatggatgatccgaaatgcaatgaacttgtataatcaattgatccagacttgcagatacgtacgttgatcttacgagaattcgactatgaacggttcagatttaacggcagaacagtgaagaacaggcgatctaaaaaaggtttgggtttgacaaaaaagaagtgaaattcaaaggctttagagaataatgcagctttttctttcttcttctttctctggttttctagagagagaaagcttcagtgaatcaatggctttttgcagagaggagagagagagtgaaacactttatataagtgaaatttacctaaggaccccttctttactttatattttaattgcaaatatgcccttttgttttacattatttatgttttgccccgccttagatgctacagtgcgcacccctcccacagtctaaaggcactttgctattttgcgcatcgtgcgtattttaggagctttgattatttttgtggtttttttgtgtgtgaaatgaaagatgaaaatcaataaagggtcacactagagagtaggagtaaagactattggaaaagtttcactttccatacattcttatctattttagcattgaagatagatttttaatgtatttttctataattatatatcatttaaaagaaaattaaataatttatagtgttgaaaataaaattaaaatattttattatatgcttaattttttttaactattcaaatatgaaataagttaaattgggtttgatttaatttcattttttttttgttttaataacaatatatttatgaagggaaaaaataaaaattcattttttttggtgaggaatgagtacactttctaggtggtgttcttagatggccaacaaaatgatgcccaagtgtggaaattggtttcttcttatctttagttttgcccttaattattttccaaagaaagagatgaaattgaaattcacctctaaaaatgaaagctctcttcttttaacaatgattttattgcccaaaagttgtgacacctttcaaccctcattgttcatgtgttcccctttctacaattgccacccaccaatgcaatttccaatcttttttcttctttaatttgaaagataaattaaaaaataaataaaaaaaattctagccctttgatgtaaatcatgtggttggattttgatggtggtacaaagtaatatatttattaagtagtctttcttgcattgcaccaactagacattatttctagaatcccatgatttgttttaatagtgtgatcttatggttattatgatcattgatttctaatcatttttcttggttttttctattgttttcattttaccttaaaatatagaaagaaagagttttcattaattgataatgatgaaaacaaattaggagtcggccaaattagtttaattttgttgttttgaagtttgattagctaaaaccctattgtctaaattaagggtatcctaagtcaatttataggtcattttaagagaatta

SEQ ID NO: 243320 - DNA, 4681 bp, Cannabis indica
gaccctgaactttgatatgtaccaaattgtgcccgttaaattttcacacacgtcagacttccgtccaacaatctcaatattttagagaaatttttaagagcttgaaaagttcaggaagcataatttagtacatgtcaaagttcgggaaataaaaatcctaattagttattttctaagcgctaatttggaatacaacaagactccaaaaacagtcaaatatttgaaaattcaatagtaattgcatgagactccaaaaggaaatataatagtaattgcatgagactccaaaagattaagattatgctcacatctatattaaaattgaaagagtgaaaacaagtttaacacctgaaacaagaggcatagatagactgtgacattacccttgataggatatgcatcataaactttttacttacttgctttcattgccgactactattgcagttggagaagaccaattcatatcataaacagaaacctaaggaaaaagcattacccaaaaaattgaaaactcttcagtctgactgtctgataactctactaagatcaacaattgaataaatgaaaaatgaaaagaatcaacaattgagtaccgcatccattccaacatgagtagtggcaattcgataaccacgcaatttgagagcctcaaaacactcttcaatggtatcccataattcaatatccaaccacttttctgctcccatgctaacatggcgattttctctgtacctacataaaaacaactccaccaatgtcaagattgggaataaagtattttagcacaatcactttccattgaacaatatcaatctcatttggctaagttcctacttttgctcatagctatagctaaaattataagatccaattatatgaagatctttttttttaataaaagtacttttcaaagtatttggatatgtaaattacaaatcctaactaagtattcattttcaaatgatatccacaatatttacaaatatttatttttgattttaaagattttttataatttaattcacaacaattttcacattgaactcactagttgtatttttgaggtacatctaaatcatcacaacttaaattccaatcgatgtctaatatttctgctgtattaattatcatttcaacgatcaaatgctacctaatattgtaataatgtcagttttaactacccgtgaaagaatttacaaattgataaaacccattttttttcattggaaaagctaaaaaaaacatacagaagcgaaaactatttttcacctcaggcgtcgttgcaccttttggagctatcgcaggcgacgacatgaacggactgaaacccgagagcgtcagcggatcggaacgcagccgaaacgtttccaaaatcagtgagaccttcgaccacaagacaaaccgagtagctccgattcctcaccacattcctaaacctctccttcctcgaatccattatgtgtggtcccaatgcttccagtacttcaccgctgctaaggtacgacgagttcccgcacttgaatcgatccaagtaaggaaaccacccaccaccgccaccactggacggttgttgttcgaaatcaatacgccgtcgttccatcttcattagctgtacgacatcgtctttatgagtgagcaaatgctccacggtgtcctcttgtgttaaagtttcgaattcagcctcgtcgccgtcgtttgaatcgaccgattcgactgaaatagaggcgtaatttctcgaaggagatctgtgctggttcactaatcttaaaccttgacggttgttgttagaggaaaggggagttgagaagaagcagagagtgggtgaattgggtagtacagagatggaggacgatcttcggagagtggaagctatggaggagaacgatgttcggactagggttttgcaggccgccattgcagagttgcagagataaagagtgagagagagatttggcgccaaagccatgagatagggttttgctgattggatagggttttagaaaacgacaagagccatcagataaacgacaatatctcctaaaaacgacaacaacaagaaaaccattcatatacatatttttatttgaatttttacacaaaaaaatcgcattttttactatttttttacgattattttttttgtttttaacttttttacggaagttgttctttccctgtttttacttacatttttctgaaaaataatgttgtagttgcaacgttaaaatagcaatgttttgagaacaattatttgtatttttataaataaaaacttaatttgtaaaaatattaaaaatacttagatctgtatttttatatttttttctgtgatttgtatggatttataaaataatctattttctttaattctttttttttggtaagaggaaagtcattgtttaaatttgagtgtaatttagaacaattacttagtaaccatatagctagaaataactaaaaaaaattgtcaatacaccctccaattttacacacctggtataattatgaaatgtttacttaagtaaaaacatatatatttttttccttttttaagaagctacaaagcttgatcaatagggaaaaatcaagagaaaaatactaaatcttaatacaattatacgttgcaaaagaaagcaacaaagatttatgtctctgttaaaaataattaaaaatttagactcttcacttttccagcaactttcttaaaagtgatcgtgttgtactcttaaattttaattcaataatagaaaaaaaaaacttctgaagtgatcaagctagagtatcactaatgcataataatgcaagaggtgcttgttataagtagacttaagaaagtggtaagaaagtggaagagaaagaaactcaattttattttctatagctagatttgatgccaaaaacttggcatggaaccaacaacaaatatatatacataaatatatatttttttaaaaaaaaattggttgttattattggtaggatttgtgactttttttttagtgcttccattagatatattcttaatattcctcatatgttagagagtttcctaggtagaatattatttattaagatttcaatgttaaagtgttttttttcaaccgaaaaaaaaaataacgtggtgcagatctcttcctcactcttttgatagtttagataattctgaggaccacgtgtcagttataggggtcttagataattctggggaccacgtgtcaattataggggtcttatagctcatcctcctttaattgagttatgagtatacacctcgagagttttcatcccattaagaatgacactatcccaacaagctagcctcttacaaaaccaaacataatctctcttttgaagagttgtagtgagattcaaacccttacttaaataagaaacgatattaataaaagacattcttactactacaccatacaaaacctgccactacaccacacaaaacgtggttaaagtttattttaatgacaagtgaccaatttattttaataaaactcctttttatttgattggttcaacttccttggtcttcaagcacagcatatttgtgtagtttgttgactcactcactcacctctcaagttgtcccaatcaaaagagccgttcttcacttgacaacttaaaactaataataacttaaaacaaaaaatccaaatcatttttgtaaacttcccctaaaaacaactatgttctcaacattatactatatatagatgaactcataagcaatatcactcactcatcaaatctctaaaatgtcaacctctaatctaaaccctcatatagctcttcttccaagtgctggtatgggccatttaacaccctttattcgtctcatacctttactaacatcacacaacgtaaaaatcactgtcatcactccacatcccaccctatcaatttcagaatcagagagtttatctgaattgttcactagttttcctcaagtcactagaaaacaacttcatctaccccttcctccacttgatgatgagccttcatcaaaatcccaagaccctttctacaaccgtttcgaagtgattcgccgctcttctcaccttctttcgcctctcctctcttcactctctccaccactttctgctcttatcacagacatgagcttggcctcaaccgttattcccataactaactctcttcaacttcctaactacatattcttcacatcatcagccaagatgttaagtcttttcttatccttccacgcccttgatgacccgaaagcaaaagactttatcgaaatttcggggtttgaaccaatacccaaatcgtggattccccttccacttcttgatgacgccaataacgctatgaagatttatttcaccgagtgtggtaagaaaatgaaagaatcaagtggaattctggtaaacacatatgaaagtatagaaggcgagtcgctgaaagcgtttaatagcttaccgccagtgatcgccattgggccgcttcctccaattaagttcgagaggaaccaatctttggcatggcttgatgatcagccagctgagtctgtgttgtatgtcagctttggaagtagaacagccatatcaagagagcaaatcaaggcgttggctgatggtttagtgaagagcggtaaacggtttttgtgggtggttaaggataagaaagttgatcgagacgatgaaac

SEQ ID NO: 243321 - DNA, 1359 bp, Cannabis indica
gtcaaaattttgctcgacaacacataattttttttactgattttaaaaatactatttttttaaatgagagcccaaaaataattcttttcttacaacacactaaattttaggatcggccccatctctccttatgtgtaacaggcaaatatccactcatgtccaaagcttaaaggtggttataaactctcaaaaatagcaaaatatcaccataagaatttgacctcaaccaatatcaaaaattaagggaacgattgagatgtttcaacatgcggttagggttcagtaaaccctaggtcgtgtctcctgaagagagacgcacaaaacccttttgcctacataagggatcatacatgactttagaagtggatcatcattcattgttcataagcaaaaactctgcacttttatttcatgcatttaagatcttattcttgacttgcaaccaagatcaataaaacataagggaagtaagttattaccaacaattgggccaaacctctttaaattttggtgtcttttacttgcatttattaagatttttggttcaaaatctcatatattatgactccgtattggttggctaaaagaacagtaaacggtttttcttgtagcaaatagaagttgtaaatattaattttaattattaacactcccactcaattacactacagagttcacaaaatgcaagtattggctagactttacggtaagcttgtaatgaaaaaatcaaaaaactcaaatagcagaattagcttaaagcttaatcatcttagaattcatatcaaattaatctatgataaacttctaagaatagttataacggtaagattatggtaaatattctactttcctatatcagtcccttcccgagtaaaccatatacatccaacttctagtttattttgctaatactttcgaaaagacataccacttactaaagtgtaaataaacattattgataactattacgttagtgtaagtttagtacactgataaataatgagacttaaatattcaaaaaaaatatattaattattttctactatgatgacgtcactataattatgtaaaactatatattctagatttaataaaatttatatattaaacatataatcaaaataatcacgtgaatgaagcgattaataaagtcaaaaaaaaaatttgaactttactgattaaaaataatattaagttaaattaggttttaattagggcatgaaacccgacaaataaagtatcagagattggcgtcatggttggggcagtggtgggtctgagatggtgtttgtggggtagaggacctaattagggctttggagagaagagagaaaaaaaaaccaaaaaaaaaacgaaaaa

SEQ ID NO: 243322 - DNA, 708 bp, Cannabis indica
catctatcattaaattgacatccactaattatcttgcctggaaactccagattgaggcaatcctcattggttacgatctctacaaatatattgacggcagtcatccatgtccttctcgcaccgttaccaccaataatgttgaagctcccaacccggattttctaccatggattcgacaagacaaactattgtttggcgcccttgttggttccatctcgccctctcttgttccgttaatccaacgatccaccacctcccgcgacgcatggcaaactcttgcacacacttatgctcgcccaactcgtggacacatcaagcaaattaaagaccagattaagaaagttgtgaagggctctcgatccatatctgaatatatgcaatttattaagtgtcgaactgaccaatttgcagcactcggcagaccgatggatcacgaagacatcattgagaagatattagaaggtcttgatgatgactatagccgtattaatgatatggttcagggtagggacacccctatctcatttgatgagcttcatgagaaactcattaataaggaattgagtcttcaacaatctcaatccacttcacttcaacaccctattacggcaaacccgacatcaactaagcccaatagttcgcaccgatctgttgggttttatgccctaaataaaactctctttcaatataatccagattattcaatat

SEQ ID NO: 243323 - DNA, 1051 bp, Cannabis indica
caaaatggtatttaccctaaatagattaacctaaaagcacaatcatctttaaaaaagcattaaaaagcgtaatattttaacaatatttattcttatttattttttaattatacatcaattgaaatggtagtaaatattcaatacttataattaatattttttatatgattatgtaaagaaaaaatacataaaagtaatgaaaattataaaattataaaaatgtggaatacaaatttaaatttatataagatacaagttggtctaattaaaaaaataataataattaaggctcgaataaagttttacacaaacatactagatatatcctataaaattgttaacacgatacgacacaatcactatccatattttttcatggctcatcacagaacaatttatatttttgtgggctttgcaaaatacaggttgagtcgacaagcatgtacttacgatgcattctttgtaccttcgatatccaaattattttaatcttaatttgtttatatgacagtgtaatttaagatttcttgtagaatttcaagaaatttatattagtttaacatgttaaaaacaagaatcaaataatctgcttatatataatgagaaaactagtaaatttcaaaatatctcacactagtaactcacattaaaaggatagtaaacaatatttagtgttctttaaagaggatcactaaaatctattttgtagcatgagatatttatttcttatattagtcttaattttaacatgaggacattgttgggtttgcaaaatatattactttaatcaatggaataatgctcaaaatactacccttggctcatcatgttctgattatcaagttcatgatggtgtagagcattggtcccctccagttgataatagaattaaggttaatgtagacgcagccttgtttgatgagggtcgttctttggtacgagtatgctggctagagatggtaaaggttggttgattgagggacgaaccacctttaaggtgggcacggttgaaccaatcttggctgaagcaatcagtgtcaaggaagctctc

SEQ ID NO: 243324 - DNA, 10261 bp, Cannabis indica
aatgacaaaaggatcttttctctctttcaaaaaaaaaatatttagtgccattatctgttcgtaacacacgaatagatgactaaaattgtgtttgaatcatggcatgaaaggtttgaaacacatgatatgtgccaaatttgtgtttgagtagataaacccaagtaagacgtgtgtgatcatcaacaaatgtgataaaccaacgatgaccattagaggtggttacctttgaaggtccccatagatcattgtggactaaagagaaagggttggttggtatataccctttttgagcaaaaatagctcgtgtatgcttagctaattgacatatatcacattgtaaagaatcaaagttatgattgacaaacaacgatggaaacaaatgttttgaatatgaaaaatttggatgtccaagtcgaaaatgccataacataattttatcatagtttgaaatagaaacataatttaaaataggatcagatttagataaactagaacccaaactagagaaactaggttgttgtgttatttgttgacaatcttcaaagaaataaaggccaccgtgaattctagcactgccaatcgtcctctcggaggatagttcctaaaattgagaagaataaggtagaaatttagtaaggcaaagattatcaatcaatttactaatagaaattagattgcatttcaaagaaggggcatcaagggctgatttgagaactaaattattggacaatctaatggtaccaattcctgcaataggagaaagcgtgccatctgctattttgacactggaacgattaggacacggagtataggattcaaacaaagaatataaacttgtcatatgatcaaaagtacctgaatcaataagccatagtgtttgagagtccttttgggtagacgagaaattaccagtgtacaccagagcaagatgcactatgcaatcctaaaccagatgaagatttttgggaggattgattcagattagcatgtaaatggtcaagttgttccttactgaatggagatgatgcggcaggtggtagaatttcagggttgtttgtgtcatgagcttgatatgccttgcagccactaggacgtcgaggagtccatttggctggttttccatgtatttcccaacaagtagagcgagaatgtccgtgacactaacaatgatcacaccatggcctttcaccctttcgatttggtcgagagtcacaattaggcttactattggatggatatttgtacctgttagaagcacgggctgaactttcaagcatttcggaattctaaacctcagaatgagtgagcataacatggcgacgagcttcttcaagacgaacttcaaagagagcttctttggtatcaggaaatggtaaacgatcgaccaaacgcccacgtaaggaattcgaaaacatgttctttttctaactgttttcggtgtataatactacagccaagatggagaggcagtctcaagatacaaattgagttcctgccacaaatcttgtaagtttgagaaatattgagtcatagtattattaccttgtttgatctctttgagttttgttcgaatctcaaatatttgtgatgcattcccaaggtcggaattcatttttctagcagcatctcacaatactttagccatcttgtaaaacagatacttgctgctgattttcggatccatagaattagtaagccaagcaagtacaattgaaatttcagcttgccatactttataggatggatcaatcggagaaggtgtgagaagatcacgagtaatgtaaccaagtttaccgcgaccacatattacaattttgacagattgagcccgttgtaagtaattttttccttcaagtttatgattttttatctgaatggaaccactgtcatgactgtaaagggaaccaatggagccactagagagtgttggagtagtctgggactgagttgttgcttcattggtctaagaggtggtatctccaatggtcgacatcacaaaaaaaaatagagatgactttgagtgtatgcttaggtcatggagcttttctacgactaacaaagactattgtgcgcctgagagagccttctggtcggtgatggtgatctcacctgaacgttgactgatgtgtgcctggtcgggaacaataacctcacttgagagtcaactgtcgtacacctggttagtgacttgtggttggtcttcatatatcttggaatatctcatgagatttatggattgatcgtcaaaaaaaatggtaatggacaattgaagactttcagagatgaaagaccttcagctctgataccataacgatatatttgaaatttataatattatgatgtatcaaattagagtacatttataggaattagggtatataataaataaatataaaattaatactaatcctatcaattaggaaactaaatatacactgaataaattacaacaaatcaccaaatcttagggatttgattttcccaatttccaatcaatcaataaaatcgctatggagatgggtgttggaactaaaaaaatgtatccttgcactaaataagagaaccgcaatgtaaaatcaatagactgtggatccccatagaactaataggagaatcaaatcaggtagctcaccatacacattggatacgagtgtaaagttaaacaaaaattggaaatactagatgaataatgatgctactttaaatgttataataattacaaggacatgcaccaagtcagcacactaaccaaaaggtcccaaggggagcagatagccacagctccagcaacaggaacattatcaccatcctcaccaagatactttacctgcaagaaaaatatttaaggggtaaggtataaatatatatatatatataagtcaaggttttcacaacacattgaaatgttcctgttgaaatcaaacttttaaaacatgtgtattcatgctcatttatattgagtacttgaaagaatcaagtctataagtcaaaaaaatatgataaacttagtgctaaatatttccataatgctttaaaaagtgagaataccagaacattggccccaatgctagttccaactgtaaataaaggagctttcgagtatttattatgaagatgattgataattatgcgtaaatcttctgtccatccagcattgtaaaagcaatcagactgtaaaattttacataaaaacaaactgttaacaaaaacaaatcaagaaaaattgaaaatttttagcaaaagagatgaataacaacataagcaatcgttcactttaaacaaacattaagaaggcactacatgtcaaattgagaacattcactttcgtgcctgtattgaatgaaaaattaaaactatatactaaaaagtacaaccaaaagaaaaagtaggaaagtgtgcctataaataaaaccccaactgtgacggcttcttctcatgattctttcgactcttttttgcttcacttacatcatgtctttcccaaatagagctcgaacagatgatgattgtgtttgtggtgtatctagtttgctaggaacaagttttgcatgaacaagttacgcttaaagtgaaactagttgtcacttgggccattgactatcatgatcgggttagtggagcaaataagtagctaggacggccctcgccccacgtggactcccccggctgggggttattgaagatgaatgtgtatgctctgctcaaggccgagaccaaaaaaaatgggtaacaaggttgtccttcgtgactccgtaggcgaggttcgtgcttctgctatttggcccgcttttcccaaggtggaatcagctattgcagaagctatttcaatccttaaggggttacagttgtgtaaactcttgggttatttgagtctaattattaagtcagattgccaagttgtttttaatgcgttgaaagctaagcattgtgatgattcccatctaggatctattgttagaaatgtcattttgatttgtaatggtctttggtgttcagtttattgattgtcctaggttggctaatggggttactctttagctgaactagtgttgggggaggatgagcataagttgtgttggcctggctaccctcattctattgctcctattgtattgactgaaactattcatcaataacatttcctgtttttagtgagaccaagtttttctcaaaaaaaaaaaataccaactcaattacaacaaagccaaaaatgttgagagagaaatcccaaatctattaaaagatgagtgaaaggaaagtgacaaaacactccatattttaaagtcacgtaacaacctgacacttgattttctatatcatctaagcactgaagatcataaagaagctgaaaacctatctttatcccaaagaaacagctcttctcgagctttataataaaagtaccagcattcctttacaacacagcacccaagaaaaggaaaaacacagtacaagtccataaaataaaggctccttcagaaatcagaaccttgcactgagaaagactaacccagctgcagcaaacatcccataatagacaaaaccccaaacatgtaaagggccagagtaaaagcaggtgacaaatattgccaaaacttgtgaataaagttcacaatgttcaaccgcagccataaggatatttactgtaaaaaaagaaagtttatgaaatttaaaccaaaagattacaagactagacaatgacatgtctactctcttctataagaaacaaaaaagatgtggaaaaatgttaaaaataagaactcaaaatagaaaagaaagaaaaacattttacttttacttcagtgaagtatagataagaatagagttcacatcatttgttttgtttgttgtacctattctatgctcatgagagtagaaaattcctactattcaaaattctatttctttctaggaaatgtctctcatttatgtgaaaattcttaatttttacacagcatcagtgatattcaaattggggaactttcaaaaatacattttttttatgttttatttacaattttacgacctaaagtttttatttataaaaatacgcttgaaagttttaaaattacaaaaataaactttgctcagcagaaagtaaaaaaacaactaaaaaacaacaagaaaccaacctcgcgacaactataaatcaactaaaaaataaccaaacaaataacatcatgtgaactataaaacaaccaaaaaaacggtttattgtttttactaaagatttatttgtaaataaaaaagtttaaagaataaaaataaaaaaaatcgtgttgacgtatttttgtaatttttttcaattttttgtctattatgtaaatttttctatttaattactattcacattcttctaatcatgactaaaattaatattatctagtgtaaaaagaggtactttttctatgcactaagcataataatattagttacttagtttcctgatccctaaattttgtgggtttagcagtgagcctagtttcaatcttagaaagaaaaaaattaaaaacttatatggaaattgaaatgctacacaacaattaagaaatagtattttaatattcaagagctactcacagtaattgaaacgccacccagacctctgtggttgctgacaactacattccatccactttttgctatactaaaagcgaggtgctttagatactgcaaataataaacacaacgatgatgacgatgatgatgaccaaaaaatataaccaagttataaggtcaagacgtgcagcagagaacttacagcagacgtggagtcactggttaaaccaggaattaccaccacaatcggagttgtgtcattgtcagaagtagcattatttatgtgaaacccaccatcaggaactgtaaaatctcaaatacattaacaacaaaaatgtatattccaaaagcatttcacacaaggctataatacttgaaaaggaaaaagtgatgaaacttgaattaaaccaatatcataagaagctgaaaaaactgcccacccagctaggctactcaatgttcacgtgtaaacagaggcatatgcattctaattgtgacattgacaataactcaaagctatgcgggagtcaaacataaaagcatatactttatgcaaaataaaaagtttacaaaccaaagccacagtgataagaagctaaggtctgagaaacattcatccaagaatcacacatacaagaggagagatataaaggagaacccagatattacgaaaaaaaaaaccaaatttacaatcttaaaactgaacgtctgttggagatgaccttaagcaactgttagagcactaggctaatggacaatagacacaagtgcctaccacaatgcaccaaacaataattgagagagacgtacaccgaccagatgtgcatcataaaaagaatatccatagctaatcaaatatatacaagcccaacacagtttgtttcatttaacttgaagacatttaattgtcctttctacttttctttgggtagaaaaaaaatgtaatactggcccaattcactaggcctgcatttgtatgtatcggtatgtgtgtgagtgcttccttctacttgacttctttttcttccgttttttgtgtaatacatagcaatacattttattttcatagagcaaatacttcaaagttaccatcagaactccttagccagtccaaggcaatcgtcccaccatcagcagcggtgaagagctctctgggagagaataatcatatcatcttagatgcaacaatgatttaaaacacaattagggaaaaattattaaaagagttgtaaccttaacataaagaaaaactaagtaaaagctagaggcccactataagtaatagatcataagcaaaagctctgagccatcatacactaactccaaatgccacccaaccggctaaagcaaaagaaaagggaggggaatttagaaaaaaaaaatgaataaaacatataatagttgctaatgtaagataacatccaattatatcccaacagcctatcctgagtagtttacaaatatccccaaattaataacaaaaaaaaggagaggggggggaggggggggttgtatagaatattgaggaaaatgcattctgcattctttgatgcaccagtaattcaggctctaatgccatttcgccaactagcctttcagatactaacaagtatatatagcacattcaaaaaaaataaagagtcataaaccagtaaaaagaaaaactggttatggctttgtaacaaaatcatctatgaaaatggtggttttgcaactatcataagcaaagtattctatagaaatattggttaacaacttaatacatcacaaaaatacagggaaagatgtcctctgaaactaaactacaaaggacagtagtactgacttctaacaacgttaatcacaaaatcaccttggttagaagcatgtgtacctgtactcctattttttaaaaaaataaaaataaaatagtagacaccgaacgaacttaacaaattttgattcctctttaattacttctctatgatttctcaatgctatgtacacataacaatgaaagctatgtaagttctgaagtcaccaacacacgaatagataaataattcatcaaccgagaaggcaatttattcaatcattaaggctaaagagaaaaacatttatattagttaatagttatggtgctctgaaaagcattgccaaagaacattcaagtggataacatgacgaaaacaatacttttagaaactgtaattaagtgactagaataagctaaacaaaccaaccttttgtagctaaagatgggtggccttccaaagaaattgagaaaacatgtctgaatatgaggactagacagccatggcgtagctaaatatctgagcaaagtaattacttagaccattatttattacaccgttcaaattaacataaaaaaaaacgacaaaaaagaaatacaatgaaatcattaaacattatcgggaagcaatcagaaaaatcaaaagaaatttaagaatctagcaactcaataatttgatttgatttgattcaccgacctgccatggagaatccggcacttggaaacgacgccattatagatatgagcggatgagttgtaggtcaaagtaatgggagagcctcgaaaggcggttaaagcgtcttcgaagaggtgaaattcgaggaaattgtagagaaaaaccagcgaggcgacgagagaggcgagcaagtagtgggaaagagggataaaagagagagcgcgaagcagaagggcgtagccattggtggaggaagatattgagtcgctttcaacaatggcggaccagttcatggtgacgacggtgttggtgagcaaagacggagaatccgagagcttgaatagcagtaaaggtccctataggctggagtctggacgatgacatgaaatagtattagaagagactttggcctgtgaataaattatgaattatcaattatctgtggccgcataagtcaaaagtggtccttcaatatatttttgttttgccaattactataatttccaaattgtttaacaaaataaaaattaaaataaaattagatgaaaaagatggtaatattgtaattaatttaaaaatacatatattcagaagacacattgtagtaggttcattcaatctcgtagctttaatacttaactattgcgtaaggtacgtaattacatactagcaatcccttcggccgcaaagaacttattatttttaaccattaacaacgatttgatggcgagtcatcaaagaataaagaatcaacaacgaaacaaaaccatatcacacaaacaacactaaaagactcaatatcatgtcacacagacaagacaaaaacgctcaaaactatatcacagagacaaaactaaaacacaaaaattatgtcaaagagacaagactaatcgcggtagcaaaaatcaaattgcagtagtaaaatacaagtcacacctaagtcggtcggcgggcctgaccagagaaaaaaacaacctcttatagctatagatttaggaacgaaaaaccctaactttttcccctattatcaacccttgatgttagaaattaggtctaaaatatatatggatcttaaactcatgtgagactatcaagattactctttgaatcaataagatgaaagacatacctgattccatgatattgaatatgagatgagattgtgggtatatggtcttccacaaactaatcttccctctatgggttctcactcaattgatgggaatggaggagaagagtagttgagattagtctaggggaccaaaccctaatgttctttatatagcaaactaataagagccccataaatcctagttaggtttactattgggtattacacattacaaagctcataccaaataagatattttttaggctcatttaattagatcacttatttagcccaatttataatattagctcaaataaattgtcttaatttgtaagcccatatattagattattaaaaataacccaacaatctccaacttgagctacaaattaattctaatgacaattacatttgaaaaccttatctgcgcaaaaacttgctaattattcttaaaacatcttctatagacaatttggtccatctcttataccaatatgagaccaaagtggcccttcgttacatttatcgtgatggacccatcaatgatcactgaaatttcgtttttatatttaccaagtgaacttataaaacaattcaaataatagcgaaactgtaataaaattatttgaatagaatttatctctgttctatcagacacagaatctgatagaacagaattatacaacaaaaagtaaaattacaaaagataaaatggcacacaacattttatacgtggtatcggcaaccctttcgaattgctcctagaccatgggaccatgccaagagaatgaaatttattagatgaatctcaagtgattacaaaacctaattgacttatacaaataaagactcctccctctttgaatttgctacaactgttgtaatctattcttctaatcaaatttctgaagtgtcgagaccttgaactcccttcaaatcgtagcacttgcacacatcatcctaaagagtgactcacttgcaatcttcctcccaaaaagtatctaacttgtaatcttcctcctgaagagtgactcacttgcaatctttctctcgaagagtggctaacttgcacttttcctcccgaaaagtgactcacaaacaagacttctctcgaagcttgatg

SEQ ID NO: 243325 - DNA, 3478 bp, Cannabis indica
tttttgtaatttttttttctttttgtgtatttgtgaaataatcctttttttatttactttttttatactaattaatgtaattaatttttttacacatttctacaagaaaaagaaaaaaaaatcatcctaatatattagaacatagttgtaaaattttaattaaatataatattaattcatattttggactaaatttagcacaaaatttacactattcattaaaaatggtctaaaatttccaacatgtagcatcttagatcaattttttgtaattattattagatcgtcaacatagcattccctgattaattagtaatttaacatattatttaaattaaaatgtttataatcaaatatataatttatagtgttttagtatcttaaaataccacttagcatttcactaaataaaatataggagattccatattgaatttcaataataatgtctcaagtggtgtaaatatagtacaaatgttgtaagtagaatctagctcacacaaacaaagggtttgtctaaaactaacattaagttatcttaagaaaatcaatcgattaagttttaaaggaagaataataacagaaagggaaaagacatacaagcaatctaaagaagaacaatatgttaataatttcattcaatgacttgaattggtcagcacaataattacttcatttgacacaaaataaaaaagaaaagcaatcaatgtaaagtgattgctgagacaaatctgttgtacacaaaatgaggtgaccaccaattttggacttgttcctcgtttgcctttgcctgagtgaggtaagaatatataaaaatatgtgtatatatatattacatatacagaatttgcgtgttttgtccttcttatgttcaatttttttgaataaaaaatgtgtgatttctttgaaaaaatctttgaagcaagaaaaaatggccacaaagagccacctattttttgcttcttcctaattttgttagaatcttttgttccaacatagatgtttcagtgtgaagatcaaacattctgtttagagccctcatgttctctagtacctcgtttaagctccgaccactgtcgtcgctcccatcgcatctgagatgctccattggaccatggaggagctttttaacaatgcccatgctaagatcataaacagcttgtttgtctttcttagagatgttttcacccaatttggacaaacacttatctaattctgcagcccttattctttcgacataagctctgaacttctttatggtgggaacagtttctcgagaatctttccaggcttcgaatttgcctaattcctcatcgatgatcacctgagcttccctagcttttcggagtctgtcttccatgttggctgacacaacttcttttaggtcgtccacatcataaactcgtgcagtctcaagatccgagatagatgaatccacattgcggggaacagaaatatcaacaaacaatcggttgccaactcctggatgaactgggggaagcatctgtacttcttcttttgagaacaagatggtttctgatgcagtactggtgaaaatgagatcagcttcagctgcacttgatagcagttcggaaaagggtttataggtaatctcaacgtttccaaactcttctgtgattgcagcaactctctcctcactcctgttgaccaccaccattttttcacacccttttgctatcaagtgtttgatcacaagtttccccatcttacctgctccaaccaccaacactcttgcattggcgaaacaaggttcgtgaagcttcaatagagctagctccacagcagccgaactgacagagaccgagcctgaggaaatgtttgtttcagttctaacgcgtttcccagcagtgatagcatgcttaaacagcccaccaattccactaccaaagccagcaactccctgcccaacttttacaacatgcttaacctgagaaagaatctgaccctcgcctaaaacaagagaatccagcccagaagccacctcaaacaagtgctgtgtagcatctttgttgtacagcaaaattcggtgcttacagagctctgaaactggaactccacttgtctgccaacagagaagaattatgtcagtataaattacaaactaaaaaagaaccaatagtgtataaagtataaaccataaagacagcaaaacgcaccttcgacatccattcagtcacttctttaaccccgcgatgctgagataaagccttaacatatatctctattcggttacaggtactaagaacagcagcctcctctatatggttcaaatcacagagttcacttatggcttgaggccactgagattcagggatgttaactttctcgcgtatctcaacaggagctgtgtgaacattgagtcctacaatcacaaagctgctcttttcttttgtataccctgatagaataaagtggacaaattgaacaagttaggttaggttacatacttcacttgatgaacaacttttggtaacaagaaaaagaaccaaaagtctaaactcaaaaagtattctgaacttgattcatttttttgttgaaaacaattaaatttgcatatatgtctctatgctccaaaagagaatatcacaattaaagaattaaccttgacactatttttttttgctgaaaaatcttaacactatctgaaaactcatgttaccagcaaaataacagataaatttgccaaaatataataaactagcaaaaacaatttactttttttgatgttcttgggccaaattcatattgcatataatatttaataaatgaaaattttcataatcaaaaaaacaaaaggaatttgctattctacatataaatgttttaacaacaaatttcgaaagagatactctcagccaagagaacaattgacaattaattcagcaaactaattaagcaatttcggcaaatcaacgattaaaagaaaaaacatatatttgaatgaaacaaaaaatacaagcctacaaataatcgggactcactctcagccgcggaggtcttgagtttctcgagagccgaaacaccaagagtcatggactccatcaccatacgactgttttgcatcgaattatcagagtcatcgatcatcgaacatctaagacccaaactcaaagacgaagaccgtctatcggagaccaatctcttgatccgcagaggagtgtatccaaatcggatctgagaaagagaagtcgaggaggaattcgaagtggagagctcagcaaccgcgttcggagagcgggtgggaaagccattggtggcggtggcggccgccattgatgaaatcggaagctaagaaaggtgtgaaagtccagatcagaaggaaaaaaagcgcttggccggcacacgaagataggaatttatgtatatatatatatatttatataaagtggcctgcgaaatggttgaccgaagaaaaaacacgttgtttagttgtacctaatcaatttttttttttttt

SEQ ID NO: 243326 - DNA, 1494 bp, Cannabis indica
aagaaagaaataatcagctcattagtaaattgacactaatggtaccatcagttcaaaaaaatcgatactaattttgcacacctattaattaatagcgtcaatttcaagtgttaaccaacgtgttaaaccgacaccaacaaaaaattgttttgtattgatgtgaactttgtctaatcatgtgttgtatcacacactggatacggcctatttatatagatatataggtaagtgtacatcagtcatgtcatgatctgagtcacatatattatcatgatatatatgatcatatatatatattatcaacccaaaaccatatatcgacaatgcataagaaaaggggtcaatagagcacacctatatgtataataatataagcttaggaaatttatgttgttttgtgtttttatataaataatattatccttttggggcctagatttcatgattacttaatcaggtagcttaatttatcataacaaaaggggaatctttatttgctgtctccaacatgtaaatatgtaatggtcttgtttgtgttccgagtggccattaaatattatatacaatattgtacaatgtcatgtttttccaattacctaggagagtagagagcaggactaaatgatcaataaaaacctatactacttgatcatggtcacatatacataatataattaaacaccaaattaattattaaggaagaaataatatcaagattttcgatttaacaaattattttgttttaaatagatcatttactacaatggtcgcatgcaaattaatttatttgttttataaaaataaaattatggaaagttctaggtggcacgtctctaattccatatccaatgtaaacttaaaatatctttcttcaattttttttttttttgaaacagatatttctttaatttaaataacgattatgtcaggaaacatatgaatgtattattgtgtcccgtgcaaaattgtgatgagactaataatgaaatttggaagaaaataagagaagagagacagataatataaattgattgaaacccaataatatgggaccataataaaccagagccattaatatacacccaaaatgaaaaataggattggatatatttatatatatacattatgtatatgtctctaaactcaggcatgcatgcacaaaaggataaatataagtgatgatttgaagcttgaccatacgtgctgtcttctaaactttcctctattcactactgttccatgttatacgcccatgccttctttaattaattaatatttatacgtatatgtaacaatgatacaatctataaacggttcttcctaaatatcaagatctgcatattatcaccaacgacaaacctctttttaccaatgtcgtcagtaataatattatcactgacaaactatcaccaacgacatgttgccattgatggttatcactgacgaaatttgtccttattaaagagggtgattgtagtgatatatggtataact

SEQ ID NO: 243327 - DNA, 5812 bp, Cannabis indica
taggaaaggcgtagaaatttaccacaaggtaaatcaccgtccgagactcggaagccttgtcatcccttcttctgtcgaaggataccaaatcaactaagcttctcgagggatttatgggagccatacgaagagtttaagacggatcccaattgcacaaggaaaacagaaagtctatcactaactgaaagccgaatgaccttatcacggttatacttttttgacacatgatcagatcttgtccccttatgttagatcatggtagtgcacgcacctccactgaatacaccttttgtctgatggcccctctgagcattttgtctacaggtgcaacctctgcccgaacgtgccatgcaccaacaatggtcccaattgtacgggcgctttgccccacaagaaagagcttatttggagcccaatagtgagtatttttatgtattttacctcaataatggatggactttttacaagaaacactagggtgggtcatgggtatgcccatactcgcactttagcctatataagtctctttatttcttcaaaaaggaggaatcaaaaaattacatagtcgaagctctgctaaaatactcactaagctttcatcttcttcaagagaaacctaaaaatgcaaagttagggtgtcattgtaaacaccacttgtaatacatttaaacgcctacaaggccaatatactaactcgtggacttgggataattaacatgtgaaccacctaaaatcatttgtctcatttacttaatcgttatttaattcctaaagctttcattaaattagtttccaaaaatctcggtaaaaattttggtgctttctttgacagctgaggaaagatctgagccactacattttggtaaccatagtggctacaaaaaattagtgatatgaaaaactccttaggaaaacgtcgatgtcgtcatggatggtgtaaacccttcccctctgaagcatgcccgtccgagccatgcgaggggaagggatacgtttgaagttaacaacagaggggatgacccagctcaacgtcacaagcaagttgaagatgaagactctgacatcgaggatgaggaggaagaagatgaaggatacatcaaagatgactactataaaggcagatatcattatgaagcaagatccagatctggttcgagtatccaatgaactgcttgagacgcaatagaagttaacccatcaagaagatttcttcaaaagatggaaaagataatggcctgcctccatgcgaactttgaaaacctagaagaagattttgaagaagttatttcaatggaactaattgacggagacaatagagcgaaccctaccaacatcgaaacctcagctcctgcaaaggataaggggaagaagaaagtgggtgagccttaaaacaaaacaactcccttacctcctcaaaaaggcatgaatctagtcaaccaaccctcgcaaatgcataaggcaactaatgcctctgggcttggacacgcttttgctccaaaaggcaaagttgcgccaaaagggcctggtgcgaaagtacctaagcctaagggaaggaaaaactaacctagtgattctgttaatcaagatggtgggaaagaagaacaattcatcaaagacagatggtccactatagaccttcaaaggcgccttgacgcaaagtatgaaaaggctaaaggagagaaggaaaggccacgtggaaatgacctaaggaatcacttaaatgatcagcctcacggacgcgaccatctagattgtgacacgaaaaggtttgaagaacaaatttttactttgactaagctcatctggaagcaaagtggggccgtctcagattcagaagatgaatacccaaaaccgtgtatcaggctgttcacgaaagtcacattacctaaaactttcaaaatgtcataaatagagttatatgatggtcgtacggatgctagcacccacctgtaaaaatataacaagatgatgaaagtggcaagagtgagtgatgatgccaagtgcctttttttttcattaacgctaaccaagtccatggaagattagtggaagaggatagctcatggatcaatccatagctagaaagagttacgatctgccttctagaaacagtttatagttgcaacagactatgatatggaagtcagatccctcaccatcatcaaacagtagccaggtgaaagcctgaagacctttactcaaatagcagttgggatagagaaaatgatagagctgctagatgatgtagaagaggtcaacatttgtggtactcatccaaccaaaacaatcaaagtggggagaaacttacatccaacgctgaaagagaaaattgtggcgacggtaaaaaagaatcaaagatatcatggagtggagtcactcagacatgaaatggatcaatccaaatgttagttaccatgcccggaacattgatgagaatgccatcccagtgtgccaaaaaagaagacctttagacccgacaagagtgaaagcagtaaaagcagaacttgagatgttaacttccattgagtttttgagaaaagcactatacctagtgtggttggccaatctggtcttagttccaaagcccaacaacacctggaggatgtgtattgaattcaaagatctcaacaaagtattcccaaaagactgtttcccccttccgcgaatcgatcaaatggtggatgccacgtcaggatacaaattgctaagctttatggatgcctactttggctataatcagattaagatgcatatcacagacaaagaacacacatgcttctaaatggataaaggtgtgtatattacgtggttatgccattcgaattgaagaatgttggagctacctatcagcaattggtccataaaatgtttaaagatcaacttgggagaaacatggaggtatacgtagatgatatgctcgttaaatccaaaacttctatagaacatggtgagaacttaaaggaatacttcatagttattcggaagtatgtaatgaaacttaacccagcgaaatacacatttggagtctcctctgggaagtttttgggtttcacagccagcttgtgggaaattgaagctaatttggaaagaccaaaggatttgtcgacatgccttctcccaagaagcacatagatgtatagagtttgaccagaaggatttcaaccctcagtagattcgtttctaagtctacgaaaagtgcatctcatttttcaacatattacgcggaaataaaaaatttgaatggactgggaatgcaaagaagccttccaaaaactaaaggaaaatttgactacggctccaattttatcaaaaccagtggaaagagagtcgttatacctttacttggaagtgtttggtcatgctgtaagtgccaccttactacgagaagagggaagggtccaactgactgccaatgtattacataagcaaaaggttgttgggcgcggagtccagctatcccatgatagaaaaattgtcattttacttgctaattgcctctataaagctgagatcctactttcaagcccacgccatcaatcctagggtagtaatgattagccagggaggtgtagaggaggatggtaattaatttctatttttcgaaagagggttccgaagagaaagggggaaagtcaatatggattgaaagtggttagattagggatttgaaaatgaaaattaatggcagaagtgacataatacagagagtaatggtggaagtaatgcgtacgtgctcaaaggaggcttagcttcgtaatggcaaagtagccaatgatggctgcagtgacaatctgatgtggtagactgttaacggcgtgaaccagcatcctttggttgggcattaacagagaagaactgtcaccaggagctgcaaatcccggacggacaagaacgctgagagccggtgatgacgacaacgactgaatcatggaaaactttcgaagaaaccctagcacagcgttaatggaagagtccaaaagtttaaaaataaaagaaaattctagagatgctgaaagttttgatctatccactaagaaaagatatttttattagacaccaaattaaaataattatttaaataaaacttaagacactatttgagaggtgatttgagtccaatttggattttggaattagggttaatgaattaggatctggtcattcataataataataaatgataataagagaggaaacacatcagagatagagatattcccattccatggactctctactagccaactatgcttcttccgatgatgaaggagaagatcaaccacaaccacagtcacctccaaacccatcctccttttccaacgcctcatcacttttctcttccctccctaaacccaaacccaaacccaaacccgaatcctctacttcatctggagattcgagaaccattcccaaatccactgccactgtttcaaacacctcgtctctcttctccgctcttcctcaacctaaacccacctcgaatctttcttcttcgcagcctaatgccaaaagggttgtccaatttaagcctccaatcaatcccttcttgagcggaatcgatgaagaagatgacaacgaggaagagcttgcgaagaaacgaaggcaaagaaaagagcccgaatcttcatccgaaacctcttgggggaggtccttactgtcgactatgccggccgctaagaactccgttaccttgggtgcccttccatcttctggttcgggacgcagagccattgttgaaacggaggtctctgcttcggcttcgaattcaggtgtgtctagaactgaaaaggaatcgtgtatcgatacaagttatgtgaatcatgataatttagggaattaccaaatgggtgttgatcaaaatagtgggaattatgcgcatcaatatggttatgaaaattacgggcagggtgctgaccagaatgcaggttactatgagagttacaattcgggttttgatcaaaacgcgggtgttcaacatgatggttatgagagctatggtgattatactcaatatccaaacaattgggttgataaatcgtctgctgcagttggggtaccggaaccggagatttcagacgtgagttttagtaattttagaagtggaaagagaggaaggaatgagattcctacagatataattgaggtgaagcaagatgatttgatcaaggaccgacccagggaggaccaggtcaagttaactggaatagcttttggcccttcttaccaggtactatactcgtaaatttttttccttgtgtgccatttacttgtaaactgaacattaaattatgaatcatatgttgtgtatctttgtatattttgttttggattgtttggcagcagtgtgtactttgtgctatgtctaacactcagactcagctataaataaagaaacttttcgacaaactaaaccactttgaaacaataatcaatggattagtagtactggtcattccagcaaactttggaacttgattaaaactcttgattccaattttcttttccaaatgcaagaataacatgaatattattccctattagctttagtaacttcagctctagtcagaacttaaacttgagataccatcattaacttttttactgtcattttcttgaactgaaatgtgattttgtttgcctaaattcaaaaatgatattcactgagttattttagtttatgtttacactttgggatttaatttttggctggcactcacatggttgtaagttatacaaccaatagttttaatcatcatctttcacagtattactagtttcattgactttcatctcattatttagagagaattct

SEQ ID NO: 243328 - DNA, 3923 bp, Cannabis indica
gagtagctttacaatacaaatagttgtcatcaacaaagagcatgtgggatatccttggagtgccattggccactttacacccatgaagcctactccgttattcatatttcctaagaagttaaaaggccctccgcacacaagataaagaggtatggtgacagtgggcctccttggcagattcctctagagggaacaatagggtcgatctcatggctctcatggataatatggtatctggctaatgtcacacatttcatgataagttgaatccaatgatcagtgaagccaagctttctcaacatagcttcaaggaacctccactcaatgcagtcataaggtttgctcatgtcaagcttgagggccatgtaaccatctttgccattccttttccttttcaaatagtgaagaatttcaaacgaaaccaggatgttatctgagattagccttcgaatgtactttgattagaaaatataatagaatccatgaaagacttccttctattgatcataactttagtaatgattttatacataacactacacaaagctattggtcgaagattagacatgtgttccgattttttcttttttggaattaaaatcacattagcattactgcatccattttcaaaagtgccactctcaaagaactttctgacgctattaataacatcacgccccacaatattctagcatttttgataaaaagttgggatcataccatccaatcccggactcttgtcagggtgcatttgaaagagagtctttttaatagataaaaagatgtaaatatccctatcttaaagggatatatttacctacttgataaaatgttttgtaagccctacacaatataaaggacattaggtctctctcattccataagctacaaagtctcctcttagcctcatacacctgcaagcctatatctctcttaatcctcacattcaattcatgcttcctaaacactaagtcaaggatctttctttagtccttcacaacttatcagttcttagtctatcatgcactcaattcttaccattgtaacattcaaaaagaattatagttaaaaattacaaggtaaaaatatgtaatctccatggtactatctttagaaactaaaaagagagtagatcattacccgctaactaatggggacaaacctctataaattgttgtattatttcctttacttgcttttattatttacacgtagtaataattaacaaataataaagctctccatttgattaaattcttagtcaacaacaagtgtttttggtacactacttaattacattttcacagaccaaagaaaatgatgtgatataaaaattcatggaaataaaaagtaaaaatttaataatgtattttaaaaaacaaaataaagaaatgctttctaaaatttaatttttatatactaacaaaattatatctcacctaatatttcacattttctctttttgaagtttttaagttaatagacttgactttacaagtcattgtaatatatataaaaaaaaaaaaatactatatggtagcctatttatgtcaggttaaagaaaaagcactcttcaataataaataaagtccctttcaaaaaaaattaataataataaatagaagagttgaatagatctctatcaaaacatatgtttagtcaacataacacctctggtataatttggcacagaacaaattattaaggaaaaaaaaaaaaaactttgactagaaaacccttactcctagttcacagtgatacagtgtatcactatagcacttaaaaacaaagaatcaaaaaaagaaagaaagaaacaattggccggggaaaacaatatctcaagcccattatactcccactaattacttgacaatgttgacataataaattggttacacaagaaattctagtagactattagttaaagatttttactatattctttaccatttttctattcgaagtatgtggtttaggaggacttgagctcaatattagtttggttcaatcaaaggtacttgttattacacatgagcattgttattaagtcttgtgaataattagcaatatgttatagaattatttaattaaaatatgtgaaatcagaaaatgacaaatccacttatattctttagcataatatgccactcaatctgatgtgaatatgcatcgcagagagtggtcttccgtgcatttcataattttgtttgccatcatattcatatcttatcatatcatatcatgtatagtataatggtatatttgtagactatttctggcttgtgctagcttttgtatcagaaacaacgtgaaagtggaaataattggccctggaaaggacagtcctttcttttcttttttcctttctgcaatttggctccaaacagtcaagctggctatcttcaacttttcagtaagttttaaccaaaaacaacaaaacctgaaaactctgttctcttttaactagaacattttgcaattctgtattatatgtagagtgtggggtacttttggaagagagatttgagaatattaatcatgcccatttatgacttatgagagaagatccaaatctaaaaccagaatccaaaaggattgaaaacaagaaagaaagaaaaaaaatgtataaaatcaaagatatggtaatgatgaagattatgtgagtccacttcattagaattcgaaacctcaattatgtagaagaagaagaagtaacaagaggttgagcagttggttggtggtcccaaggggtttttattattattacttaaattgaaaaaatgagtggtggtgtgaataaaacgaagacacactcacaacttactgtttcccaccaaaatgtcattagctgtttttgttttacttttgggcactaacagagaaatttgtgtgaagggttgcaggggatgacaaagtgttgctagtttatccccacacccatctacaaatggggaacaacagtctgacattatagaatatggaccacctatgatgttcttgtgatgcaaaaaaattgatcatactttcacccttatgggtggtaaccttagtgaataattacaaaacaagctgtttatatgttgtatacgtagactagactgtggttatattatagatataagtagtatacactacattcatgcatacatttattttgtcactaaaagtaatatacacataacaaaaaaaattccctactttagcaaaagaaagatatcccaattttactgggtctatatatgatttatcactaatgtttatagcagacaattgcacgtgcatatatttcgactcctcatatctcatggagccaagttatcatacagatacagtacatcccaattgggagagaggctgctgtctcatgaaagcaccctctcctctagggtctacccgagccagaattttttcttactttattttaatttatacatattattttctactggagcagataaagtctttcaagacataaatatacaaataaatttaatggggattgaataaatatgcaaatttgttgttttcttttctgttattgaattcaaatttatgcactcctactcctaccatgtgtcgccttacaaagagtaacaaaattttacactagttattcaattaaattgcttcaataacgatgtatcattttaggatggtactaaataccataggtggcccaaaaaaaaaaacaccattggtggcctttcaattctcaatccccaaagagaaactctcgttcatttccaaaataaactctggaaaaatatttgtacagtaacacaaacttcaccaccataaccatttgaataataataaactataaacataccagtgagtgagtaaacaaataatcaatccctagtaataataataataataacacccagacccactgtagatgaagaaacgtcaacctaaataaa

SEQ ID NO: 243329 - DNA, 2854 bp, Cannabis indica
aaactttctttcgaataacatattttcttattaatcataaataatgacaagaatcattagacaataaacatgagcacaatgaaagaagttattcaaatgtcttctttgaaaaatcacaagacaacttgctaagttatttacgtgtttttttaaagacaaaaataaacaaaacagcctcgtattaatttaaaagaaaaatacaaagccatggaaaatccacaggtatcacgaacaatgaaatgatgataataaaaataacaaaaactggagacaggaaaggaaaacatttacaaaattacattccattctcttaacaagttgttaccatgtaagaaactctttcaagcgaacttacatgtactgagcattggggggaagttgataaggtatatcaccattgatgttgttcttgctcaaatcgctgtactatgacaaacaaaggcacagtctttataatatgtccttccaagaaaatagacaaaattagaaaaataagtatatgtttcagaaaactgggcctcacaagtaagtgacagatgtcaagcttgaaagctgataacccattgatcctgaaagtcctaggttggacaggcttctgcaacattgttaacaagaaatacataactgaatattttagatgtccttaaatataaactttgagctatattcacccaaaaaaaactaaataaactgaagtcaaagaaacacacaattccaagattattacatttcagtcacggaatcgcctgagcatttgattccatcccaagaatcaccacatggatcacctccacttgatttccatccacttagttgtgaaggagagtttaagcttgtatacatcacattaagagcagagactgtaagaaaaggtgagcaaatatggaatcaaaacgctaaacatgatcaaaacataagtgctaatgtacatcacactgataacaaaaaaatcatgaatactatcaaatcatcacaagatagttcaataacagcttttaaggcccttggataaggaattttctcttcttttgtctaacagaacactggtgtggcgagtacaggaccccacaccaaaactggaatagaaaaattcccggtgtttctctactatttgcagatgtgaattcaagttgaacctctctccatttaatttttttcatttagaatattcaataaatatatatattatattatattatattataaaaggtaacatgatttcaatcctatctgacaaattctaagaacgtgaaatgtttgcataacatttgcatgccaaacatgtcagcagccaatctctaattcttaatatctaaatcatgcatcctgaataaatggaaatggacataagaactacattgaaaatatgaaaatgagaaattgaagacgcattaccatctggggcattggttttggagaaaacccgagtgacgaaaactccagagagaagaacccacagcccaaaaagaaggtgatgctccatcttcttttctcttctcttcagaagatgagagaaaagagggaagaacccaaaagaggaaagtggatatgttacgatggagtggaagaagaagaagaagaaggagattcaaccataacccatgtcatgaagagttttgcaaaaatccgttggtggtgagtttgggtttggaattggaagagagaaaagagactaaatttagaaaaatggaagaaaaggggttttgcagttgcacagttaagccatggcattgacattggaattggcattggcattgccatttccattgatgacatcgccacaacatccgaaaggtcaggagaaacgagagcttcccaaggtttatcggactgacccgcgcttttttctgggcttctttcgtctctcttctcttctctcctctcatattctctctgcctaatttttaatggaaaattttatttaccccaaccaaaatttgtaaaatcaccgtattttaataatttttattttatataaaatttatatctttaattatattaaattgtaatttttttttcttctaatctatattcttaaaaaaaatatacttattaaataaaaaaaatataccttaaatattataataaaaaatcaaaataaaaaattatataaaatctttttagaaaaaaataatatatatgagttagaataaattataaaaataaaattcaaataagtattaaaattaacataaaataatataaggaaaaaatttaaaaaaaatattaagactaatttttaaaaattattttaaatttatattttcttaggtaaataccgttttagaccttgtattttacaaaagttactaattggatcatctgttttgttaaattacaaatggaccctatatttttcaaaatgataaaaatagaacattgagctcaattttcaaaaattttatttttcaatataactaactttaagataatttctaacacgaatagatacaaaaaatgtaactaattttttcataacatttctagattagattattaataagttttattttgacaaaaaaattagttcagagttctatttgtacaattttagaaaatacagaatttattttgtcatttaacaaaacagagggttcaattgataacttttgcaaaacacatggtccaaaatagtatttaccctattatctttaataatggaatttatttattattttatggggtgcaatcggaaaattccttattcatatatgaggttgtggcttgtagttgtacagataactaagaccacttagctatgaataaaatagtcatattaaagttagggaatctttaatcaatggttgcttcactgatgcccattcttcggtgcaagtaatctcggtttggatta

SEQ ID NO: 243330 - DNA, 1442 bp, Cannabis indica
attattatgtaaaatcatttaataatcacaaacaaagggaaggtttaaaagtattttaaattggagggacacacaaggcacaggcaatgggaaagaacagtgaatttcttttcttggttaagttacttatctataactgatttatgtatgattaagttacttatatgatcacaaaaccaaataactggctataaaatattcaatttctaataatgagaacgaaataggaaaaaacaaaggaagaagaataaaaggaaacccccaattacgtaatgagtttttaatcatatgcaggcgcgcacgtaccaatatataactacttattcgaagaggtacccaagtctttggcacagccttttcttactagctatgaaaaatatttatacatatatatatatccaaacaagaacactgaacagttttgacagtcaatgtatatatggatccatcatctttttcaagagaggctgctcaaaccagtggcactgttgcagccaatttgttaacaagggccaatgcattactcgcagtataactggctcttgacaccttagaccgtaaagggttcacttctcttcttctctttagtccttcaagcccttccaagcacgtgtctgcatcggttagtgccgcactcagccaagtgtttacgtcgcccatctgcgtcccgaaagttctcttgctcagatttctcatcacccttagtgactggtggagctcgtcaaccgcgttgtcaaagagctccacacagtccgacactgcagctctgaagtagtttccttttcctgatctggtttgattgttgttgtttcgattgagcttcattaggtactgcgccgtgtctttggcctcgctcagggtgacagagacccctgctctggcccaaaggacagggctttccttagccgcgcttgaaaatggcgctaaagtgcggacgcagaggctgcggtaccttgtcacgctgcaggcattgcggacgtacttgtcgccacggctgttgtttgccgtggcgaaaatggccgttctatacatcatgagtaagattatgaagaccgaatatgggttggctatttttaatgtcatagctacaaatatatgtatattacttgtatgtatagtaagaaaatttggtgacttgagtatgaattggaagagttggcttggagattataataattaatgaggttattttgtattagggagttgtagacacatatatatatatagatagttttagtgttgtaattgaagtcaaaagggaaggttttgtgagtggcttttttagctgagttggaaagggttaatatacttacgagaattgcaattgggcaccagtggatgtagccttttaacacataggagagtgttagacactattggtgccttttaacatttctctatacctatattattttggttgggggccggcaaattagtatagc

SEQ ID NO: 243331 - DNA, 2494 bp, Cannabis indica
aaattaaaaaataatatataaaacaattttcctatattacaaataatataattaaaaaatgaattaaatgcaacataattgaatggcataattttataaaatattattagtaagaaaacaggagcagaatggtgatgaaaataagtggtgcatatatgtaaattgcatacccagaggtcttcttcgtcttcatctctgaatgaacatgcagtcttgggaatctcaccaggttcgtcgttgcgtgcgaatctgccacgtatgcggggtctgttgtcggctagtgtttttctacatgcatacttattaacacaaaaacaacattaaaacgtaaaaacccactctttaatttttagattccaacacgtattcatcatatacatatatatatatatgtttagcaaaagagatatttttcttttacacaaataaagttgtgacttatttctttttcattatttaagtttgttgattattaatccttacaaaaagaaaaagtttgttgattaattctattccgttaccttaatagtcttgttgaagtttctgagtgttcttttggctctgtactttgaaatcttctcttttctttcttctgcactgtaccttcccactttgaagttgttgttgttgttattggcttcctccatgaacgaactctctgaagctaaaggactcgaaaatgatctctgggttgttcttgccgttccgaaattcttcataaaataagataaaataaaattttatttttattttaaatgtgcatgaaaacagaggaaaattttaaggaaagtaaataaataaattctcacctgtaaatctccagtgctacaaacccttctcatttgaccagttaagaatccattatcaatctcaggagagctcaaggcttgatggtgatgaaaatttggtgactccgtgagagaatcaaacagaggtgagaataaaaaacaaggcttacttccatcaaaggagttactgcttaaactcctctgaatatactttgttacattattatgatcagttgatgaagatgaagagagaccaccagtaccataattattattattagtattattataataaccattattctcgaaacccatttgacattcctctgttttaacatgaaaagcatccaaaccagagaaattgattccgaacccatttgggagattttgattttgtaattgggttgctgttgttgtagactgatggtgatcataatggtgataaaggtttaagctttgtaactggtgagatggaggagaagaagatgagagtattgaagaagcgatttggtcaagggaatgagattcctcaactgggttttgctgattattatggtctgagtaagcttggaggatatccatggcggaatctgagaaaggtgagagtaattcatcactgaggaacaagtctgctccagaagaaactgccacttcttctgctgggcttgaatggttgaagaaagagcttccatcgaatatgaacatatcagaggacatgggcacccaaattgattcaaacccagaaattaaataatattaataagaagcagaaaacaaaaataaaaaactcgtgctttttttgtttttattctctaatttttctcttcttttttttcgtttggggctatttgaacaagtgttgaaatggtggcctggaaatagtactggcagattgagctctctctctctaaaattgagttcgaaacaatgcagtaagtggaagttcaatacttatggcttcagctcagtccatatatatatataaatacatataaaaataatacatatatatttgcaaaatgtacccctacagtttgtattaatatcattattatctgagtccaactttttttttatcatattttagtccaaaggtatcattcgatggtataatattaatactaaatgtctatcttatgaattatatcctaagagtactcctaagagatgaactaaatagctcaatttttaaattattgagaaaaaattacaaaattgaactatcaccaaatgcaataaaccgttagctatttttatatattttttttcattgagctaaacatattttaatattatttttttaactttttttatatatgtacgtaatattatatgaattattaatataaaatgaataaaatatattaaaaatataatatttaaattatatagagaaaaaatagagaagatgatgttgagttttgcgccctaaataaaactcatttcaatataatcagatttactaattaataaagatcagaaatcacattttatgttgcatggttcacatgatttatttcatgtttatatttaatgtataaattctattaagtccagaacatatgtatttattcatgattatagtgttgtcagcacagtggaatataatcatgattatatgttcaaaagtttaattccctgatttatcagttcactggattacgaatggcatgataatcagcgataggtatacttacaccttggat

SEQ ID NO: 243332 - DNA, 1732 bp, Cannabis indica
gaaactgcataatttgcagagtgatgagtggtatgggtgctagctccatcttcgcttgacttggttttggcaatagctttccctccaagcatgtcaactctcagttcaccttgagcaaaatccgccacaaagtctggttcaagctgcaaaattttcaacatgactatttgaagtacataataacaagcactcttgaagatgaggaatgataaaacacatttcgacttcaatagatttaccgataacacataacaggaaaccaacaaaagagtatcaaaagcttctatgtgaactgtttggctaaacttgtaccttttttatagttaaaagcataagataagtaaaaattgtattggataattattacataagagcctttttttttaatgagaagttattttcctatgtgctcaaatatcattaaaaaaaggataatttaggagtaaactagaaattatgtaaatcatttctagcttctccaaagaggtcttttgaattagaaatgatttcttttcgaacacttgaaggtctttttcaatcctaaaaactgaaaaagagcttatagaagctaatgagtaaaccggtcaaaagaataatacgaaaagaaccactagagcactgaaatagatagtccagcatgcattcagggtcaagataaaattgaacagaacagaactgtcaagctgaaaaaaatcaataaataaaaagatgtgaaaaaaaacctcacgcttacctcaacaacatcagacaatcttctctgctgagttgatgcatttatgtttagccccaatctctctagttcagcttcaagctccgcctcaattttgctcatagactctgaactctcctctgctttctgtaaatatgaatctctagcatcatcttcgataggaccatcgatattttgttcagaaaataatgtgttctgagccctctcagaaatggaatactcatatgtatcctgtgattcatagttctcattagccagctccttcactgtcaaggaatctttcatttcaagttcatcatgtaaatcctgaactaagttctcagtttgattcagcaactccttcagcttgtcaacttcagttttattggttatgaaagaagatattatgccgatagagataccgagacagaataacactgttccatccagcgagcctgaggaggagagagtaaacattgtcattaactttttcagaacaaaagaaactctggatttggatttagaaaagtgcagtgcagaatccagattgcattagcgagcaatttgattcatcgaaaagttggagaatgcaataggaattgtagggggtttgccagaaaagattttggatatgaaagcaaacaagcatggttttcactgaagatgctactgtatgcactaattaattgcctactcattcaacaaagccacgcaacaggttttcactaaagcaaaaatctgtttctcttttaggggtaataaaaaagagctaaatgtttatatatgaatgtgactagacaccaaagtccatatcatacttttcaatgaaatttaattaagatatgacactatagttctcctaatcaagaaaacagattccaaggattttaaggagacaagacaatgatcataaactttgtaataagaaaaacaaaatgaaaacattcgcttctttatcattatttagaaatagtataaaaagaaagaagaaaaaaaggaagaaatcataccaccttgagaatg

SEQ ID NO: 243333 - DNA, 4405 bp, Cannabis indica
gtagcgtgcctaattattttgggcgttacagtaggggtggtcaataaaatttacaaaccgccctacccgaataaacaacccaaaccaaaccgaataaactgacaaaagatacaacccaaaataatataatgaaaatccaagccgcgcggtattcgtaagagaactggcgaagatcttattaaagaggcaatgctgaattcaatggaagaaagggcttgtaaagctagattcatggaaattgaattcaacttgatggacaatacagggtcactaatagacgtcccgattgcctttgatgatggctgtatcaaacagaataaaggagttcgagagaagagaaggaaatttgtgtcaaaatccagcaaccatcacaaagcgaaacacggggaaactgttgagagcagggatcaaacaaaagggaaaatgatctccggatcaagatttgacgttcttactggggaagtttcacaacattgtgattcaaccttggagcagaattatgaagcggcaaactctgcattgcagggtcgccgagaacaataaattcccttatttggaatgtccaagggcttggcaacccttagactgtttcggctcttgccacacatgtcaaagaattcaatactggattagtttttctatccgaaactcgatcaagaagtgcttacatggaaacaattcgtgttcgactgggttttaagggttgtttctatggggaccccgatccctctcattgaagacactcgtggaccatgctgcaacgattagcatgaagatatattgggccttggttatgcggtggcgatttcaatgagattagaggccttcatgagaaataaggagggggtggaaagcctggttactcaatgaaatttttttaataatgctattgatgtttgtgctttaagggaactggagtttgagggcagcaactttacatggtgtaatggaaggcggaaaaacatgatttttgagagattagagagagtcatggcaaataataaatggttgaatcattatgtaattgccaaagttaaacattttagtcgttggtgttccgatcattgtcctctattcgtgacttgtaaagccattccaacagatgacaatcagcgacaaacatgggggtatcgacttcactatgaaagtgcttgggccgataaagaagaatgccataggatcattaaggagatttgggaggagggcagaattattagttcagtaaaagaactaggtagcaggatggatatttgtggagaagtgttgggtcaatggaacaaacagcaaagaagagaaagccaagctcgaatcaaagaattaaaaaaagaagtagaaatatctcgggatcattcaaaccaaggctttacccgattgaaagaaagggagagaaacctgaatggacacttagcaaaagaggaactcttttggaaacaacgcagtagggcgatttggcttgctcatggagaccgaaacacaagatatttcaccaaaaggcgtcttctcgtaggaagaaaaatctgatccatggcctttttgatcagaatctgaactgcctgagctctaaagaaaagattgagaagaccatttgtgaccatttttcaggatcttttttcagtcaaggaccccaagtgcgacatcatggctcacctccaacgttttgttccttcacgacttagtagaagacaaaatgaattcctccttgctgagtttacggctactgatgttctccaagctttgaagcaaattaatccgttgaaggctcctggagtggatgggatgcctcggttgttctatgagcatcattggcaagttataggttcgaatgtaaccaaaatttgcttggatattatcaacaatcatgcggattgcagatcaataaagaagagcctcctctgcctcattctgaaaatcaaaaaaccacacaaagtggctgacttccgcccaataagtctctgcaatgtcagctataaaattgttgtgaaatgtcttgccaatagaatgaaagatagcttgaagttggtcatctcgaaaaatcaaagcgtatttattcgaggtcggctcattcaggataatgccatattggggttcgaaagtttccattgtatgaaaaaaggtcgttttggaaatgggaaaaagatggcgcttaaactagacatgtccgaagattatgatagagtcgggcggtagtttttagaagcaatgatgctttgtttgcgttatggcaagcgatgggtggataaaattatgaactgtatcacatcggtctccttctccgtccttgtgaatggggaagttagtggtcttattcaaccccacagtgaccttcgccaaggcgatcccctctctccctatatgtttctcctctactcgaaagatttctcttgcctcattcaagaagctgaaagagcggatagaatccacggtatcaagttttgaagagagggtatcatattatctcacctcttcttcgccgatgacaattttgtgttccttgatgcaacaccaaccgaatgtagatgtatgaagtccatattagaagaatactcatttctgtctggacaacaaataaatctcatgaaatcggagctatgtgttggaagtaggataaaggaagcagatggaattatgcttgcaactgatcttggggtgaaactagtggactgccacattaaatatcttgggttgccggctacagttaggagaaggaaaaaggaagtttttgattccattcgcaccaagatttcggataaacttcaaggttggaaagccagcttattctcccaagcggatagggaagtactcataaaagttgtaattcaggccaccccaacttacgtaatgagttgtttttgcgttccgaaggagctaattaaggacattcatgcaatgatggcgagattttggtggggttcatctgagtctaagaataaaattcattgggggaaatgggacaaactttgcaaaccaaaggataaaggaggaatgggtttcaaaaacatggagaaatttaacaatccttattagcgaagcaagggtggaagataataaaccatcctcattcattgctggcccgtgtccttaaggcatgttactatacaaactctacattcttagaagctaaacttggagcatttagttcctttatgtggcgaagcattttatggggtcggaaaataattgaaaagggtgttcattggagggtccaatcgggtagaggggtgcgcattaatgaagacaaatggctgcctcgtccatccacattctctctttgcactccagcaaaagttaatcatggggccagtttggatcaaatgaaggatgctgaaggttctcggaaacaagatactatagataaaaccttccacccagatgatgtcccccttattctaggtatggccccttgctttaataatgctaatgatgatttagtgttgcactacactcgaacgacatatacacggtgagtagtggttataaagtggctgccttcagtgagatagaaacaggcccatcctcggatgagatcactaggaaatggtggaacgagatatggaagttggagattctcctaaagtttgaaattttgtttggcgtatctgtaatggctggctccccgttaacatggttcttcagtctcggggcatgaagattgagccgttatgttgctggtgtgggcagaggaagaaacaattgaacatgggctatggttttccccatcagttactgatatatggcaacattttttgatgtggaaagtaatcaaaatgtgccgaggtgaaactaaggacatgcttatgaacataaagcagcgaacaaacaaagcagattttctaattttcatcattctctcttggctcatttggaataggaggaacgaaaaaagactcaacattcatcttcttcctaacactttatggtgcaggtgggctcaattggaaatggattatttgcttcataacaattctataagggacaaccatctgaagcagactcccacaacagacagtggttgggaacctcctcaccccgggacatattgcattaacagtgatgctagtgttccttgtacaaaagtgaaacgcggcttgggagctgttatccgaaaccatactggtgaagttgtggctgttgaaatcaagcagatcaggggctcttgcacggtggaattggcggaggttttggctataagaatgaggattcatcttgcttccaaagtgaaggcctacccgttcattatccaaactgactgtcttcgggcagtgagctatttgaatggagattatcaagccaaaacggactggagcgcgctgcttgatgacatccgagactcccctgcttttggccattgtgttgtagtgaagcacataaagaggaaaaataatatggctgctcacttgctggccaa

SEQ ID NO: 243334 - DNA, 1383 bp, Cannabis indica
atcatacctggcacaaaatatttcttatattaattcaatctaaaattatataaatatttcttaaaaaaagagttattattattattattatatgatgttagatatgccaaaaagtgccaaaaagtgctagcaatagctaggccagggatgatcccaacaagtatatactctttaaaaatcaataaaagtggtgacaaattaatcaagaaatgttattaaacgatttagtgatgacgaattatataactaaaaataattaattaaagatatttacagttatgcttatttactgaaaaatgcactgctattataggcacattaagagatgacatattaaaatttgcaactttttcatatatatatcatattttatttttgagaacaaaatatttatataaggtaattttaaaatagtactgtgcattctcatattatacagactttatttgaaccaattaaaagtaaaacaaaatattgtacatatattgtgttgtattcctataatagctgattctttcatgaaaagagagtgggaagttgatccaacaatgactgtgaatatcacacaaagcccaagtgtgcatggtgagagtctagaggggaatacatctgttggtcccgcattggtattaaaacttatttttcaccacataagagctgatacttttgggcgtttggggttgcaataatcccaacttctatttgcttttaaaatttccttttttaggagtgtcatgataactttttccaacatactttatgatagtctagacagataccatatcaatatgcatttaccataaacatattcttatcatggtcattactatgttactttttctaacataaactactacaaaacatttagaggcactttttcagcacaataataaataaccgacgccatagggttgaaaatttttagaaggaaatttcacgccacttatggcgtcggttatttggaaataaccgagatgccaaaagggtttataacactagcccagcgcttcgtcttcctcattcgatcagccaacccagaaaccgccaaaccaatgaaaccccaaaccctctccgccaaccaccacggaaaagcaccccatttcaccattttttaacattgtagctcattttatttctaaatcttctatttctcataccaaaaactatatacttgaaaaagtcacatttttcctcattttttaaggtaaaccgaaggtagaggtagtgattgtggtggttatacctccggccaccgtttttagtagagaaaacattgtacaacatctattaaggtataaatctaatttctacgaattttagtaatgtacattgctttattttttattttctaaattttttaagagtttttctatattattaaat

SEQ ID NO: 243335 - DNA, 4578 bp, Cannabis indica
attttagtacaaaaccacttcagaatttgtggactgtaacataaggacacaaaaacgttgtacctgctaatgttaagggcattggcaccaccttcaggctgatcaagaaattcactgctctgatatggagatgtggctttctcatccttaccctcaactttcacaactgcaatgtaaccacaatatcttacattcacaacccccagagtggcaacatcctgcacacacaaagtaaagtctctgtcaaccctttagtaaaaaacaactaacgcaaccacagttacaaagcaagtaacaatccatagcagctattcacaaaatcttacctgagcagcggtattttcatcagcggtaatccccttcagaagatttctttcaactagatgttccttatcaactccaaatgcttgaagtccatcaattttagtatctatcttactgcttgcatttgaaacatctttcaatactgtgatgctcaagtccccaacattttcaatatacagaattttactgtccacaactggaaagatcaaatctggtttgtccattgcaagacgaatggctttaatggctctgaaaatggagacatcaacaaataggctgtgaagaaggaatgccctcctatcccgaacctgcctttcctcgggagtcttgcaaggcatagatgcaacaaaagcaaactcattggcccaaggaatgaggtcgctttttccatctcttcctaacccaccaccatttcctccccacgtttcatcctctacagggagcggagggaaaactggtggcgactgggctgcaaagggtggtacaagccatgtgttggctctaaagccataaggaagattcccaaactgcagggaaggtaaaacaaagcttgattaatgtaaaacaacgtagtaaagtctatgaaaaataacaaaacagatgcaagcttatgtaccttgttacgttctgagaatgctttcataagatcttcgtaagcctggaatatgagcaaagaatattaaacgtctaacttctaagaaacgtgaaattcttctaaaacgacatgaaaattatacaaacgaaaaaaaactaacattgtcaaaagctctactaagctgtcgtaacaaatcaacgagattgtgacacagaattctctgcttcccaacgctgtagaaccctttcctgcaagcttccacgtgaacaacttttccattgcaaagtttcaccttcaccaattaaacaagcacattgactcaaaaccaaaattcaagaaacttcataattaagttctcgcttaagggaaatagaaaattacttccatagagaaaagatgatcatccgccgaaatctcatcgatttgccgtctcatcactttctttacaactgcattttaatagccatttccaatactttagttaaatctgtctacggatcaacatgcattacaaacacgtatatatgtatatgtataaatatatatatatagagagagagagagagagagtacatacattgcagtggaggagtgaggtgggaaagagagaagaactcatagaaggcgccaagcttaggacacgagtggctcaaatcggcgtctgaatccaccaccgccacatcttgtttggtggctcctgaagaaccttgagacttggtggtggtgaatttcttggaattcttctcctgcgcacccgacgcacctttaccaccgccaactgaaaccgaagcatcgggcttattgttctggtcctttccggccggcgaagcaccgaagctcgtcgtacaggcaacgaggtccagcactcgtctaacatgcgccgtagcggtttcgtcatcgtaatcctctgctcaaaaaaaaaatagcgggcttgagaaattgatcgagaagaaaaacgatgccgtatcggcaagaatctacgaaacgatgtcgtattgccgtgagattcagagaaataagacggtgtcaattattgaggaatacagattaaacgaccgcgtttcgaagaaagttcgctaaacgacgtcgtatgaaatgtggggttaattaattaattgtagggttattttatgtgtaccttccaccaacgttagaatacagggtttcagtgcagcaacgtccaccgtatcttttaagcggggccctcttacctgtaacaaaatagctagatgcttgttcacggaaatgtccattttaaccttatagaaattgaatataaatagcaagaatttaatgtgcgtttttttctaaaggaaagaaattaatttgcactaagcatagcttcatgataattcaattattgcactaggttatgattataacacattatcacaattcacaaaaagctttcactttctcgtggcctttttattagagtgtatatttcgtagcacatcattaggccggagaagaagtataccaaaagtgtttcttttaaagtccctcaaaaaaaaaaaaaagtgtttacttttaagaaaaaaaaaaactttgaccttggtaatggactttgacgataataccaattttataacatttatattttctggcaatttaactaaatatgacaatgcactaaaatggacaacctaaagcaccgttttagaaaataatgtcaataatctccgtccaactctttcaaatgataataacccataaaaataacaacttataattcagtgataatgcacattattattacctcatgggatagcgtgaaattagtgatgttacaagtttctatgttaaccgataacaatcggcgaacatcgatgattctgtccgtcgatattccctgtttaagagtgcatttttgtcccaattagccccataaacataacaaataacaataatattaatatataatgtaaatgtgataaaaggcacaattttaaaggggaatccattcaagcatatattaactctgcattatatgcttataaaagagactacaatttcagtaaataagtacacttttttggtagacaaaattaaaatatacttggaaaagtgtatgtttcattctagagtggcatctaaatttggagcctatggtagattcgaaaatggaagttagctacagaagaacatatgttatataaagaaagagagtgacaaacagaattttcaaggagtgtgacttgtgtgtgtgtaattgaccaagtaaaataataaataattttgatgaggttctcgtagctaatagttccagcagaaaagccatgaaagtttagaattaaaaattaattatactaacaataacaatatattatataatgttacctttaaaataacatgggtttcgtcaggaaggttcacagtcatatccatgacaacaggaagaactgtatttatttatatataaaaaaggaaaaatggttaaatttttgtgttatatataaatatattagcaaaatatgaaaaacacaaacgattaaaatttacacttactcttttcttctttcttcttcttctctcccttggcctttccacggttgttctttggcgccatttttgagctttctactggattgaaatgagttcaaagcttgaaactcttaagagattaggtgcagctgtatttgaattataagatattaataattaacttggcgatatatgtatatatatcttaaagaacaagtttgaaacacaagccaccgagtagtattaaggataaagcattcaatacccaccaaagaaatggacaaactttccaaactcaattaaaaagaaatctcacataataatgaaaaaacgacattagaatctgaaacgaagctgagaaaaaacagaggagttatttcaaataattaccaagtagaagaaacagctatcggaattggaggaatgaaaaggaaagttttctttaatgcactgtgaaagtacagagacgataaggaaagagtagttgagtaataagagacagatagccacacagagatgggtttttttttagagcaattataaaatttattgagaagccatgaatgaagagagggctgctctgagtctgaggtgggttttagagattggataatgaagagggaataacggcgaagaagatattgaaagagagaaaaattaaaaaaacgaaaaaaaggaaatgagaatattgtgaaaaacaaaataaataagaaatagagagaacgagatatagagagaggtgagtatgataaggaaggaagggtggagattcaatagtcagaattatagatttggcattttatgccagtgtttctggattatacagaggtaattatcattttgtccaatttatttttattaattttaatgccataaatttttttaaaattattgttttcaaacgggaaaaataatataaaataaaaatatgacaattgtagggaaaggaaaagagcaagctgcactttgtagtaggaaaaagaaatggtgggtccacttaaaacatagtcagaaaatcacaaccaaaacaagagttcaagaaaaagagtctattattgtgatatagaatagtaaagagtatgcattgtagtgctataacaaccataggatgcgtgtgtgttggaagtcttgggttcgagtctcaacttatgcaatgtaatatataaacgcttaaa

SEQ ID NO: 243336 - DNA, 1244 bp, Cannabis indica
agtcaatttttttcaataataacagaaatatttaacaagcttagctacatttagctatgcactatattataatagttattttattgtaagtgttccaaaaaataataaaataataaaaacaaaatctacatttacaaaaataaactagtattttagtacatatttttatatgcacatctgaacaattagaatcatttttcggttcaaaaaaaaaaaatcatttgatattgatccaataaattacccatgatgtttaggatccactttgtaatactttaaacttcttttaataattaactattaaatatttgtactaaaaggatggctctagttgagtctagtcacatgatataacttatccacccaaatatctcttcactaatttgtcttttttcatttaaaattttgatatatataataataaccttaatatatatataaacaaattatagtttagtagctgttaagcatgacataatttctacaccaagaaaaatacagttctgaaaagtcaaacttacacatttcaagtcaacataataatttcctataaataataaaagctggaaaatgcactgcagtcacaattgaattgttcttatttttctcatatttttatttttatatatttatatatatgagaaccttcatagaaagtacatcaaattttcttaggcattaatggcttacttcaatgtgtcttaaagtgaaaatgaaacccaagttggcttttttattcaaagcttcaaaatcaaaatatggaccctcaaattctgctcttgtccatttcactcctaattttcatggctgaataaactcattatatatcttcttctttttcttccatttgtaatgacaaaaatgaaatgtgaatgttttgatttttgagtgtcaagaatatgtgtgacattattagattctattttccattataaaagagtgagaaaataaaaaccaagttttttattcagatcattcaacaacaccatgaaaaatgttattgtttttcttcttcttaattttcttgtgcttccattgaagattacttgctcaccaagaacacaagcagaggctctcataacatggaagaaaagcttatcaatggaatcatcttctctggattcatgggacagcaacaacatcattaatctctgcaactggactaatgttgtctgtgatgtttccaatggagaaatctcacaaataaatctctccaacttggagctcaatggaaaattggacaa

SEQ ID NO: 243337 - DNA, 4151 bp, Cannabis indica
aggaacctctcatccataatttaaaagttcacacatacactatggaagaattttaaatataatgttatattttaaaagtaataacaataatcttatgagatatattatcaccaaaataattatggatcataagtgcaggagggtgagacatattcatgttgcactctttttctcttagctgaggttttgtttcactgggttttcttggtaaggtttttaacatgacaacttgtaaataattatgaatacgagaagacgatatataagatcagaattaaatctctacgaatacctaaatgagaagacttaattcatacgatattcttaccgagtttttgtttaacttttttggtaaggtttttaatgagcaattattatagacatcaaaaagtgagtgttataaaatattgtatgtccaccctcattaaaataaactactgaaaataatctcatttactctctcattttgttcctcttttgctctatctttctcctattcctttctctgctttcaatattattttataacaaaaattatattttaagcctattacgataactcaaagtcaagtgactcgtactgactcggtccaagaactcggtgtaggccttaggtttctctcccgggaaaattcacaaggaaaacattctcaattcccaattacattttactttttccattaacaattcccgatcgtgattccaatgcttcatcgaaattaggtacctttcattgctctgcgcctttgttgtttcttgtgttgctcttcagtaaattcttcgcttagaattttgattaggattggtgtacaagaattgaaaatttggcatggccgacgcgtactggaatcgacagcaaccgatgatgcacccatctgggggtgtgcttaaacgacctcgtatggattacggtactaatctgaatctccctttttctcaggccatttagttttgtttgatccgtttctgattaaaagaataattttgattggacatccttagaaattaatctgatctatttcttgattctttttcgcttaatgtcattgtgattatgttggtttgtataaaccattgtttactgtttttgggcacagttcagaattatgctcaccaagttaaagttgccaacttttgccaatttagaagagatagctaattttgttcgatcacacattgttggctgttaattgtttgtcctttctatagtaattaataatgtcagaaacgtttcccaagatgacaatgtggcttgacaaatatgaggatttttgtagatctttataggctgtgaagtccttcatagaagactgtagccatattatatatgtttttttgtgatatcaagtggcatggattggtctctttccattgttcattgttttctgctattaatttttaatacttacatgccttcaaatactgttaattctcttctcaaatgttttctcatcttacctttgtaagttagcatattatgggtcttatatcaaaaatttatatcattgttaccagtgaacatcatgacatagctgctcttatagcatattagggtcagttatggtaagttgtaatacaaatggtaacccatcatctcttatatatgcaactcttatgttggttatgctatcttgtcattatggctctgttgattgcttagacataggtggcctgcggctgcgatttttaagtggtagaagtcatttaggttttgtatttctgcttcttccatttttagcattattttgcttttctggaaaatattttctagataccttttattattatagtttaaaacaatttgctatttatgaattctcattttagtgttattctgcatcagttaagaaatagtggtgaataaacatgaaagtaaaattaggaattatgaaattagatatttattagagtctctagaatgaagtccctgatattgcagcacatcttaacacattgttgttatattttttattaatgaaattaaagctcagtggataatttgacattcccaaaagaccaacaaaacgatctcttggtttttctccattgcatacaaatttgtgaaatcttctattagcacttgtatactagttacactacagatttggatgcataatttgtttttccctctcttgtattgataaaaaatactaataaacaaataaatggaagttgaagggtaacatttggatcccacattagtcaatagatctataagattcacatttaatttttataaatagtgctaattaaagaaatatatagcacttaactataaggtaagtaccctttgatagtcattattgtacagggttacttttattgtttattgtgtcatctcatagcatgtttgatattgtccaatgtttttatattgttatcctctttctgaatgagagaaaggagaatatgcttgctcaccaacatgcctcgtgcctccattcccatgttggttttttgaatacttattagagatgtttaaattggtttgaattttttcattctatcttttgaaatgattatgctaatgcaccggggaatgctcagtcctattttctggtttatatgcaattttactgtagttcgacaattgcgtcatgttcttaatgaaaatattcacaatgtgcatgtggaattatgcccactttttttttgcagatccttccatttctggccagccttcaggccacgagatgcacaagtattttgcacatgatgatgaccatgatggaaataggggtgtaagggacacaaagacaattggatcagcatatgaccactatctcccgattgcggtaattaatcaagtccttgaaactgtgattattttcccatgtgatgcttgtacttatgttcatgctaaatgaattatgtttttttgtttccgaagaatttacccgtgaaactgtgataatttcctttgtgatgcttctacctattgttatgctacatcacttatgcttgttgtttctgaagcaaaatccttcgtttgcttctggagaacctaatatgcacggtggattaggaaggggttttgttggtggtatgcaaaatgttccaacaactgaccatcctaacatggcacgtcaaggggctgttatacctgattttgcacggaacggtcgaactgctagttttgaagatcagctcccaatggaggcagcagctaggccaggacgggcattagcccctttgccttcagatgcttctagcactttgtatgttgaaggacttccttctgactgcactaggagagaagtttcccgtattcttttttgatgtgtttatgctgttcttatatttgttttacaatatttatcttgttgcaataatcttcacgtctcttaagtattattttctgaaaccttaacattaataaagatatctttcgaccttttgtgggatataaagaagtgagaatagtgagcaaagagtccagacaggtaagttggttaacttgttttttcactttgacattaaggatgacttattcagagatgattcaatgccgatattctggtttattgtaatgcagcgtggtggagatcctatcatcctctgtttcgttgattttgtaaatccagcatgtgctgcaactgccatgagtgccttacaaggttaaatgctcttttcattgcttataattacgaatgttatgactacctaatgtgatagctgtagcatggagtatctcattgctacttgtttttggaaatgctgatctgatttttgggtggtcaggttacaaattggatgaacacaatccagaatcgagttttttgaggctgcagttttcccggttccctggtccaagatctggtggcactgcatcgcggggtaagaacgtcaggtgaacaaacttttaggtactgagactgagagaccactactgaccactggtttcacacacaatttttttttttcaatgtattcctcatttttcggaagtttcatatagcacattgtacccaaacccaaacttgagcaaaatcgttcgtgcaggccttgattggtgacacacaacacttttgaaaatgcattttgtaactagggcttacagttcacaagagtttcaattatttaatgtagcacacaaatcactttatgactattttctgttttgccaattttattgagaattattgctgtat

SEQ ID NO: 243338 - DNA, 1417 bp, Cannabis indica
atttttttttttttaacattactttggagattgaaaaaagtatatcatgcaatcctataagagaagaaactgcaaatagtcaaggctagacatgatgtcagaataccagtttattgtgctaattttaagccaagttagctgttttcaggataccagtttgttacattatgctcataaatctcttcatttagcactagatgtctaacaagaaacaaaaacaactgctcactttgtcaagagaaatgctggcccaactttcaatccctttgatgcaacaaacttaaaacggttgaagagtagccacttggataaaactggaaccccttgttctatttgcaagctaaactgcacatgacacaatagacatagttagttgaacctcatatgattgttcattataaaaatgtgcaatcttacattaaagatcaccattaaatgaagtcttacatgaaaaaagctggaatcatttgcctttgcaaatcgagattcttgcttcagaacaaccatgctatcatgggtcttcccactgcataacatttacattatgatagcaacacaaccagtacaagaaagtttgttcgaaattagagtattgttgttcctgtttacctgcatgtcactagaaatccatctccatctcggcttatagactgaccatcatcattcactgggcgaacattctgcatgaaagaagatttatattgatgagtttaatctaactttaaacactggaaatctcatatgacaatactctaattaagtttgcccgaacctcgaactttatgctagttgtgctactccatttggaacttgcaggctcattcaaatccacccccaatgacagtttcgacaaatttacacctccgctacatgagcgggaaaaattatctacaggaataccatgaactccaatctcaggtgaaagagagtgctggaatgttaaaaggctaaacattagtaatgcacccatcaaactctacaatacattagaacatatatttcaagtgaaatataaaataaaccagtaaatacctgaattataaaagactgttgagataaccattcgggccttggtcttctacaagctactaatatattggaatcatagagccccttatcccatgatatatcaagcttctcacttccaccaaataagttaggatgttttacacaaagactgcagaatgaaaaacacccatttggtttaatcaattacaatactgataaaatccaaaaatgggattatcaaatcattagttttattcattacattacagattaaaacaatcaaacaaatccacattttaaatagtataatataagaaagcaaagcaaattgctaaccttcctattatcagagataaagggctgtcattaccactcctatgaaaaacacagaaagtaaaagactcaatac

SEQ ID NO: 243339 - DNA, 5116 bp, Cannabis indica
cttgattggagacatgttcttatgaagcaaacctttgccaatatctccttcgttttttcttactagaaaatttggataaaggcaacaatttctctggagaacgacaccgctgccttttactactaatgtctccttgtcttagttgatgttgatggtgttcagtagcatctttagaaacagtaaatttaacaagattattatctccagccaccaactccagtgagactgctagtcgctcggaaagtgggtcaaactaccaaaaaaatcaatgaataagtcaattatattaaacagcataaatgtaataatttcttcaaatacaacaccaacctctgcacacatgttcctcccttcagaaaggattttcatgtactttatcacaaatacaccgcaatcactaactgcagtctgctgaggtaaacttggaccaggaattatcatcgaatttgaaaatttccatccaacgccaaagcagttccaaacttccaccaaaaacaaatcatcaagcacttctaactataacaatataaatattaaacattcattaaatcaaaataatgaatatcatcaaatccacacaaacttgctgtaatgaatcaattaccagttcaagcactaattcctgcttatgcaaatgtagcttcaaatcgtccttactatcccatattgtcacaaactttttgtttaaattcactacaaccaaaatcacatgattgttcaccacgtccatcagaggaacaactacctaaaaagattttataaaaccattaccgcaacgacaatatagtatgacatcaagaaaaaaatcatgcaaaaattaagttgggtcaaaagaaacaaaaagtgtggttaaatgttacataccaattccatccgcacaatcaatgttttccatgactcttcttcaccacatttacaccatttaacaaccatctcacaaaaactcttgcgagtgagctaaactcaaaacgtacactaagttataacagctcaatacatatctaacaaactaactcccaagatgaaatataatcaacataaataaaataaataaattacctgtccaggataaaaactggggagaaacataattccattagatgtattgctcgaccgtaattttctcaaatgaataaagtacaaaaaacttgaataagcatcaattatctaataccaaaaaaaaacccaaaaaatcagtaatacaatatatattagatgttttgcagcaaatattaacaaaaacaaacttttataacacatacctttcgatggacatgatggtgtggccttaaacttagaaaatgtattctttgcacaacaaactgtggattctccactaacacctcactaaaaaaaataacaaaataaactacaaacattgtaaaacaatgctaatgtaagtttatcaaatgaaaatgtctaaatatagatcaattaccttccacttagtataggatcaaacatgtataacgccaaggaaaattcttcttcgctcaagcgatgactcaaattaaatgcaccgaccctcagaccgttactggtcttatacaatgaaatcatattactaaaatttgactccaacacacttgacacaacatctcccttatcttgtgttagtctctcaactatgtttactttgtctttttgttcatttttctcaatatcatccataacaaaatctttattgtcattgtccaccaaactttcaatatttgattcaataatcataggatcaaaatccctcaagtaatgacaatgataatcttgatcgtccattccaaactctctcttagtaaaatatggttcagagcgggaaaatttcaaacaatctttactaggttccttcaaaacattgggttgtaattctaagtaaactttctctaaattttcaaccctacaacaaagatgggagaggctgcgaacaacattatccatgtcgaatgcacttaagatttctcgcatgtttatctataaaaaaaaaaagcattcatgacttcactaacaacagtcatatcataaagtaaagaacaattcgtggacacaactaacttactgtcgaagagcctaatcccccattcttatcaatccattcaatcatattattagtttcacaatcagaccaccaccaaatcggacataaacttctgtctacaaatgattcactgcatcgcacatgatgaagatagaaaacctacaaattatccaaacaataaaataaaatatcaaccaagaaataataagaaataactacaataactattaaaagtaaaatttaaagaattattctattaaacaatttatttacctgcaaaaagtacaagcaaccacaaacatattttgaactacttcttttgaatgcactcaaacccatcacgagatacttaaacgacattgaagcccaattaattcttcgcacattggctaaatccttcaatgctaatatttgagcctcgtaatcccgactcgcataaactgttgttttaggcatcaagaacacactgacaataaaaagtaagaactgatggacaaaccccatatcagtcttgttgttgcatttcaacttctcttccaagtgagagatcaatatccgcccatcattacaattatcagatttggaatccgataagtgttccccaccatcatgaataccagtaatatatgaaaataaatgactattcatttcatacacttttccatggactcttaaacaaccatcttctacattgaaattatctaccaaccactggatcaatttcctcttcaaattacatttctttaaacccaataagttaccaaatccaatttcgttaactaaagttttttgctcactgctaagctgactaataatcgacacaactctacccggcgagcatcgactacaaataaaggatgtctccctatctgtagcatcccccattcttttcattatataactgcaacaaatctataattcatacaaattagatctaccaacaaccaaaaaataaaatactcaaaaataacataaattacacaaaacatgaagagaaatgaaaagcaaggtgaagtacatactttgtcatatagcatttccatctttatagacacaagtaggcccaaaactaacaacatttacaagaaataattcaagcaaaccaattgaaaccgtcattaatataacactattctcaaccataatatatgatactatcttcaattgtgaaaatatctatccacagaggatattcttacaacctatgcctcaactgaaaagaaaaagacaaaacgaacaagtagatgaataaaaggagggaaaagagaaataaaccaatatcaaaagcataactacataaatatggattttttcaaaaggaataaacaactaagtttaccaataaaacaatataattacatgttaaggaaaaaaaaacaatatcattaatattaatttcttcccttttcagtctagctgcaatgttttatactctcttctacatgttttggtgctcgaaagctatgtttcctccgatttgttcttcgcaatttaggtagaacatgtcaaagagcctccctacgtaattggcaatttcttgttttaatctcaaattctaaccatgttctaccccgatcagatatgatatccgcgacactaattaaaagatatgtataaaatccattttttttttaaattcagatacaaccaacataaaatataaatttggtaaaaatgctaaagcttatcataatttgatcaatattcatagtccttagtgtttagcattaatgtacctgtactatattcctatcaatagaattagtacaaaaaatgaacaaatacaaaactaacagaaatgagtaaaatgttattggttcaaatcattcataaataaaaaggtttctcaaagaaataaacaactaccgaattgttcagtatagtctaactcgtataaaagccactttcattgaatgcccatacttggagcaaaaattcatacctcaggaaacctaacttcacttctcaaccaataaatctgtcattttgaaattctactactttcaataaactcaaaatagctatatgtattattatgtctttcgcatatgaagcaaaaaatacaatgacaaatcactatgtcaagaattcatttgcatagggcaacaaaaatttaggcaaaaacttttcaccatgctgagaaatttggtttttttaggtaagtttttcccggaaaagaaattgtacaaccttgttatacattacggttgttcttattttctagtatatggcctcaataaatacgaaaacatgtgtcttatttgtaaaatctttggtatgaatgtgggcatattcaaaaagttgaattatttccttcaaataaagtggcacaaaaaatggaacaatgaaagaaaaaaaaaagaagacaatatccacaactccataaaaaacaaaaaaaatatcagtaactacaatagagttgaaaacatcgataaatagaattctattctaaaatacaagcagcactttctttgataattaactcctcatataaaggttgagagtcaaataaacataattttagtatttcgttccgtaaagagattcattaataaattaaaattatatagcacagaatcaagaagagaaaacaaaaaaaaaaatcaagaagacacattgctaatttagaactcagagttatataactgactaataatctaaatagagattgaaatcctcacaaaagacaacactaacaatgttcatagcacaaacagtaaacctcaaacaacaacttgaagatcagagatactcactcgcagcctgacaaattgctggagtttgttgagtggagataggtacagatcgattgaaactttaaattcagaggattagatcacttgatgaactcggacgatgcgggcttagggagactcttcttcacaacttgagcgaaaataacccaaaataaagttataaacaagaagaagcagaaaacaaaaaagaataaaattgaagagagagaaatttaccgtttcgttattatcaatccttcagttttattatgccatggctgatcaaatccttttaacgtagtcaaagaaaacttaacagaattgaagagcgcttctgaaaagaagaaaa

SEQ ID NO: 243340 - DNA, 2221 bp, Cannabis indica
taaacaactgctaatttccaaattaactaagcgggctttacattaaccttgttaggtttaccagaatgcttaaaagactgttctagattcctaacaattgatccagatctgagaatatgaggtatcgaggacttaccctgagtcaagttactgttacattgatcgttcacttgtgtaaactgcagaaagtccatttttccatcttcagctcttttaatctcattcaaggaagcagtaggagaaagaggagcttggaacatgtcctggagctcagttgtacctctcttcccttcctgaatgcatcaggctcatcatcctattctgataactcaagcggagctatgccaattacagcatccatagttttcgtacgaattacatctgatacagagttagggcccttcttcttcggtttcttaacagagatcttcaattttccttgctgtttcgatctagttttggccatggcgccagcttcaacttctcccaagttaatacaatacaatgggactaggctattaccatactcatggggctgaatctctttaaaatctggtgttcattttactttactgtttttgctttcttttaatcacattacttaatcgctttattatttgactcactgtcattggctagaagcgaggtcaacacatttttttcaaattactccaaaaaaaaaagtactagaagaaataagaaaataaaattttataacttttatctttcacatgggatgaaaaatataagaaagactttgacaaaattatttgtgtaatggcttatattttgattaatgctgttttaattaacattctagaaattgaaataaattatgaactttgtttttttcttttttcattctagcataccacattaatgatcagtcggccacaacaatacacattacactgatttaaaaatatatattaattatattaccttatattataccaaatgatgaagctagctgattaaaaaggagtccaaaataggaggcagaattggtttcttcaataataatacatgtgtgaaaggaatagtgtcgtcaatccgtacaagtttccctcatcttcctatctctttccttcctttcacacaatctgggcacaaaattaaataatctaatcatcttttattatttttggtatttcaatttacaaggcatcttctccttaaaccaagtaagaagaaaacttatgtttatttatttaaataaaaaatatttacataaaaaaatagcctctttttgattaattttatcaggtggctgacaggtcgactgattaataataataataattttatttgtgagtactagctagctcacatgttgaaacccgccttagcctcattcatttctggattacaatgttgtcagatattcttgaaataaaaatggggattttggttgaaataggaaatttcatggactggtagatgggtttgatatgcccactaaggctgaatttgcttgaccttattccctttcggaacagaaagacgttttgttaatatgtgatatatacatacatatctttataattaccacacacacctttttgtatattaatcaatgtcaaaggtagattttgtttgactctttggattactgcttttgagaagtatttaacttgtttttattaccaaatagttttgactgtgtgaaaactataaacaggaatattttcatcggatatttaattaattttaatagagaaccgtaacttttaagtcagcctttatagtaacccgaagaggaaggctaattacaacctagctcctattattataaaaaataactaattttagttacaacttttaagtggcaatataaatttttttgtggttaaatgtaatttttggtcacaacaaaaaattacttgtcactaaaatatagtatttagacacaagttgtcactaatttacttttagtcacaacaagtattgtgactaaaaccacatttattcacaacaaattgtaatttttgtgactaatgcttttagctacggactttttaatcgcaatataggaatgataattgataattagtcataacttttttacttttagtcacaagttttgttgtgactaaaaataagattttttttaagtgtacattacaatctcttagtcaacctccacgttcgaaatcacatgccgaaatattttttttcaaaatttttttaatagcggtattcgttatagttacagtatgat

SEQ ID NO: 243341 - DNA, 2351 bp, Cannabis indica
taataataataaagtttaaaaagttttagatttaatgatatgttatattttattttctctaggaaaagaattttttatttaaagcccctaggaaaagaacttaattttcttgaaatgatgcaaatatttataattaaaatctatatatgtttttgtatgtttttttgttattaattttgtctaaaataatcacaggtggtgaaagtgaagttttggcaataaaaccaattagaaaacaagagttgtttcagttcaacaaaactagaccaatcctatgcgatcgatcccataattcccatgacatatgtgagatctttgttccaactgtattggaaccaaccacctccacattctttgtaatggacccaattgtcaatatggtggaaaagattcgaccttatccaagaaagctagaaaagtctacaatgtccagaattagagagctaactatagtgtcaggcccaaaaggcccgagatgtgaagtcaaacacaaagcctcagcgcttgtattcagtgcaggcgggtatactggaaacttcttccacgagtttaacgatggtttcatcccactttatattactatcaactccttattcaacggtgaagatgacatcgtcctagtgatatctaaatcacgggattggtggatcaataagtactcagatttgttacaaagttttagcaaacacccaattataaacttagacaatgatacaaccactcattgtttttcttctgccaaactaggtcttataactcatggcttcatgactatacacccaaaattgaaccccaaatcactaaccctatctcattttcgagcattcttagaaaaatcatacaccaagaaactgaatcatcgtagaataagtgttgaaagatcattgattcgacctcagcttgtactagtgagtcgacctagtggtgctggacaagttctcttaaatactgacgaggtaaagaaagaggcagaaaaagtcggattcgatgtcatcttatttgagccatcagctacaacaacattaagttcaacttttgagatgatcaatatgagccatgtattagttggggtccatggagcagcattaactcactcattgtttcttcgacctggttcagtatttattcaagtggtaccacttggtgttggttggttggctgaggtctgctttgggaatccagcaagagatttggggtttaaatacatggagtacagaattagttcccaagaaagtagtttagtggagaaatatagaaaagaagagatgataatcaaggatcctgtggcttatagaggccagaattggtcaaatgacataatggaggtgtatttgaaagagcaaaatattagactagacttattaaggtttagaaaatacttaaagaaagcttataagaaaagtagaaggataatggagaaagaaggtatgcaaaattaagtcaagtcaaaataaaccttaaaaaaaagtcaaaacaatattataagatttgtaattttgcatttataaaaagtgtgtaataatagtcaataaaagtaagtatgtaatgatatttataatatcaacagaatttgtaaattgatgaatgattaaaggctcatataaaatatatgtttattatttatttttatttagaaagaaaattatgtttattattattattgttttaaaaaaaaaataatttatgtttaataaatacatgagtacattaaaaaaatatctatttgactttatttttgttatacctattttttagaacaattattaaatgcattgaattatatggcacatggcataaattttattacttgcaatagatacattgtgagacatatcaaataatatttggtaagacttgttgagtagtcacatacaacaaggatcacaatgtttatgaattaaagtatttcaagattgctaagatactcctaaggagaatatctagcagctcgaagaggtttaacattgtagctactcgagatttatactactataaatatcatatatatctttcattttgtacgatacaaaatataaaaagtgaagataaaagtaagaagaaaaagaaaaaaattgcggacctatacctttgattattttaaaagaatcaaagacatagttcatggagacctttattttcaattattttgaaataacaaaagacataggtctccactaccctagccccatatcagatacatgtggaggtctatgtcttcggttttttaaatgacctaagacgtaggtctataaaaccctaattttagatctgaaactctcatttcttcttcattctctatcttttctctcaatgaaaaacgggccaccgccatctatcttaaggctccattt

SEQ ID NO: 243342 - DNA, 2482 bp, Cannabis indica
actcttgcaaggcaaagaagcttgtagtctcgaacttcgactttgtgtgcatacagagactgaaataaatagaatcggccaaagttagaaatgggattgttaacatataggcttatacttgctcaagattatgaaattcaatgaactcaacaatgagagttggtatggaacttctcacttgtggaaaaatagatgcagttcatgttctttgaaaaagtttaaattaaatcagcggtatccaatcaaataagtttgtatgaccatctggtttattttaatttgacacccaaaggtgtaactggagaacaggaaatatatgaatcagaggcaatgaaagctcatattagcaagaaagataaggtttgagacgatgattctttcttggttttcagaagccaattctcacaaaacaaatattaatacgtaggtttaaaggtttatgatcacatttattaacatataactctgaagaatgtctttttgcaacccaagtaccctaaatggtgtaactaattcttgcagcgtgatgaatacactagtatatacacattattttacatttttagaagtaacaggaaaaaacaacaaaagattccaatcttatactgcaacaactgcttgaaacaatcaatttaaatagaaaagtacacacctttacaccaaacaagctaggctcttgctgcatagatcgattacacagctgcaatatataaagttgaagtcaacaattttgacaaaagcaacagtcttattatcaagtttcctactcctactattaattctgcaactaatattattatataggcctttgcttagaaaggggtgccattaatgtaatgaaaattgttaggctagctaacctcgtcgacaaaaacatagacggagaaaggactaggctttgtgctaaagaggaaaagcagaactttgaatgcaactagcgtaacgggatcatccaaatgtgagatcacagtgacaatgaaaaaaataggcaaccagaatctcttagcaaatgtccaaaagacatttgaatctttttctacacctgtagcaccccatgtttcttgatgatgctcatacaccaaattatcaaagtctgtaatataaaagttcaaacaaaggaagattgagaagtgtatcatctataacatttcataaatacaactcaggttgcatgtgtagttgtgtattgattctcaccatctatagcatatgacacacgaggagcaaaagtcactaatccaaaaacagttgacactgcaatagcatttttcaatcttattttacctcctgaaagaatcccaaaaccagacaggacaaaaagatttgttactcagcaaaccaatgatgaacattattaaacaactgcttctttttcctgataaaaaaattaagtgcacagggcaatgcaactgagatcaatcttgtaatgtagttataatctttgttatgaaataaatccaataaacaaacttaagggatttttattgatatcagtaacctaagaacctaattaaaaccattatcaagcttataatgcagttctaatccttaactattgattgatcaataaagtcatattgtaatccaaataatattcattccccttagactcttccttccaagaaaaattcacaaaatcaactgagtaaacaccattatcattataatcaaataaacaaaaacgccaacaatcaaatacataagtttcaaagaatgtacctggtaaacagaaattctgaaaatatcttcttgggtatttaatatatactgaaatcccgagatacggctacgcagtacaggttcaaagcccttcatcaatctcttcaaaggttcccatttggtatacactgtgtagatatagagagaaatatatacaaacatacatatatgtacatgtaaataaacttttgctatcaaaatataaaactgacaaataaaaatgcaaagaagaagttatagaaagaaaaactgatttacaaaatggtcttggagaagaagtgaatgaagaataagaagaagatgtgattgcaggaagagattgcttaagtggataaagaaatattctggaagtggaataagccatgtttaagctaaaatcatctccaactgcctgtaacccttacaaatatgtaatcttgatcgattgggtgggtcttctacaatttcctctcggaggaatctttgatcgaataaacctctctgcctctctcccctcataacacttgactcaaaattagaaatgtcatgtcgtttctacccttctcgttaacacataaaacgacatgtactttattggcaaaaagtataaacactttgtaatttctgcaaacttctatcctaaatgcttatatgtttttttttttttttttttttgttagtattatttctaaaacaaatactaaatcaataaacaacaaaaattttaaaaataataggactgtaggaaattttaaacatttttacgatttttaagattttattt

SEQ ID NO: 243343 - DNA, 3220 bp, Cannabis indica
gactgagttcttgtttctcttccagatgatgatggtagttaataataatccatcagtatagatcaaaaagaattcaaacttttctactgtaaaagtgaatttcaatatctatgtgcaacagggtaacagaaatattggatcttcacaagttaaccatagagactctctattaatctagtatgtaaattttgagtactgacttaaatcactgttgatttcttcattcctcagctttgttagagctttcttttctatctttcttatccattccttgcttacccgaaaaagcttcccgatttcctcaagtgatttaggttggtagttattaaggccataacgtaaaattatcacttgcctctctcttgaatctaagcctgctaaaagattatggatatcctttctcatgtgttgtctcattacagtttcttcgggagttgttattgacatatctgccataaactcctgcaacatgagtcacaacacaatttgaatcataccgaaggagtaataatagcttcacccctgcattttcaagatatgacaagatagaagatttgaaatcataccaggtattttccttgaaaggattctcctattttctgatcaactgaacccacaactcttaggcattggctagctgatctgattttatccaacgaaaggccagtaagctttgcgatctcattgtcgtcttgacatttccctcgactgttggtgatcgcttttctagttttctgtatccgattaattgccttgcttaatgtaccctatacaaagaaaaacaagtggattaataatcaactcttaaaacacatgatattcttaaaaaggagaaaaatatataccggaacttttatccctcttgcatgccgggccaccaatcttgacattgattttcttatccagtattggacataagttgagaatctataacctcttgcaggatcaaatctttctgcaccttgcagtacaccaatctttccagcctataagataagcactggaatgtaaacactagttggaatagagtatcactatcatgtgattgcatttgtaggaaacgaaagtaatcttttgtttcttttttgtttccttttttttttcatatatagacaaagcatttgatgaaacatggcaagaaaatcttgaaaaaaatctatgtattgatttcctatccccaccaaggccacaaatgacctccattcatgtcaaaattttcatgatatgatctacaactacaaccccttcatcagaatatctaagttctgtaattttgtgagtattttctgtgatatcatgtggttgtaagacttgatattcatcacctaaaacgaaaatagtatcatttgtttttctaggatccagaaacttggaagttctgctataaaagtaaagttttacaactatgctatatctaacatacctgaagtaaatcatccaaggctattcctaaacccctatactttcttgcaaggtatagaactaaggacttagtactccttataacctcgtcctgacaatgccaaccgaaatgaagttgctgcttaagcattttttcatcaacaccagcagcttctgcccagcaactcaagctgacaactccaccggtttctatctccaaagctattctgatttgctccaactttgaaatcatctgaaaacattagtcctaaagcttgtaagacattcccgaaacacaagcttaataataaaaaaaacagcacaaagagcattagacacaaacacaaccttcaccccagttgaaagttctgcctccttttttgcaattgcgagccttttacggctacatttcttagatcctttcatagtggaaacaaaaggctgtagaggaccttgcaaaattgtttctacaggcagctgggaagactgagttttcgggttttccagttttctttttcttgatcttctttcttcccttttaccagttcgaacaatgatcctacttgtggggcttttcaatttcgcttcttatcttattttctccaacatgctctgtggatgtgctggctaagtccgaaaagattgagttttgaagagtgtttgacaaacgagtattaaataacttaagtgctccaagcttacttagatgagtcaaaatctctttttctaatctcagcacatctgaatcagaaaaactctcttccaaaacaccaaggttttgcatcaatatcccaaaatttgatgtcttgtatgcatttatgttttctttggcaggcatctggtaatcatttgaatcatgtggtagactcaaatatgtgatagtttgaaaaagaagatatagtaaaaacaagcacaattgagataaataagcaaataatttcaaaccttcaattcttccattattgataaatcattctctaagatttgtggagatgaaggcgaaaaggcgcaagctgtaagagaatctctgccaatagtctcactttcttcagagataacagacaagaaagacagccttgctgaaacgaaagaagcctccttgactatagctaagcaaaataaattgaaagacacattctcaaatgctgatcacatatatggttttgccaaaacattaatacagtctatattggttcaaatgacatgatcaaattttccatcttattaaagctcaaaacaattttatcttatgggcaaatctcataagttaacatgaagatatcaattgccttaagaccaaaaaaacataattgacaactgattcttcatgaacataatttgaaggtcccaaaagaaagattttaataacaatgaacttaccaggagaagctgacatgagcttaaaagttgaattagagtggaaacgagagtgaagaggaaaaccccacttgagatttagcctaaaaccaaaacccaaacccattgtcttagttggaaggaaggagaaggtggtggagaaactgggtccattaaaagttaaagactccaaacagaagaagaaagattttaactgggtgagccagcaacacttagaagctactagttggatatgttgggtattgtcacatctccaccaccagttcttcatctctttttaattgggtcttggttatacatgtttttggtgggtccaaagtaaataaaagagttgagaagtttttaaaatgatagaaaattatttgagtacgcaaagcacccaaatgagttttcattacatatgactctttacaaagataaaaaaaaatcatagaaaattaca

SEQ ID NO: 243344 - DNA, 2000 bp, Cannabis indica
tttttaattttgaatttacataaaatcatattttaattcactttatttttaaaacaataattatacttgtagaaaattacaatatattcaacttataatagtttttacaataattaatatgttaaaacaattaaaatgtcatgatttcatttttttttaaatattttttttcttttattttctttctttatttaaatttaatttaagattttattgggggcaaattatgctacttccgaaaggagtattgaaagaaattgttgctgtttgcagaggcttcttatggaagggtacatttgagtatcatggactgagttatatagcttgggaagatctctgtaagactcgaaaagaaggaggattaggatttcgaaatgtgatgttatggaacaaggcggcactaggcaaatatgtttgggcagttgcatcaaaacaagataatctgtgggtgaaatgggtacatatagcgtctatataaaaggaaacaattgatgggactatacaaattccaatcaaaacagttggtattggaggcaaattgtgcaagtttttaaaagaagaatcgggttgcaatagtttggtatgagagactattccatccagcaaggttatcaatatttaactcctagtttcgagaagcagagttggcatggagaagtttgggggagattcatcatccctaagcatcgcttctttgctcggttagctatccttaacaggttacaaactaaggatagattgatccgctttaatattgtaatggataacaaatgtatgacatgtgaacaagagagtgagaatcattgccatctttttttttggctgttacttcagcaagaaatgccttgaagtaacaacaaggtggcttggttggaagactgcagcaaccacttttccccagctgctaaaggcaacagcaggtatttgctactggtatagctgctgtgatttaccatgtttggagaagcagaaatgaagttctgtggtgcaaaaaaaataagcagaatatcagtagtaacaatgcgaatccaaagggaagtaaagatgaggattgaagcaatacgaccaaggaagatgaaagattcagataaagattggtttgcacatttgtaaatattacataggaacaatttcaggcttttattaagtgctgaacaagttgtaaaagttttgatgcaatacaaatttttgatttcaaaaaaaaaaaaaatttaagattttaattaatttaagaatttcatgattctgtcatattaaattaattatttactttgattatattatttatattaataatgcaagaactagtaaataatatatatttatagtatgattattcttcaatcaagtaatatcgaggagcaaacaagataatctggggattaaaatagctagggacctaacgcccagattgacattggaactaggccctacgcccaagttaacgtggaacctgattcacatgtttctgctccttaaacacaaattatgctccaagcattcttgtattattttggtcaaaaacaggtacgagaccgctccttaaagtacacattctcttagtgtattttggtctttaacttgtatcgttaggttatacatatctcatagattattctctacttatcttattgtattaaccttaagcatttaaccaatttcaacaacaattatacagtgcaattgttgatcttaggttctccttgctctttaatggctctcttcatggattctttgaacccaaaagagggcttaagcaaggggatccaatgtcccctctcttatttgtcttgggaatggagtattttagcaagattatcctaaaggcgtgggaggaaaagaggaatttggctatcatgacaggtgcagagacattaaactaaactatctcagctttgcagatgatgttctaatgttgtgcaatggagactttaaaagtataaactgttggaattattttactagtatctagatttactaccaagtatgtttcattaaca

SEQ ID NO: 243345 - DNA, 5513 bp, Cannabis indica
taggtaaacttaacttagttagaagttaattaattaaaaaaaaaaaaaaaaaaaaaaaaaaaaaaaaaaaaaaaattggtaacttcgttattcaaccctaagtaaactaccactaggctctgtgaattcattgcaagtgtgcaggggaattcaaataaatgaattcgcaacaaccaaaaactcaaatagttccatacaatgcataaaaccaataggaaaaatgtttgaccaaaacaaccgcttgacaagtagtaaaaaaacacaacactatcagagaattcaagaacagaaaacagcatattcaagactcatgataaatgttagaaaagtgaatccacttcagcatggtgtcgtttgtttggaggtaatgaaatgaaatggaaaggaaatcattttatttcattcttttgtttggttgtattttaaagtattgaaatgtcattccaataaaataatttatcattttctattttaaaatgaaaggaaccattccaatgcaagatgttctatttattaattttttttatgcattttaaatttaattccattcctttcctattccaattcgcatttccattcatatacctatgttttgattcttcctaccaaacctaagggttcttcttaaaagtatgaaaaataaaaacattggtaatctactaacgaattcttactcatttgcttccaacacattttgagcctctgaacaatttgtaccaaaagttgtcattcatccccataattgcaactaccaaaatacttttaccaaaataagaaggaaaagaaaaaaaaaggggaaacacctttaaaattctactcaaataaaatgcatatgaaaacacaatactcaatactgaatagggtttcgtactaattgtccggttgattagaaatatcacatttggagtacgattttaaaccctatgttaccaatccaaaaatcactgttcaataaatcatcaccaataatcttattaccataaacagtaaaaatccgaccttgctcaaatgggtagctgagtatcttttaagtgtgtgagatatgatggagtagaggattaaactatggtcctaaaaactataatcatattattttggcaccaaaattgagcgaaaggaattaaatagagaaagtgggagtttgataagatgaaagacctgtggttttgccggttaggcccttgaagatacgatggaagtcgtcccgcttgagaggaccacgtgaaagcaaagcttgaatcagcgtctgatgcttccagttcaactccgtcatcttagatggttcttcggaaccctaatttttgttgttgtaggcttgtagagtagttgtaaagttgtaggaatttggagatatttctgggttagggggaagtaatggggtttaccattgaattggcgggaaccagtatgaaagaaaaagggactacaaccatacttcatcagttgattgcttagctggaccggcccctatattggaaatcccatttaatcgagaaatttagagagactataatattattattatttgtaaaattttaaaatttacgtaaaattctataatacactccctttaatgtattgatgtattcttatttgttttagcatctgaaataattttttagtcaaattttatctcatactcatatacgttatatctatttaagacattctgcaaaattttaagaaatttagaaaaatttaacacgccgaaaataggattcaataagtgtattgcacgcgtgactattttattttatacgcgtgtgaaataaattgtttgaacgctactttctatattgtaaattattctgaatttctcaaagttttgtaagatatcttaaataactataatgtaaacggatatgagaaaaaattagattaattttttttataagaaattcaatccaatccaattgaattataacttttaaggtcattaaaaatgcccctgaactattaagattgttggatgtaaggacttttgtctaatttcattcaattttactatttcggtgattgtttatgtactaatacatactactgaaactttgatatctaccaaatcatgctcctcaaactttgacatatactaaatcatgttccttgaactttcatccatgttagaccattttactaaaattagacaaaatccttaaatctaacaatctcaatagttcaggggacatttttaacgaccttaaaaattcaggaagtataatttagtatatgtcaaaatttaagagtcaaaaattctaattagcttaaaaaaaaaaagttgagctgaaatggaccataaagaagaggcttaggaccatattaggggaccaaactttttctgctcaatgctataatcattcccttgaaacatattaggggacataaaaccagagattatctaaaatataataaacagatgccctgtttagtatttacacaaatattctaaattacatgtgcatatattaactcttactttgggacatgtggattctacttgcaaaagctctatccaccacaccatgtattttaagctccattcatgagaaaattaggtaacaatcttcatgaatttttgtaacactaatgtagaaaaagaaaagttacagaagttacatttttagtactcctcttggtataagactataaccactctgcaagctatgttcagctacagcagatatagtaaattgaacaaaacaaattctcaattgatcattgtagcacatcaaacatgttacaaacagttctacgctgatacgtattgaaaaccgctttctacaagtaaacacttgcaggaccaatccaaatattcaaagaccgattatttttctatgcaatttctctccagtagaaccactgtcatgatggtgatgttcatgatcatggaaaaggagtgtcaagattcctactaaacatagcaccgaaccgacaagaagtttgtcatatcgctccacccagtgaaacttgatctggcttgcaccatagaatgacagagcaaccagagaagtcatcacggctatggtgctgcatttatcaattatgagaattaaacaatagattcacccagatttgaaaatttcatcaggtgtaagtaaattccataaagttgttttagtgggccatgatatatggatgagcttcattgtaaaaaagaaatagacagatcacagatgcttgacagtttgatgaacagagatatatacatttagattgtagggaacatgagacaaaacttggaaggaaattcataaggtacactaaatgctttcaagaattgccaagaattatatttctcatgatattacgggcttgaaaaaaccgaggatggtataactttagagctttctatagttatttaaatcatgtatgacaaattttctacaaattgataaatatgaatgactgataaatgattccttttgtgaagaacaaaaatagtcagattagtacataatcttagatattcatgaaattctatcattttggccctaatttccagaattcctttaacaaagtcaatggataatcagagtcaaaagtcaaagttacaatacctgaatagcagtactatgatagcaagaaccatcatggaagacgaatttccaacggcaagaaacactggaagtgtagttgcacaaggagacagcgccggcacaagaactagaccagcaacggccattttttccatgggttggttatgagagtgactgtgaccaccctttcccattaaaaacaacagaacataactaccaccaagaactataagcaaaagggaagcaagtttgtgtactgtttcttcaccagcaatggtgtttgccatggttactgctgttataccaagaattgaagtagatattacgtgcaacacagcaccgaatgcagctgcaaacaaaattataagtaaagataagtgcaaaagtaatataactataaaatgcttccaatctgaaaaaggaagaaaatgatctcatcttctaattaaaatatatactcgcaaatattaattaacaacccaaacaacccattagcctaaatctttttgttttggaagagattatctgttatgaaaagaataatttcaaaatggtccaacttgagtgaattcaaaccaatgcaggacaattaaacaggcaactattttctcgtgcctaaacgagccagaagcaacacaagaaaacaaaatataacgcgctaatggagtcagaacttcacatcatcacaataaatgaaagaaaataagttaaaagaataggtgacacatccataaactatagcctctaaaagcttaaaccgtggatacaaaaaccacatgagtaatgaaggcgaaaagttaatgaaaactttccatatatgaagcagtatgtaaacttgaaaattactaacaattgaatcaatacccataaaccgtgaaatgcttacaacgtattcgtgagaatgcttataagaacaagtacattaaaattgatagcatagatctggaagtaaaagaaagaacgtactaacgagaagagtgcgggaaagagtccatttctgagcacggccgacaatggagaaagggagccaatgcgtgggaatgaaggaatgcagaagcgataccgttgcgattcctccgatggtggacagatcttcggcggtgaaactttccatcgaattccaagatccaaaaggacacgaggaattgggcgttagagaattgaaatttgagtattgattttcaaattgtagggatttggaatgagaaattggattaactagcttactacactacattcgatttgggttaactaactctaaattgggcgttagagaattgaaatttaagttttaggggagaatttatggattgattggagatccgagttacaaataaataaaataaaaaatcaagtttactcatactagaagaagatagatcattactatccgcaactttacctaacattaatgaaaagcttgttttcctaagaatataatatttgtaagcatatccttaaattatataaatttttgtaagtggtcctcaaattatatttttgacaaattagtttttgaattttattcttttggtattttttttgaatgaaagataattattagggttttttttttttgatattatacctaaaaataattttatttataaaaatacctttaagaaaattatttgtacaaataacgattgccacgtcagcatacatatcgaaattaaaaataattaccgaaaatagaaaaaattagaaaaatttcgttttcaaaaatttttgctttttgagagttttgaaaaagcaactatttagttgtttttgatgtaaataagatatcaattgattacttttctattaaaaaaaatattttagaattttacacatatatataaataataaaataattactttaatatgtgagaaacatatatttttttgtctctaaaaacgggtgactaatattaaaagtaacttttttatttttttttatatgtttaggttatactgtgttattttattgtttaagat

SEQ ID NO: 243346 - DNA, 3953 bp, Cannabis indica
tggttgaagaattttgatgtatacagtataccattttcatttcccaatgtttgcaggttgtatataatgcaaataatcttgcaaagttggttgcaaagaaaaagagcctgcagaattggcttgtatattaccaaaataagcatgagagacatcctacaaagaagcccaccacaaaggtttccagcctgatctctgaactgtatatgatttgcaaccgtatcctttttaatgaagttttgtcatctaatatttcatgatgttctatagacaggtttgtggggcctctggggaagtagagtggatgcagttggctattatactgccgagattagtaagttaaaccaagaggtaagggccatatttgttgctatcttttatttctttttctttgaaaatgtgttatatgaaaaaactgtgtagccttttaggcttctttgctttaacaatgtagtaatatgtttgatctggatatttgtagcagtgtcatatttgcaattagtctatcactgtttaatgtcaatattggcattttattcagacttaatgttagaaatgaatctattagaagatactattcattttcaatgttatttttttttttgttaaggattcattttcaatgttatagatgtataaatgactggtatacaggaaaatgcagaaagagaaagggttgccagtgatccaacggctacagtgcctgcagcatttgtttctttcaaaacacgatggggagcagctgtttgtgctcaaactcagcaatcgagtaatcctacaatctggctgacagagtgggctcctcagccacgtgatgtcttttgggacaatcttgcaattccatatgttgaacttagtgtccgaagattgctcatggctatttgcctttttcttctaactttctttttatgattcctatagcatttgttcagtctctagccaacattgaggggataatgaaggttcttcctttcttgaagccactaatagagaagtgcgttcattctgcattatgttggaattttaatttctcattatgttcaaaatttagttaattacttttaattgtgcttctttgtggctgaaattagctaaagatttatgatgattccaaatggcaaaacataaatataaaaagttatgagttcgttggttttgttttaatggttgaagtatcagatgctaaaatttgttgttgcaggaaggttgtgaagtctgttatccaaggatttcttcccggaatagtattaaagatattccttattctgcttccgacaattctcatgactatgtcaagaatagaaggatttacatcgttgtcctctctggagaggagatcagctgagaagtatcatttgttcatacttgtcaatgtgtttcttggaagcattgttactggcacagcatttcagcagcttgagaaattcattaatgagccttcaacagagtaatttgcataatttttgtattccaattgattcagttaaagatttcgttattgaaaggaaaaagtgttggaacgactgtctagcttaagtggttaggtatgtgggttgtgtgtatgaggtctggttcaactgtccaaaccccagctggggtaatttaccaaatgggttactagctactgaatgtttcttatagatgattgatcaagagttatcctcacgaatcacgatggatgactagacccatcatctataactttaaaagagaaatattatcattatgttttcaattagtttactgtaatttcttttgtttgtctattgggatctagagagtgtccttggttcagcttagatgatgtgccactggctgtagtattaaagccaaacttacaatctcttatctgctttggatccaagtgtttctgtcctttatattttcttgaggtgaaggtagataataccaatagctttaggaaaaatgacatgttcatcgaattctagtgtgttagatttcaaagatttttttgaatgatcattaggtaataatctaatggaaaagttcttctgctcctacagatttactaaaactattggtgtgtccatcccaatgaaagccactttcttcatgacttatgtaatggttgatggttgggctggggttgctgcagagatccttagattggttccattagttatgttccaccttaagaacacatttttggttaagacagaggaagacagggagcaagcaatggatcctggttgcttggactttgctacatcagaacctaggatacagttatatttcttgattggacttgtgtattctgttattacacccgtactgcttccttttattgtggtcttctttgttttcatacatggtttttcgtcatcaggtatgccaccttatctttattgtttgaatacgtatacaaatacctggtttatgtttgtgttatgaataagattaggagttcaaggagagacaaaaatggaaagccaagaatgtaggactataagtgaatttgcattgactctaagtggaatttaacactagttgtctaacttttattgatgagaggcacttgcaaagtttaaaaggtcccttgaacgtatttaatgaaatttcctaacgaaatggaaaaacgaatatggactagtagtacataatgaataagagtgtggcagcacactaggtttcctgcctcaatacttgttgatggcattcatttctttgaacagttgaacttcttcttgttctgaatagaaatagaattgtgcattggttagcactacagtttcaataaaagtttcatattgaaccttttggctgttttactgagcactaagaaagtaggctgttcaatatctacaaatattgtttcctgtgttctttttttcatattgtgatattgagtttttattgtcagattatcaacgtttatgacaaaaaatatgaaagtgcagcagccttctggccacaagttcataagcgtgtaattacagggttaattatatctcaacttcttctgatgggattgtttagcactaaaggtgttgcaaagtcaacattgttgcttattgcacagccaattatgacattctggtttcatagattatgtaagggacgttttgaaactgcattcatgaaacttccattacaggttagtgatagatttaccaaagaaatggtctagtttaagacttccattactggtttgtttgatttttttatgatggtttcagatgcatcttacttcactagcctattaaatcactaaagaggaagtaatttacaaaatctactttatggctgtattagtaggtatgaagtaaaatgaaaacaatcgagagattctttctagaaaagaaaggagataggaaatgtatctttatcttgtgttcaaaaaggagagaagatttaaatcctatctttagttttgtatggaaactaggatatgttctatttatattataaaataatcattttatcacttaaatatacatttccctcctaaaaccaatccaatttagacagtaatattagctcaaactggaatttggaaactcattacctaatctattccttccttccttccccttctttctcctgtcaaacaggaagatgtgaaaggaaggagatgagtaagagatttattggatgggtttgaggtgaggaaattgtcgtacttgaattgaatatttgagctcagttgacaagaaaatcttacatttcttccacttctgtcttctaggcatgatgattttgatccttctcagataccctctcattccatcctctcttttttcctcaagtattgtgcttctccttccttccaaccaaacatagcctaaaaacaaagaattttgctctcagaataagaatcattgtatcttgcactatcccatggagtacaattaaaactaatgaaacattttatagggtctcatagaagcttagactacaaaagtatctgttttctttcataacaggaagcaatggtg

SEQ ID NO: 243347 - DNA, 2557 bp, Cannabis indica
acaaatatttggtaataaaaactaaaatgggtcatttgtaaatatatataaaatatattaatttttactgtctgatgaaaccatattatgtatatatgtacgtacgttggtatgtatatatatatatagggtgacccaatcgtgtgaatacaacaaaagtgacatcccatccattaacccaatcccacgaccaacccctaaatatataaacatatattatttctttgttttcctgcttttaactactgtaataattaatttattaataatatatatatatttcctcatctcattctcatcatatatatatatgtatcactagtttgatcatccgatgatggaaagatcttcaagtagtactgagctccgatcatggtggtggggttgggaaaaattgctatagagggcactggaggccaggcgaagatgaaaagctgagagaattggtggaccggtacggccctcaaaactggaatttcatcgcagaacatctacaaggaagatcaggttaattaattttgctggggttttaagaaatggggttttcatataactactatatagtacttgtagttactgccatggagctaactagctaccttattattattattttaataaatataaataataatttttatttgggtgcaggaaaaagttgcagattaagatggtacaaccaactggatccaaacataaacaagaaaccatttacagaagaagaggaggagaggcttctagcagctcatcggatatatggcaacaaatgggcttgtattgctaagtacttccatggaagaactgacaacgctgtcaagaatcattaccatgtcgtcatggccagaaggaaacgagaacgtttctcttcctcctcttcctcacctaattcccaccacttaatccacaaccacaaccacaaccacaactaccaccatcatcatatacttagtactactactactactactacttcttctaaacccaccaccactaccaccacttctacaccttattataatattaataataataccagtcccaaattagggcttctcaacttcaaaactcctgaccttgctactgcccgggatcatcgtcagaaaatgagaatttggggaattttgtcttcttcgacttcgaattctaatttgggtatgtcagggagtaataataatactagtttcactacaagggatttttattcaactagtactactactcgtgatgaacttcctcatcatggtcccaataaagatggtaataatcgtgatcatacaggtttaatgggaatagaagagagtaatagcagtgttattaatggaaaccataagagcaatatgttgcaggtgatgagagtaggaaatatggcttctcagaaagaaaacaaagatcatgatcttcatcatcatcatcatcaggtgccgtttatagattttcttggtgtcgggttaacttcatctctagctacctagcttattatattatataaatatataaaaaataagttcttaatttatttaggtttgaattaaagttaatggagtttttaaaatttttaattaattattaactatagctattagctctctagtttatattactattattatcctacaaatatggacattttatttataattgtgtaatgtgtagtatagtcctaatttatccggagaaatatcttagaattttaatttatttgttgtactcggatcaatatttgatctatcaaagtaatcaatatatatttgatcattattgtgtcgattaattagtagtagaactacaatccaatttattagaatgtttttttttagttttcttttactttttttcttttgtaaggcaaatttattagaattttgattcattacaatttacaatcatcatgatgaggaaaatgcttgaaatatttatatatataaatatatatcatctatattgaaggcaaaatagatgaagtaaaattgagtttattaacatgtatatgtagattttcggccaatttaatttatataactttttcctttgagaacaacgttccatctctttctctctctccaacacacacacatatatatatgcatatatatatgcatagcgtgtatgcgtggagctgtgttctgcaagaacattttctcatgaaatgagtactgtacttaacatgattattttgttcgccaaacaattatctatatatatatatatatcaatgtatttgtatatattatgtttaggactgtaatctttgttttttctatttcaatctttattttcctgattatttttattagatcagtctctgcagataacgtactgaagttcaagtgataattattaacattttggggcaaaattacattacagaaatatggtattaatttcgagggtaaaaacaaaaaaaaaaaaaaactacaaaattgatgaaaagaaaaataggtttattattatatggaaacccaatgtagttcaattaattaatatctctatatatctatcacatactggtgtataaatatacttgaacatttattagaagtatatatatttatataca

SEQ ID NO: 243348 - DNA, 6697 bp, Cannabis indica
tttgatggttaataagattaacttttcattacaaaaaaaaaaaattaagtaattaaattccattaaaaaaaacttaaatctaaataatatatatcataattaattttaattatttttatctttataagttattattcacatatcagttttttattaaaatatttaaaataatttttaaataaaaataaatattttattaacttagaccaatcaaaatctgccacgtggccatttacacacataacgactagatacctataaaatttctaaaaatataacttgggaattattatcgcaaaaaaaattaaacttaactatttatctgcaatcgatagttaaacttaggtattttcactgcaaagtactcaataaaaataaaaatttaatgacatgtaccaattgaagattgtcatgtgaccatgtcatgtgaccattgacttaacacttaacaaccagatacttgtgtaagttccaaaaataaagcttagctattattaacgttaaaaattaaatttaaatacttatctacaactagaaaaaaaaaattaaacttaagtatttaaggcacaaattagtctaaattaaattaaaaagcatttgcaacctcttttgtttccaaaaatataattcaacccaaattagaagtcatccttcttctcaactgccatgatattaggagtgataaaatatgtcatcgtgtcgtgtttattatatcatattttatgtgatttgcttttatatttcgtgtcagcgtatctacccgttttgactcgtattttattttctcaaccctaactcgacccgtaaaaaatcatgttgtgttgacccactttaactcgttttactattactaaagttggaattgtagaaaaaataatagagttaggtttcattaaaaaactcatatatatttgcatatataataaaaattaaaatgttttaaatattttcaattttttttaaagaaaattaaacttaaatttttttaatttaaagattgaattactaaatatatatttttacataattttattattattattaattttttattttatttatttaaaaaaatcatattaaattgtcaaatttatattaagcatgtcgtgtcgtgtttgacttgtttttatttcgtatcaagttgtgtcgatttgttttcaactcacatctaatttttctgaccttaacccataaatttcgtgtcgtgttcatgtaccgtgtcaaaacccagttcactacccctaaattactatgggaacttcatcttggccatctggttatccttttgctatataaatagagcccttgggttctttcttgctattagggatgcacatttctctcataaagatggggtaccgcagggactcgcccctattcgggtgggaattcctcgcctaaatagggaacggggcagggacagagattattttttgttcctgaatattaaatgggatgacgacggggatcatactctcccctctacggggacccatttagtattttataatttttaattgatattttattttttttagtatattagtatctttttatgaattttaagttaagttgtagataataattagttttttgaataataattaatgtgtaatattttaacttttatgtaatttaatatttttatacattttaatttttaatataaactttaattttttagtagggaattccacatcccatttttgccctattagaagatttctcgccccatccccgatgaaaaataaataagaatagggattaaaatccgtaatggagatagagacgaggagaacactcctcactaattcttcgccccgtgtttgttcatacttgctatatatatattttgaatcaagtgtttatgcattataatacataacttgggactcaaatctaggacctccaacacacgcaccctcttatgaccacttgagttagcctaaatacaatgaataggattatcggtttggtttggttttgatttatatttgttattggaaatatgataaatactagtttagatcttatgttttgcaaaagttactaattagacactctgttttgttaaatgataaaatagaccttgtattttttaaaatggtacaaatgttgacaattttttttttaatataaccaacttgaaaatatgaacaaataaagaaaatgtaaataattttgtcataatatttttagatcagattattattaaattttattttgataaaaaatcagttaatgatcttaattttaccattttagaaaatacaaggtccattttgtcatttaacaaaatagaagatccaatcaataatttttacaacacacaagatccaaaatagtatttactcttagaaatatgcagattaggcctacaaccattgagtacttcttctatcttttgtctttacagtccttctccgttctcaaccgccaaggtaaatctttaatcttattttgttttttttttttttaatttaagcgtttatatattataaccatatttttcttgggatttgaacccaaaacctaacacacacccacctatggccacttgagctagcatcaagtgattactttaatcttattttgttaacccttatataagctctttttcttttcttcgggtacacctgtaaactgttcgatcaaatgtctgattgaagctttcaattgttttcaacactgttataagacgaaatatatattataactctactattttgaagattatgaaaccaagttggtttggtgctatatgtggtacacaaaaatctcaacttttttttttgggaatgttttatgttttgagtcaaaaatggaatttgttttctttctttttacatttaacattttgagaaacacagaaaaatccaacatttaagacaaattggggggtcctattctatgcattgaatgaaaatatataatcgacgttacttctatactatccactgaatttttctatttatttatttattttgggtttattattttatttttcatatttgggggttttaaagttggagtctttttcccttttttcctttgttaatttgcagaaaacaatggcagctgcttcttccaccacttgcaataacctaaaccttcccaaactctcgtctttgtcttcttcttcttcttcttcatcgaactctgtttcccatttgccattcaagttccgtaaaactacttctcgtacctctatctcttgcaccctcattcgcgacccagtaatgcaggacccgcctccgaccttagatctgccccgacccgactcttttggccgtttcggtaggtatggtggcaagtatgtccctgaaactctcatgtatgcgctcaccgagctcgaaaccgcttttcatgctctcgctggtgatgaagacttttttttttctttttttaattcagaatcccttctttgcttttgttttttatactatctatgaggaatggagattaagttggtgaaataaatgggtttttctgtaatttttaaggttgtgattgacatgttttttgagaaagaagaagaagaatgaagatgatgtaatttgctttaacttgctagaaaatgctatacttttggcttgaagatgaattgtatcggtttgagcatttagattaatcatatttgtttcaatccttggaaatgtagtttcacattttccattcatttcaattttcaatagtatcggtttgctttaacttgttaggaaatgttaatactattgggtttaagatgaggcttgcaatgaaaccttgaactttataatacccttcgttaaaattgtatcggtttaatcatttagaatagattaatcatattgttgtttcactttttccctattccatttcatatgtttcaatccttgttttgactttgtctttgaatctgatcaaatttctggattaatgtcttttcttttatgttgtagaaagagctgaatgggattttgaaggactatgttggtagggagagtcctctctactttgcagagcggttgactgagcattacaaacgtgctgatgggaaaggacctcaaatttacctgaagagggaagatctcaatcacactggagctcataaaatcaacaatgccgttgcccaagctttgcttgcgaagcgtctgggaaagaaacgtatcattgctgagacaggtgcaggtcagcatggagtcgccactgctactgtatgtgctcggtttggcttggagtgcatcatctatatgggtgcacaagacatggaaagacaatcacttaatgttttcagaatgaggcttcttggggccgaggtaatgggatattaatcttcataagcaattttctcattttcagattttcagtctttgtttttggtgaagatgaacttaaatttaaggggcaactcactttttaatgaatcgatgatttgtttgattctttatttatctatgattattgagcataatttgaaaactaaacttcactttacataggtgagggccgttcattctgggacagcgacattaaaggatgctacatcggaagctataagggattgggtgactaatgtggagacaacccactacattttgggttctgttgccgggcctcatccatatccgatgatggtcagggagttccataaagtgattggtattgaaacaagaaaacaagcactagagaaatggggtggaaaaccagatgtgctggtggcatgtgttggtggaggttcaaatgcaatgggactattccatgagtttgttgaagacaaggaagttcggttgataggtgttgaggctgctggttttggattggacagtggtaagcatgctgcaacattgaccaaaggtgaaattggtgtgttgcatggtgctatgagctacctacttcaagatgatgatggacagataattgagcctcattctatcagtgcagggtattattattgatttacctggttttttcggtgacttaagacatttctgatttaactaaattcttctgtttgttgcattcagcttggattatcctggtgttggacctgagcacagttttcttaaggatgctagccgcgctgaataccacagtgttactgatgctgaagcattggaaggtatggacatacgaaacattatcatcgatgctcattgtgtccctagtttgcttttcaattacacatttggaatccttgttccgatactataatgatgcctttttgattgtgcagctttcaaaaggttatctcgactagagggcattatcccagctttggagacttctcatgcacttgcttacttggaaaagttgtgcccaactctccctgatggaaccaaagttgtactgaattgcagtggccgaggcgataaggatgttcacacagccatcaagcatttgcaggtttaaaattccattgatcagatgaaccaaaggcagttgaaagctatttagactgttttttctttctggtgggattatggtttagtaataatggggaaatggcttttgtaaacagacagagcagatcatactctctgttgtttctttataataaatgttttttaatagaaatattctaaactttaattcaggttcaatatatatatattcaaagtgttcttttctatttcttttgctaaatctttttataaatttaggtaaccaattccttacatcttttaattttactaaagcatccaattaacaaaatgtcgatactttattgtatctgaattttattctccaacaacttacacaagataatttatctattattgttggaacttctggcatttatttgcttaaaaatgaaaaaaaaagtaattaaaaataagtgcaccagccgggaatcgaacccgggtctgtaccgtggcagggtactattctaccactagaccactggtgctgtttggttgtgtggacaagaataaattataaagacaaacttttattgtcatcaaagttgaagtttcaaagcttatgtgaagtttcacaatgttaaattgtaccttaataaataggagttttatttgcaacttaagaaaaaaattataaatacaccttatttttacatttttattacatccgaagaagaaatacatgtatataggggtggtataaaaaatagggatattgaaagcaaaactacttaaattttatgattggtgacattttttatttaattgatttattttccacacaagcatttttaaaaaaaaagtgaagactatgaagttagaaagaactccattgaacatgacttcatcattataacaattgtaaaaaaaattatttttatttcgttcaaaagtagaaacaatctctgtatcaacaaaggaaactacctctcaataaaaaagtatacacaacatcacggtaactctcaccactaaaattatagaaattgaaagaaaagaaaattgtttttttttttgtttggttcttgagaaaatgaaagtgaaaatcagagataaaaaaaataagataaagaaatttaaaaaagagaataagtttttttttttttttttgttgcttttgaaatttttgaaagatagaaattattaattttatttgtaccttaattatagataggattaaacttagttttgttggattgatattatcttttcttttttttttttttaagaaaggcattatcattcaaaatggtacaactttttttttttcctagtgaaattgaaagtttttaata

SEQ ID NO: 243349 - DNA, 2391 bp, Cannabis indica
gttctagtattgtgatagttttgttgttgcattgtacctaatttgttttgtccaatgattaagcagttattgctttggaccgtgcaaatgctggtgatgctttactctctatgcccaaggtgcttgactctcatgatggaaagaacaaacctaaaactggccttgatgacagaatgaaagatttggttggcagtgggattcgaaagggagaaggtaatgataaggttaacaaaattctttcgagaatgtcattgaatacagcgtttacaatttgtgcaatcattactattataatgtgcttcttttgccattttgttaatgtccttgtgggtttgtgtagatgatgcattagagatggaagtcgactcagtagcaaattgcatggaggagcgtctaagatcattaggattgctcagtgaagctgatgattttacttcaatgtcaagacaaaactctactatactggaaggcattgatctcaaagctcatgtaccacagaagaaggtatgtcttcttagcattctcggtcagaatgtggtgtggcactaaatcaacttactggtgttttgctaatgtgttctgccagatgaaggcaatagtgctatctaaagcacctggtgatgcatgcaagttactgggagtcttgatggctttgtggcaatcagggtgtgttcttttatttccacattttcatgtttacatgtatagctagtactgttgttaatgctatattttgaggtaatatctttattttgaactagcttttattttcttgtaataggtcatgcagtggaaaatatgttatgccatggatttacagcatattggttaatcatagtcatcatctttcgtctcaagaaccagtgactcagatgcttaagtccttgttcaaggtaaatgttgcagaggtgtttctgtttttaagtcctgttactttcgatcctctatttgatctctgccattcatttgcttccccactatcatacttaggatagaatatgagatactcatgcgtgttttaaataactttttaaagctgtgttcttgtccaaaagaaaaagaaggtatacgaatttgagacattttactacatcaattatctttaatgccccatagcctcctattacaattggcataatatgccccacaatatattgttccaagttagaaatttttttgatttacatgttttccttaagcggaggcttcaccgaaaatatgtagtatctcctcgaacatcatgaaatcacttacctgacctttagaattttttttttcctaacaggtttccaaaagtagaggatcagctatccaatctttgttacaattatctggacgtttgcaacttattgtagcacaggtcagtaatttacattcttaccatcttcctttgctctggacaaacctttatctgatcttattgttgttaatgcaaattctttaatatgcttttggtggacagattaacaaggcatcacagcccaaaacaccattacagcaagaacataacatagatgaaagtgatgacgatgacgatgatgtagatgatgttatttataaagatgatgacggtgaatccgaaataagtagtgatgaagacaggtatgcaatgtgtttctctctactagtgctataatttgctactcttcgcagtacagtttgattgtagttgcctatttattttatatttattttaatttttgcagttaaagaagttgcattgcattccaatgtttgtaccgctcattcgaatggatagactggccagtctgctattttagcagggtgacccttcaaatgtaacctacaattttgttcccctcaaattaaacttttgcttggttagatcaaatatatattcttcttaattattgcctgtaatttaaggcacaaataggtcctatcggtgtatattacttgtagaagaacatgccattttaaacaaagttgtgattgttcaaagccatctcattatgaaaaagaaagtgagcaaatgttacatttagcataaatttgctgctcctatgcaaaataatattcaaattacaatttcagagaaaaggtagctatcattagatcctctcttattttttttttttttttttttatgtgagttgtaatttcgaacatattagtaaaaattgtaattttgcaactcataatgtggctaggtgggtgttctttcactagagatttggttgtattccgtattcctctatccctgaacaactattttgtaaggatcatgtggtctagttgattctatttatatatgaatgttttttttcaaaaaaataaataaataaataaaaaggcattatatattacacccatttatatgtacgccaatatcaaagtaaaaatctaactagattgatttataaaatttac

SEQ ID NO: 243350 - DNA, 2172 bp, Cannabis indica
cgaatatagacggtctaggatgtaactaaaaagtcgctttatcctggacattaccggcttccatgtccttccttgtcctgtaagttaaaaaaaaaagaagccaagcagtaacatcttttcattatttcagcaaaaacagaagttgatggtgctaagttaaatcaagcaaataatcctgtttaggattcaacactcatatatgctatgtaaactatctaaagaaatccttggaatattgggcaaaacataaagatacacaacaaaaaatgacagcaagtgatggataacatttgcaaagaagaatatttgtattcatgtataacaaatgattcacatcagaagaagtaacatgataagaagaaataaagaaaaaatagaacaagtaaatgcattatacatcaagttgaatcttccaaaataacattttccatcatcaagatcaaacaagctcttcattttcaatgaacttgagacttcagaagactacactttttgcagcaacactagttaaacattctaatatcaagagcaaatttcaattagaatgcaagtcaatttatatggaaaggtttgtcaaataccacttggccttgcaagactagcacatagtatacatacaaacattcaaaatcagatataaaacaacaaaaaaagtaagtttgaagacatttgatgaatgcttccagaacccatccatatttaactgatagaaattgacaacacaacagcaacttcctaaatacattggtggttctctaatacttaatcagcaaaaatgaaaactctgtacaacaaatcattaaaaaaataaaaaaaacttagaaaattcttcctttaatttgctccaacacaaaacttaatcaacagttacgaattcaaagccaattaaaatgaaaatgagaaaatccaatgcacaacatggttcttgaactgcaccatcaaattaatattgacaaagtaaaagtaaaatcaaaacctttcgcaaaagaaaagataactattatctatgccctcactcaaaaataagaggaaggaaagaaagagaacaatttgaggaaaacacagaaacagaaatgagaacaaacttgtttcctccgtcttcactgacgctattgccgaatcgaatatgacgaccggcgaatatgccccgtttggcccgacccattacgattttagagtcgggcacatattttttcagagagtctttcactcccggagccaagttcttctctcctacctttttcattatgttattaatcatttctcttcctctaaacgccatttttatcgatacgtttcgggatggaaaagctgaaagatttctgggattttgggtacggacacgggaggcaccggaaaattgtccaccggtgattacataaaagatttcgttaaaagtaataaccgcctagtttagggctttacagacccccttaaccaaatttcatacaaaaatgccatcgtccaactccaaacttatgtttagagaaatatcttccttttttataccaatttttctagtttttataccaaaataatagattttcgtttttcacacttgtttttaacaacattttttatcgaacccacgtgccaattattctttccattttttttcttaaaaaagataaataaataagaaagttacattatatactattttaaataacccaatattctctatttttctctaattaaaattttattctaattttcgcacaaacctatacattcatctaaaaaaaaatctattatgtttgaaattatgtcttaattatgtgagagtgtgaggataatttaagtacaatattcataaaaagaagtatacttgaattaaattttatttagagataaatttaattaatgtataaaatgaaaatgtattcttcaatttctctaattgggttggatcatgcttaatccgtttaattcgaatcagggataagttgaagaatacctctttttttgtattcattaatcaaaaatacttttatattatatttcattaaaatctacccatttttgtgagtgagttgtctaacataccctcgccctccacttaagtatagcacatgatttacatcaacttaaagagtataatggagatattatctataaaagtaggtaatatcttaaagaatatggaaatagtaaaaattaaaatagataaaa

SEQ ID NO: 243351 - DNA, 3357 bp, Cannabis indica
atagaaagacctgaagtcttgctaaactcatcgagcacttccttgatagcaagaagagagtcctcattccttttacgaaagatcactaaatcatctgtgaaacatagattagtgagtttcagttttttttgcataagggatggaacctgaatctcttttctctggccgctttttggattcttcgggacaaatactccatgagaagaacaaagagaaaggaggaaatgggatccccttgtcttagcccctgccctctcttaaaagtcccctgaaatctacctttcaagcgcagagaataagaagtgtttctcacacagttcatgatccacttgacaaacttagcagggaagcaaataggtcacaagaagcttctcaagaaaatctcaattaaccgtgtcgtaagctttactaatatcaattttgatagtgcatcttagggagctgttcttccttctgtagttcatcaagatgtcttgaagaataagaatattgtaggcaatgaaacaacccttgacaaaggctccctggttccgactcactaaaatggggaggacattagcaataggccggcagtcattatctttaaaaggatatcttgaagaactacagaagaaagaactgctaattaaaaaagttccatttctttaaaagttccatttcttttaaagcaattcgcatttatatccctcttttgtaatttgttttatatttacaaaactgtttagtcataaataaaatttacataaagttttataaaataaaaaaagagactaaattgcaaaacaatgttaaaattttagggtgcccacgctggccaccaatattgacttctatgatttgtagatttcaacaatgctttttcttcctttcctgtttcgctttcagttgtctgctcctgcatttaaaacaaagaaaagtctactcgttttttgttacttcaacagaaatgtgtcgagcttttgaggccacagaattctctactcgatcttgtttactttcttgttgctcaatagagctgtcttcagacattgtcaaagaatccaaataactcttaatgagaattaagaaaacacaatacacaagagcaccaaatatgtacaaaaagctgggtccatcatttcccaagatttcaatagaagtgtccatggtgaattcaagaagaaagctgaatataccaagcttcacaggctgttctctcccagatgatatggtcaaagcaaatagagaaaatgatccagttgtgaatacatcaaatttattcccttgggaaactctcccttcatttttccacttacaagaatccatgtactttgaatgtactttaaaccttggatactttgtcatgaaaatcataactgaaaccatcatgaagaagaaagctttaaccatggttcgtaccaaatactgaccatgacatttcattaccaatttgttaatgaatataggtgccctgaacaaagaagagccaagcaaaagagccaagatgataaagcaaatgctcttcaaatttccagcttctgtaaattgtagttcgaagaagggggacaaaaatagacatacaatgccaacaatggctgatacaaattccaaactaataaacaatacgtttttgaatctctccattttttggcccttcaaaatggttggtgatattatatattcatcactatagtctgatttatttcccatcaaggattccatataacgtcttagaaaaatcaacccaatacagtagagaactgccccatacatataccagagattaggcccatcatcatatgctggaatttccatagaagtgtccataatcaggcctatcagaacactaaacaagccaagttctatagttctgtggctttctgaagataaaagtaaggctaaaagagcaaatgctccaatggaatacagactatattgacttccatgtgatatttttcttccttgttcttcaacacaagattttctatatttagaatgaacatcaaaatgaggatacttgatcaagaaggccagtatccaaacaacccctagaaaaacaatttcaatgattgatattacagaaaagttcaacttccataccttctgcatgatatcactccagattggagccacaaaaacaagaaaaacgaggagagcagagattgtggcgaaaacaaggagctctgagcttttagtatcatcaaattgcatattgaagaaggagctctgggacaaaaacaacaagccaagaatagctgaaagtactcctagtataattcgaagatagaacatactatttgaattcgagattattgaagccatggagatagtgtaaaaaaagaaaaaagacgaaatacagagtataattggtaccaaatgtgttcaatgaagagatttgatatcagtcaggagagaatatacaagaaagaaaactagctattaagcactgttgttcaattagaatttggtgtaaagcttttgtaatatcatgtgaacataattattcgtgcctaatattagatctaataaagattaactagggagatgaacgatggttaaaatctaatgtcactgtaacaaaagaaattagaaaaaagaaactaaatgtcatgtcagcatagagattaggaagatatttacacagaaaaataagagtgagcagaatcagacaaaaataataatgagaaaaatgtgaaaatattgatgttgaaatgattgatgttacttgatcttagcctagcagaaatgaaaagtcgttgacaaggtaatgtgttagagaatttttctgctggtaatagtttattataattttatataataatataaatatttaaataatatcccacaactaatggtgaggatgacgtggcattttagaaaagtcataaagggaagagtggaacatatgtaggtagaataagtgaagcagatctgagccgagctgaggattcactcaaaggaaagatgaaaaccaaagatatgcagagataagtaatcaatctacaaacagtttttagcagaaagaagtttcatgggcttcgacttaaattagtgaaaatggcagatgtcacaagtaaccaacttgaacaagttttaagcttcaaagttttgtaagaaggggaacaaattaaggaaattttcttccaagtaattttggatttattaagaaaaaaaagtaattttggatttctatactaacaaatagtaaaatagaaataaaatctaatacaatataatgccgcgtactaaacaaaaaatacagcgtactaaaacaacccagtgtagttatttcaaaggagcaatttggagtgcagcactcgcagcatccatcttattcagcattattaattgttatacatgtaaaataataataataat

SEQ ID NO: 243352 - DNA, 4392 bp, Cannabis indica
aaaaaaaattaaataatttaatactcttccaaattaaaataaataatatattaataaatattgtttgagactagtgtgttaatttgttgttgcataacattagagtacttttagaatgaagatgccacaaataatgctcttatattgccatcgcattatgttataactatacaaacttactattgtatcatcattttctctttcttattttttgtttctttccttcttcaatgtgtcccctttacctagacataaccccacgtaaactactttactaaaacatctcccttgtttctcttcacttcttcaaaacaaaacaaagataaaaataaaataaaaactctctccaagctttggaagaagaaaaaaaatgaaccaaggaagaggcaatgtgccccacgtagttgtggtcacatatccagctcaaggtcacataaacccacttctccaatttgctaaaatcttagcttccaaaggcctaaaggccactctagccaccacccattacactctcaaatccataaccaccaacaccaccaccactaccacagcggttggatttgaacccatatcggacggctatgatagtggcggattcgagctagcttcgagcttagaagcctacttggagtcatttagagccatggggtcaaagactctaacagagcttattatgaagtttagtgagacagattgtcctgtgacttgtgtcgtttatgactgtatgcttacttgggtgattgatgtggttagacagttcggtattgttggtgtcgttttcatgacaaactcagcttctgtgtgttccttgtattgtcgtttaaatcgtggggaattgtcgtttcctgttgagaagggaaaagtaatttctactatcaaaatgtctggacttcctccacttgggttttctgagatgcccagttttctagctcagcctggcgatctatctccttatttggctctcataatggaaatgtttcagttattggatggtattgattgggcgttttgtaatagtttccaacagctagaaactgaggtacttcttacacttgtatacctttatataataatagaagaacaacatttatatgatatttaaaagaaataaattatattggcaaaaggaaactgtggttattgatagatgactttaaagattttgctctgtagtttattattattattattattattattattattattttcctgaaaatatctggtaatgtaaaaagagtaagaaaatggaggttaagaaaatttacaaattaataattataaattatttaacatgatctttcaaatcaaggacagataagcattcattcattgcaaagttttctctccttttatgtactcttattttttgtcctcgtagttatatgtaaaaaattgatcgtttattaataagcatgggttttttctcatagttttaccttaatttttcatgtatggacaaaagggtaatagattatgcaatatataaattaaagtatgccactttttaagtgtgtgtgtgaaaaaatagataaataattaacactatcgaaccaaatgttaatatttaacaatatcactctatattatatgtaaacacataattctcatttggctgtttctgttgacaaaagctgatggaagctatggtaggactttggcccttaaaaatggttggtccaatggtgccatcagcctatctagaccaacaaatcaaaggagacacaagctacggagccagtctatggaaaccaacaagctacaagtgcttaagatggcttgacacgaaaccacaacacgcggtcatatatgtgtcgtttggaagcatggcaagcctttcagcaaaacaagttgaagagattgcatggggcttgaaatcaagccagaggccattcctgtgggttttaaaagagcctgagaagaaactccctaaagagttcctaagttcaataggtgaaggtgaaactgaagcgggaatagttgtaacatggtgtgaccaactagaggtgttagctcaccaggccgtcggttgcttcttgacacattgtggatggaactcgacattggaaggactgagcctcgctgtgcctatggtcggggtgccacagtggagcgaccagccgatgaatgcaaagtttgtggaggaggtgtggggggttggagtgtgggccaagagaaatgatgaagggattgtgatgagaggagagatagagagaagtgtgagagaagtgatgggaggagagaagagcggagagatcaaaaggaatgccttgaaatggagagaggctgctgtgaaggctattagcactggtggaacctcatataaaaacattgatggtttagtagaatttctaaaagcagagaagaatagaggttgagacttttggtggacataatcttcaagaactttgaatagaactgtgattgtgatagtatgaatttgttagtgttatacttctctgggaaagtattttatttgaaagaaatcatgagatttattcaatgtgtattcataagcttagaattgcatttacatttctataaccaaatgtgtattgtagagaaactacaagcctgaaaatcaagagagaaaaatccatgcctttttctatggtataagctcacatcttacaagagttgttgtctttacatacttcaccctgaaatgagaatttcaaactgttaagcatttcaaataagaagggctgttttcttcaatagtgcaattaaacttcaaagagcacgaaaaggcaaatcttaatatgcctaaccttgttctttcgccgtgcttccattatttgttctagaggcggtcgccctaaaatcaaaaccaggagacatacttgtaaacataaattgaagaaaaggaactagtctatgtgatggaataataatgtttagacaatttaatgtacccgtgatcggaagacgatacttagcccaaacaccatatacagcatcagctatcttccctatctaaaaaaatgatactttataacattagccacaaaaccaagataaaccaggtgtaaaagtctatgcaagactattatatacttagaacgaaagtaacttacaggttcatatttggttatggcataaacccatccaagcccaacttcttcatatagttttctaaatgcctggtgaagttttaaatattagattgaaaaatgaatagatgcattttcaaaacaacaattgtagctattctgtttcaaaatttaacctctatagctttgtaattttgtgcaaaaactcaaatgacttttaaggtaacaagagagacttacttcaacatctgtgactactgttccatcagagagaattgcatgaatctttcccattgcctaaacaaataagacaatgttaatatttatagagtttatctccatgggatattatgatcgatacacaaataaaacaatgctcaattcttggtcacttacagtttcaaagtcaagtccctgattctcctctggagagtaatcctctgaacaaatgtcaacaaatttgatggtgccataacttttattcctctccctaagcatattcacctaattaacaatacaatcaccttaatttcacacagagaatcatcatcaacaacaaataaaatgaatttgttttttgggttttgaaggcacaaagtacaaacctccctcatgcaaagtggacagtctccatcatagagcattttgattctccaattctctggtgaagaagattcttcatcttctttcttcttagaacttaaagggtttgaagcaacttcactcactgcccgaaatcccccaattgggtcctaaacaaacccaaaaagaaaaaaaaaaaatgaaaaatataaccatatttatccaaactaactgctacccaattgagagaatgagcaacttgaacttacttgattggaatacagaaattggggtgaatttcaaaggagagatcagatgtgatttgggtgtgagagaatgagaaattgagaggagagatgggttgtttttggttcttttggctaatgcagaatagcacctgctcctcttaatgccattagttttgtgaaaacaaaagaatacctttaacaattaacatgcaaatgttttatgttttgtttgaacttgggaatggaaaaaagaaatgcatattttctttctttctttctttcataaggtacaaaaactagttatatgcttaacgtggaaatccaagcttcactccataacagtagcaaacaaatggccctccttatgccacatgggatcctttaacacttccctatgccacgatggcattcctcctaatgtcgtttgtcagagattgtggtgttctactaaaacgggaccgtagcaatactctatataattccgtttccaaaaatgaaaataattaaaa

SEQ ID NO: 243353 - DNA, 2498 bp, Cannabis indica
agacccggttcgattcccggctggtgcaattttttttttctttttcatttatatgcaaaataaattactcttgagttttgatggttctttcataaaaggcagaagaagttccaacaagaatagataaggaaaacagtttaaaaaccatgctttaatgttggtgagtttcatttttaaaactgtaatttaccttcgactaagtggttggagaataaaattcagatacaatcatgagaaagtatcaacattctgttaaaagatgttgggaattaattgcttacctaaagaaatatttccaagcttgatagaataaatagaacactttcaatatatatgtatattgaacttgaattcaagtttagaattctattaaagaacatttattataaagaaaaacaatctaaatagctttcactggctttggttcatttgatcaatggaagttttaacctacaaatgcttgatggctgtgtgaacaaccttataagaagtatccaaagccgggataatgccctctcacattatacaagcttttcaaaatataagttaagccggcacaagacgcatgtcactcatatcttaagaaatgtttggaaccttataattttctcattgatatcaatgaaatgccaatattctaaaacattagtgtatcaccctacaagccagaatgtaattgaccagaaaatataaaaagagagaagaggaaaaatatcttattcaggttgtacaaagttttagattttattaggagggaaaacagaacatgggagaagagggtcatctagaataataccatcacaatgtaaggaaagaaccagaaaaatagtaagtgcaaaaacgtttgtgtcaccctgtgagctcttccatcaagccctgttcatagagtaacatcttgaaatttagtaaaagatagaaatatatatggttttcgaaaacaggggagcaggaaaaggatctacccttgagatgaactgctcaacatcagttcgtttaagaaaatgcattgagtgccgagtgaaattggctatcttatcatcgcttaatactattccttcccctatatcatcaaggaccctcactttaatgtagggatcttttggcggtatcatatcctggttagatgagaaaccgaaaccattatagttgataatgtaaaataggccttgaattatgttaacaagttctatggaaatgtaatatgtaaggctgaacttgtaagaacaaggaacaaacaagcagtacttaccacggccaactcaagatcgatatttgactcataggattttaaggatgcataatgtttcttgacatactcttcctcgtagtgactgagcttctcttgaatttcttgtggaagcactggcccaaccttccaaatcaaatttcgcataatttcagctcggttgtatctacattgtcatcaaaccataagtgcaaaattagctaacttctgggtatcaaaaccaagcctcataagatcagccagcttgcagaaactgatctatgagtaatacaagactaaaacatactaacagatatgacattaagcagcgtttgttgcgaactaaagaaaggtggtgaatgagtgacccataatggtcttcattttttgttgtttgtacatccaattctttctcctgcattttcctgttgcaaatcaaaccatttgaatctaacaattaagtcatctatctcattgtaataataactataaaataaaagaacacagaatatgtaatcatagcaactacaaacatcatgtcaacattacttccaactttgtttcaaactttaggtgtcaaaagaatcaccttatcaaggcttgaagttcaagataatgctggctacattctgcaattacttgatcaaataggtcactctgcattttcaaagtgcataaaccaaatttaggcgtttctataagacaaaagagaaaaagttctaaggtatttgcctcaaatttctttgtgtatcaagtacaacaatattataaagtatctcagttaaatgaaatgctgatcagatcaactttaagatggaaaaaaaaaagatgaagcttaatttaaatggttgatgttttctatatgagtaaacaccgttgtggaacaaaattcttcaaatacagcccaatcgcatgtcaattgaattgttccaagttccaaatcgttctcaaaccgtattataaattagcataaacgatacaatatgagtgaatcttaaaatttcaagcctattacgtttaaattcaagtcctttcggaaacgacccattgccaaaatcatcataataacaataagaataaagaagaggataacttgggacttacattgaagggcgtaagctggcctttttctcctgttgaaaattctctaaccagttggcacgcctttctaccgtacatctccgaaacgaggtggaagctgaaaattcaaaagtattgcggaaacaaattcaataatgtaagtgaattccaaacataaagacatcaaattaca

SEQ ID NO: 243354 - DNA, 6667 bp, Cannabis indica
gaaagacaacactaaattaaaaaaaaaaaaaaaaaaaaaaaaaagtgggttccatccttgtgctcctcttaagggatatactaaagaatttttctatattacttatgctattcgatcctatattagaccagtttcaggatcataccaaaacaggtagtagaagtggtatagatcaaataccctttcaactatgcacgttggttgtacaaattaagattttattatatatgcaaatcaattgtaagaagacaaaatgtttacccttaaaacttttatttatgctgataatattgatgggatacatcttttaggaacctttctagccaatacaagtccagcagccaatgcagccccaaatagcgcatgaagtctcacgcagtagtactttgccatgaaaatcttctcattgtcctgccaagtgaattttcaattagcaaagtcaaaagggttttggatacaaaatcaggtcgttttagattcaatatcctttacgaaaaaggtgtgctaattacatgtcacaggattgtaaaccaccaagtgcaacagttacagtgtgttaaaaattcattttaaaatagagtttgagagcttctaagctaatttaattagtcaaatagtatcaatgtaccacttagctgttttcatgtaaagataatctaacatattaacatgccaaagagagaacatgggtatgttttccattggataaaaagatgaaagaaaaataaattacttcagtattgaaaatactttctcaccttgtggttttcttcaacatagctaaccactatttttgctaagggtaaggtcagggcacagaggagctacataaaacaaagataagaattcaaaaatggtttgaagagacaataaacaaaaatatatgaccatgactttattacttacaatgcatgtaaaaggaagaactctacacaggccaagagcgagtggaagaacataaagcgcgatggttgccagtttgactatctttgcacctctttcggttccaattctaacctgcacattgagagaatcaaaaaatgaaacatttatgtcagttggtcataacgaaagctcaattaagcatgtttttttttggggttgaaagtttagcaaagtgatgtattcaccaggggagacatcttcccaacagccttgtctccttcaatctgagtttgtagaaactaattagtgttagctcacacacaccacaagaaaggattaaaatcggaagaattattatgaaagtaattttaacactacctgatgaaaatgactacaaaagaggattaatgttgttgtgatcccaacaaggaatgataatgatagaatcaatggatgactaatatcactgccgaaatagaaacaaaccaattataacaaatgcaaagaaattgaaatccaacactaggaatatactaaggttgctcaagtgatacaaccttgtagggccctgaagcaagtaaaaggctgaagtagcgaatggcccgaacgctgcaaaacacaaaggctctcccagtccttgataacttaatcggaacggtggacactgcaaggaatgaatggattacataccaccaagcaagtttatctaatcaatataactgagaatgtgagcgcccacaaagttatctacttggtgttataaatataaacctgttctgatcaccttcccaaaggtaatgcaagaaagtaacaaagcatgagacgttttggcactgaagttctagaattagtatcaacacatgagaaagtgtttcgagacattcatggctgaccaaaatgatttcaagagaaatttgcatgaacttttgttctcataaatattcaacaattcacgaggatcaacagatttctgtgattgatgatattattagatagattaagttttgcaacacattatcttaagaagcatgttgtggtagagctgaaaactgaaaatacagactaatttgtaaagattttttagaatcatcttagtattcacctgatatatatagccacatgtgattgcggatgtgagtaatagtattgcacgtttacttcctgcctgaatggatatccaggttagcaaaatgaagcccagagaaagtaaaaagtaggcagctacaagggttcctgtacggctaaccaaacacatttaatcacacaattggccaataaataattgtatatttaagaaaaaataatcaaagtttccaattgaacaacataaaagatacataaagagaaatggtcttaagcaaacaaaatagaggatgatgaaatttacctgccaaccaggttcacaactgactcttttttgttcttatctgctcctgtatcaaaatcgtaaacatcattgctgcaatggacaacacgaaaggagtttataaggagttaaggactccatttgtactaaggtggcgtttggttggaggtaatgaaatggaatggaatggaaaggaaacaattttcattccattcctttgtttggttgcattttaaagtattggaatggcattccaatggaatgctctttctaccattttggtggaatggctatttcattttaaaaaaaaaagaatgactatttcaatgtaacaagaaaaaaaatttaattattttttatcaattttttttatgcattttaaatttcattcaattccattcctattcctatattttcattcacgtttccattcctatttctatattttcattcctcccaaccaaacgcgccttatatgttgactaaagaaaactagaaggaacgtttggtatgaggtttggacttaatgggaatgagaaggtcaaactaaattaaattttaatgaccaagaagtttgtgtttccaaatggattctactttttgaattaaaattgtggtaatgttaatcccctccaacacttgagtttcatattccctctaagtctactccctccaactgtactctctccactcaaactcacataacaactccattaggtggcctttagttggaaggaataaaatatagctagataagaatgacattccaatactttaaaataaaaccaatcaaagaaatgtaaaagttatttcctttccattttgttccacattacttcctaccaaactccaccgaaaggaacaagtaaagctctgtctagtcaagttttatttcaataaaatgattgcatatacatttgctaggtggaagtcattacaattcctggttgcacttatgttgtgcgattatagatatcatatattagaatgaaaatataattatttggtactttgtgttttgacgatatacagttttggtaccgtatgttcataatgatcattgggtacacgtacccgtaatttaaaaatctgcataaaatggtaccctgaacactcactgatcacaaggaaccaaatgggtatcaaatgaatggtcactatgatgatgtgatatcacaatttgtcttagaaatcttgactaaatagatgaacctcaaaggcatgaacactacaacagctagacatcttgagaataatgaaatacacaaacaagtgaaaaatatgtacgaattcttaccttaaatttaaccatgcaataataaaaacggaggaaacaaaaagaagaaaataacgaccagctgaaaataggcccgtctgaaaaagagaagctgcactacctacctgtaattacacttcagattgtagtgaaaaaaagcgtatacacagtagtgcaataacttacaaaagcaatggaatggactattcagtttgaaatcaattagtaatgaaataaaaatgaattttcatcatacatcttaaaaacgtacttacattaatttacacctgtataatcaattattcatcataccaagacaagacacgctcaaactgagttagttagtttgttatcttgttataacttattaaattcccacattagttggtgatatacactcttaataaggggtgagggcaatcttcccctaacaagccgattttgttgagttaggcgtctccttgatatcgacttgtttggcccaataattttcttaatataactagagttagttatatatactaaattcagttccagaattgtcacagctctcagtttgaaactctagtataaatatagtcctgtcatcttcttcaaaagttagcatgttatagcaaggcaataaacgaatttttttatgtttacagattacttaattatatgtaattaaagttattcaaaaaaaaaaaaatgtaattaaaattgaaataaagaaagaaaaaaaagaacaactgaaagacaatcaagcaaatgaaattgactcaatcagctactcaattcataaggctagtgtggaaaaactcacagtgagaggaaccaatgcaacagagtatattggtaactttattgccctccatatcaaggttgccttagaaatattttcttctttatcctcttctagaatggttttggagtaataatcttccttattgttgacaaaagactgggaagaacgattccgttgctttgctttcaattgtctattacaagtcttatggagaggattttgagtatcatagcatgaacaacttttcgaatccaaataagtcctgaaagatgtttgatacaaattattgtacaaaattaatgccttaagtccaaatctctctctgtcttcattatccaagatccaccccaagcaaggaaaaacatctaattgccttcaccaaaaattagtgtttcctattatgttaattcattctagttattcaatggtttgagttccattgtgtttactaatctattttaattcaatcaacacatgcatggaaaattagactgaaatctccagctgttaatattctgcaaaatttcattttgctaatatatgttaaaaatgaagaagcaaatctctgtcaatatattttatggcatcatttgcttgatacagtgagtgagtggtttttccaaatagactatttatagaagttttctttgggcactggatttcaatgtgaaaacagaatttgatttctcattagggaattgtctttatagcacaacctttattcatatgtgccaaaaacaaattctgtggttcacagataccaataatgaaacatatccccattatcaactcaccacccaataattaagccctattaaaaattcccagtttaactaattgcctagcttagctagtacaaaaacaaataatcataagtgttgaaaataagtaaataaaaacaaagaaagaaagcaacaattaaaccccaacccacttgccttttgaagattctccggcttagatggtattcgttaagcttgtcgaagccagaaccaagactaagattacagaatatggttgtcattgatgttagcttaataccatctacaagcatagtattagcaaataagaagttagttttgtaacaaaactcactgacacttgagttcaaaatgtaacagagaactgtacaagcaggaagttgttgagatagaagccaaaaacctggagaaatttctctggttcagtcagcttgattatgaatatgatgacgcatttgttgagtgactcttttagtttcacagtttgttctataggtagttttaatcaatcagtcgtggccataaaaattagatgtgactgatactgatgagtataagaaatagtttaaggttaatgcgttttcttgttctcagcggttggctttggttgtagataaggctgttgtatgaaattattttccctttccgatgtacactcgctctcctcacgtggcacagtatactgaaatttctcccactattacaaaagttatttatttatttattttgaaaaatctattatatattagacaatataatgtagaaattatggcgaaaatttgaaatttaacttttgtatgatataaattaaataaagtttgtagttgttgggttttctttttgttttttttttttttttttttttacaattttttgtgttatatttatgtaaaaaaagaaaattatcaataccatattttaagtttgagtattattacgaggcactcatattatctagcactacaatattattttataattaggaaacaaatcgcgcttcgcgtacggttgtattttattttaaaataattaagtcataaaattatactaaatttaatttttttttttttatattttggtaaaaaaatttattagtattttattaaattttttattttttaaactgaagactaattaattaatatcttcacacgttataggaaaagaaaattaaagattgaagaatcatcgtacaaaataaaaatctaaataaagaaaagatattataaatttgtaaaagaaactcatcatatgattttacaactattgtcatcatcaaatctcaattgtataatcactactacattcaaagctgctgacattattgtatcttatttgtagtcatcactaaatttaaaattattttcataatcgtatctcacatatagttactactttcatttatagttgtcactatcctaattaataagtttaatttgtatatgaaataaatcggtaaataaaattacccctaacttttttataataatttaattattttgttatagattaaaacctagaaaaatttggagattaaagattatttagtatttaatatatattaagtagatgcattttttttttaaaaaaaa

SEQ ID NO: 243355 - DNA, 8168 bp, Cannabis indica
gtctatgactcatttcaactcagggccggccctgtatatttcagtggagaatattaaaaaaaaggttcataaaaattttacctcattggtttgaaagtatgtaccattcaatggaaaacatcctttagttgctgttcgacaaggtatctgttttaatcattgtttgaaatgttaatccatgttcattaatatgaaaagttatagatgagattgtagagatgtactcaccaaaattgaacctgggatggtctccacatttccttgctgagaatttgtgtttgaagtggatggctgtgatgagtttacaatttcatctaaaagaaagaaaaagataaaaactgatttaacaacatcttatttcatacaatttcgaccatacacataaatttacattgtgaaactgtagattcaatgtgattattttgctaattttacgatttcaaattgttagtttgacaaatttctcacctggagtccatatggcaagaaggtatggagtaggatcattgttatctcgcttgtctagctgcaaacccgaaaaagaacatagaaagctcaagttaaaagacataaaaccttgaagattttcctttcatggaggaagaatggataatgtagtttacccctactaaaagtggatgtgaatctggaagttcatagctgcattaaacagacaaaaaaaacaatgcaatgattagaattttaaacactggattataccaaacatatttgcaatgtggttagttacttacactaagtgctttgttcttaaacggctggtagatttcaatttcgggacagagtagttagtaaattcatgtggcaaaacaaccaaagctcttgattcttctttgtctccatatattatcttattcatgtccatataattataaagtggatcttggctgatttcattacagagattgagtgtaggaatatcatcatcatcataatcatagtcgtcgtcattgtcgtcgtcattgtcttcttcattgtaaaagaaataatcttcgatatcaattaattcttcgatttgtggaggttcaggctctggtgatgcaggctctggtgatgcaggctcttcaatgataggtttacaaatctgatctgattttgaaaactgattggtttcaagaactaatggtggtgatggtaatgtgaggttgaggccgaggctgaggccgagggtgctattggcagccgctgttggagatgttgagctcgctttttctttctcttcgggccttggcagggcatgccttgcactgcaagcaaagtaagattttcgtgattttgaaagtaagatttgcagacacacaaaaaaaagtgatacataccttgcatatgcactagcatagtgtctacactctgctctcattggacaagcattgcagtttggatttctctttgtgcaataaacctgcaaaagattacataaaattgatgaattttggagtcattttgatgtttttaaagacacatttcaacaagagtttgatttttcacctttccaaatgttataagatgataatgtagttgatatctgtgtaagaaaattaaacgctataagaacaagaattagtaaaggttaaatagaaaggcaaatttgatgaaaattacagtgtttgttggtccatggtttgtagtcttggccagagatacttctgaatcgaatccatcaccggtaacctacatgaaaatgaccatagattacttaaactcattctctatggagataaagttacgtctttatgctcaaattttatgttattgtacttactcctgtaagagatgtatctgaacctcttcaggtaatggttcaagaggaacccaccctaggcgaacggctattcgaccaacatttgtatccaccttttcgaaagaaagaaaaatcaccaatttcatgaatgtctagtagttcatcatagtaaattattcaaattaaactgaggtgctgaagcataccgggaaggctacatgctgaagtgcgagtaggcgaatacactccacactttttaaaccaagtccatggaattctaagaggtattccctgcaaagcatcaatgactaaaactcagaaacttgaataacattcaagtgtacagtttttaagagcaaaaaacttaattcatgcttacttcactttcaatggaggggcatgtcttagccattctaagtcaagttccccatgtagtttaagaactcgattaagaaattcctgcaaaatattacccacataacaatcacatctcacaaaatgagagcttaaaagttctcaacaaaaaaatttgtaccttgattcgtaaggcaatgatattatgctggccgcgttcctcgatagcatgtgctatgtcctcaggctccgccagccttacaacattccaatccacagaatccttacgacgactatctcttggcccgtcaacatggtattttttcttgagttcatcccaatcagttccattatgatcaccttccttcttttctccctctaagttcttacaatatctctttgccattgcctcccagtcaatgacagcttttttctttttcatctctatcttattctcatcggtaggtagcatgacaccttgttcttgtaccgtttcatcagctaagctcccgggctcattgttggcgataattttatcagaaagttgctgtgaaccttctaaaatttttcctcttgttgtattcccactactactttcatatgaggaggaaaatctcgcaacaagtgacatgaaggcagagctgtagagaacaaaagtagatgatcatatgaaatcttatgatatatttatgaatgtaaaatctacttattgtcaaaaacaagtacctagaaagattgtctgagacattctgagttaagaaaactccaaccgcagagtcaattactgaacctttccactctgaaaatgtcctatcacctgctcagattacaaattaagcagtaagataaataaaatctccataccattaagtatgagtagttgagatgtacctaaaattaaatgcaatttagcaataaatgcaccaatacgttcgcgaaatactcttctttcatcctcccacattctctcattttcttcacccaacctactcaagtttttcagttgaagcttccaagaattgacccccttagcgtgcaattcaagcaagagttgtttcttcttttttttgacaacagtaagttccccctgaaaagcattcttagagtgaagaacgatcgcactttccttttctatttttctcggtgcaagtcctgtgtaagggactattgcaccaccatgctcataatgaaaaacatttgtgcctcggttttccatcataaatccctgattaaaaaccaacgggccatccccatattgagcattattttgtgggaggttgtaatgatgttggtgcatgtttcccatagagcagcagctatttggacttggcaaaaattgagaaatcatgctgcttgttgcttcaaatgtacctgcatctaatcacaaagattatataacaaagattcatacttctcaattgggtagcaataagaaatcccttaaactcactaaaacatatttcactcattccactatcaaacttctcatccaaaaaacaagaataccatatttaacatcttaaactaatatagaaaagattagtaggtttttgttaccatctaaaatctcagattgtggagaaggtgacatctcagcaatattttgtgtgttatttgtgtcattatctcctgaaaattattgtcattagcaacataaaccaattttactgaggcattttcttcttggaaataacataaggaaaaaagacttaatatcaaagtaacctcttatattaggagtgactgaactactaaaatgagtcaacaatgaagtaacttcactaagacttgtttgaaactctaaattatcagagagagccatcacagttggtggtatagtcctgaacttctccttaaagtctgcaagtaagaattaagcctcttaaaataagggaaaaaacaaagaacaaaaaacataatgcaaaaggtgaattacctttccacaagttgtcttccaatatactacgtccactttctttgttaaagtcacagttgaaaaggggaaaaggttccaattccaactcattcttagtttctattgttatttgtttatgtttagcttcctttcttcgaaaactctttctatattgtcttctacgctgctttgatctctttccttttgtcttaaagaataaatgaaaaattgttgaaggcattttgttgcattgaattatctcgggtttcaaacttctttgtcccttcgagatgtttacaatggctaaactttcttcaatcttctcttccttatcgaagtccaaaaattttcttctagacacactagcatcattaacagcttcagcactagtctcatccactttttccttgtcacattctgatgtaatcttgtttttgatgtttttcttgttctttactacgttcttggtaccactgacacgctttggcgtaataggtttcggtgtgtgtggtttcaagggagtaccctttgaaggtgtacgccttagcttgcttgttcccaccaccttcggtctatgtatcttcttcttcttcttcttttttggtttcttagctggggttttttccaactcagagtcatttcctcttttttcgggttagtacaaattgttgctttcttcattctctttatctgtataaactgaaaaaactgtattaactgtcatgaattctatccagctattatcatagtaacaaaaaagtaagaaagagaaaacgacaatgttagctgttattatggtaatgatttaaataaacttgtctcggccattttacacacaaaatccagactccaataatacacatatatgtgactaatgcagctaaattgaaggttatcaataattcaatttaaaaaactataaataaatgaaaagaaaaagtatattatatacaaactggttaagtggtaccttatttgttccaaagtccaaatcctattattatgaattgaaataagctataaccattttaaaatgtgctataaatgatacttttagggtgcccaacacctgatgatttagcctttgggtcttatagatttcatttgaaattaaagagtaatgattttcacattcaattacattcaaattacatatttaaacacaatgatctgtaatttcaatcttaatccttaatatgtgtgtgcaatatactgacctaatattacaccaatatgacacatgctaacctgttattacacaatataatgtgtattaaatattaatgtggtccagggaccattcaaattaattacatgtcattgtgtaaaatttgtgtgtgcaatttgagtgtttctaaataattattctatattatttagggttcttaataggtcaaatttttaataagaatattcacctggaaaaattgggttggaagatacctctggcgtcaaaccagtagtcagaattggggaactagacaaatctgaacattaaaagaaacaaaaagaaaaattaccaaacaagaaaagaaaatacttaaacagaatttagagtaaaaattggaaccttgaggagtttgagtgttgtccaatggtgattcttttccattgtttaattcacacaaagcctcattcaagtctggtaccaccatacccaattcctcactgtttttcttctctcttctcatatatgttataggctttaatggagtgtttatgatctccattattaaataatgattgttgtaaattgtaatcactgaatcaatcaaacaaaaaatctaaaattaattgaaactgatcgcatgcaatcaaaacagagtaaaaatctgaaaaacagaggaatttaacacatgcatttactcaaacacttaatcatctaaaagaaaataattatataacaggcttcaaatttttttttctcggattgaaaacaagccaatacctaatttatatattaaaattgttttgtaccaaattatgaaaatttcattgtaacggtgtaaaaattcaaatgtgaaaaatgttatcaaaataaaaagtgagattgatattaccaaaattaattgaagagagagcttcagtcactccatcaccgccgtcagagaaagaatgagatgatttttaggctattatttccaaattcagattatataatattaaattaaattaaatagaataaaaaataataattaaattaaatatctagtatattctctttttttttattctgttaaatttaaatgcaatttaaatctatggttagttttataaaatataaattaaacccctaaaatataaattaaacccttcaaaaccctgtgaactacccaaaacaactactctcccaagccctcgagtacaccatcacttctctccatgaaaatggtatcgctccagaaatcatccagattgctaaaattattcttaacctcactgcctctctccaaggtcactattatctctttttctctttcaaattctgtgcctacatttgcatttttctgaaataatcgttggtgttgtttcgattatttccgcttgaattcgtgttttcaatctaacatttttttcattttcacaggaagtttttcaaaagaagatcaagatcagaatcaacaatacgagttcaattgtaagtgaaagtcagtgactgatattggtgccaggtactgatctaattttatttgataaaaaatcttcaccttacctttgattgatcaatggcagctataatgtgcctcctccaggggcacctataatggagaggtgtggtagccccaccgagacctcgacaccgtaatcttcagccatggcgctctccatgaactcggcctgcacctccatagtgacgaagtgcttctcgaattggtccatggtctcggacatcttttgtaggttcccagtagccaaagtagattcgagagacttgacgatcgatcccatggacttgttaatagtggtcatcttggcttgggtgtctaggcgagccatgacggcgtcgaggcgcgaagccatgtttacgaatggcatatttggcgtatatatattcgagcgccgtcgatgttgcctttttccatggccttcttgatcttgagcttctccgacttctcttctttctcgcattttccggccagaaattctactccatgatctgattaagcagcttctcggtgttcccaatggcgatcacttcggatgatttcaaattgggattctatggtttttgggcacaatgaaattgtagatcttttttttttaaaaaaaaaataattgtataaacaaatttttagctttttatttggatattattatgatgatgagttttttctcttgctagtttttgttctttttttttaggtattgagaagattactttgtgtttctcttgcattataatttaacaatttactcaaccatttaaacaacctaatattagattactcaggtataatttaagtttattaacataatgatcaacaatttagataatgtacaataactataatcagtatctaaacaaagattgttaaagaggtatacaaaacaatttattattcttaatttatacttatctactaattgggctccatttaaatttcctacttatgttgttgtattattgtttttgtgcgttagtaacatataatatataaacgtttattaataaaaaaaagaaaaaaaactagttgagctcaaaaatgaatggaaagatcagatcaacacaagtcaatttgttgctggaaattacaaaatatctgatgtatacaatcagatgacagcaggaaatcaagtttgtcactggagtaaacaggtgtggtcgaggatgaacataccaaagcatagctttgtgctttggctagttgtgcaagacgttaaaaaccaggcaaagactagtcagatttcagattgcaacagatgcacattgcattctttgcaatgaatctgatgaaacaaccgagcatttatacttctgctgcaagttctctaaggagtgtctcgaacaagttaaggcatggcttggctggggagcttcaacaatatcactgcaggagatcattagatggataaatagagccaagaaatccaagttcaggaaaggtgtgtatgcggttgctactacagctttagtctatc

SEQ ID NO: 243356 - DNA, 2604 bp, Cannabis indica
agtcacaaaaacttcctcaaaatcatttttttaaaaaaataattatgtacatagattttttatcattagtccaaacaggactgaagtatcttgccttgagagcaaaaaaaaaatgtttgcattcacatgaaatttctaatggaatttataaacttttactgcaaaattctcaatagctgtattgactattattcatgtcacgatgtagatacaccaaacaaaatgttcaaagttcaaacttttactaatatatctaatttacactgatgaaataatatttttccttgtgggaatatcttacatgcagaggaagagcctactcaggagctgtaacaaagcacagcctattattgtaagtaccaggtaacttgcaggtaggaagaaaacccagttcaagatattaaatcatcatttttacaagtggacaaaatcaagcatcggctgccttctctagacgagctgcctctggagtggcgttagcattgatacctcgtttagcttcgtagtctttaacagcagccttgatagcatcctcagcaagcatgctacagtgtagcttaactggagggagtgacagatgcttggcaatttctctgcaaataagtgaaatgtacattcagaaactgaacaagaatggtgaagatgagaccaagtatgttgaatgtaaatcgaatggaacacctatatatttttcattataaaccctattatttaagtcctctaatcaactcatttgttcttttcaaaagatacaaggatgtacattacttatgtaacacaaaagtaagtttcaagaaagagagaaattacaataactaaagttactaaactatacataatagaaaaataatatagtagatttgattgttgagacatgaaaataaaatataaggccaatccataattagctcaaacttacgtgtttttaatggttaggacttcctccatttgtttgcccttcacccattcagtagctgaaagaagaaggcccaatgagttgagaaataagaaacataacaatccaatttacattcattagtcacaaccaacccttcaaagacacaacttggaactccaaagcattttacggacggagagaaataaaaaaggcaagtttaactcctgattagatcacttggtaggtaatctgtccgtttcataaattagattagggcaaagggtaaatggataagacgaaatatagtctcaacacccattgccaacttgtaatatatgcatagagcatgtaattcgtaagcgtgtttacaacttaaccagaatgctaaagctacagaacaaatatatgtgtgtgtatacaaacatgcctaaatcttgtcatgacatgaccagcaatacatcataaaatgcaaaatctttaaaatgtcaattgtgaacaagcaaacccttgatgaggaggagataagcctctgaagcattagtaataatgacaactaaaatatattcctataatcagctaacgacagaattctataaacaacacctacacaaaaaacataaattcttccattgtatgcaactgaacatgaatcaaacaaaaaaaaaaccattacaaactacataaacgaaagaaacatcaaattttctccattgaatagttgtcgcttagctcactacaaatcaaagaaaatgataagataagacaaccactaaaaatcaaaaccgtaaaaatgtactctttcacacatcataatccatcagcaacatcctaaaacaatgggaaggtaagaaatacgaagatgctgtaaacagattcaattccagaagttcccacatattgggaaatttttcgatcatcatttaggtgaaataatcagaacaaacaattacgctatgatcccagatgaaaaaaaaatataattttcacaatcagaaaataacaaaacaaacaaataaatactaaccgacagaggaagacgcgatagctgatccgcagccgaaggtcttgaagcaagcatcgacaatcttgcccgtaccctcatcgaccttaatttgaagcttcataacatcgccgcatgccggtgctccgacgaggccggtccccaccgttggatcgctcttatcaaacgatccaacattccgggggttgttgtagtggtcaacaaccctctcgtggtagtgacgtggtaagacctggacggccggtgactgcgccgaccgtgacgctagagcttgtgcaattctcttcgacgtgagcctcaacatttttcgaattcgtggtggaagagaaatcaaatggtgcgaaatttgggtatttagggtttgagtattgaggcggtcttcttgattttgtgttgtgtatgtacggatggtgggctgacacgtggagggcaaagatgattttagattattttattgattgggataatcatgaaaaatcccttatctgtgctgtggacacgtttggttcacagacacatcgtagtgggcctttcaatttaggctataatttgtgggcaaatggcagcccaaataagcaccagctaacgaaaaaaagaaaaacttacaaaaatactggaatttaagttaatttttataaaaatactgtcacatggaaaagtttttaaaaatactgcatttttataa

SEQ ID NO: 243357 - DNA, 2149 bp, Cannabis indica
tagaatccaaagaaattggcacaatatagaagtagttttaccgtcctaaagaattggcattgaaaacaagcaatatgtttcctatgtaagctgcatcatcttatttttgataccacacaaatattataggaaaacataaaaagagctaaaatagaagtcaacaaagaacatattattaagtttcttaattataagagatgggagtgttagtcttggatttttgatgcttccattggcctcctcccctgctgatagtattggaaataaatgtcaacatagtttttgactggtctgtacaatctgggtcttgattcgtcgatcagcccttcgaaaggtccaatctctttatccggctctggcacataaaagacagccaaagaaatcctctccctttctgaatttgtcaacactttatgtagcgggctcttaaacgctccattactcgatatctgcattagtacagagaaaccaccaccatagttcaactgttaagtaatggttaaatcaagacttagtctattgtaagcaacactttgcataagtagacaatagtcaattactttgtagttattttggttacttttgctatgttgttggaagttagttagagttagttaatgtgactattggattatatgtttggtcatgttcaatacaaagacagctactccactattttgcataggtttggttgttatgaataagtgattacctcagcttgatcaccaacattaaccagaagagcctcaggaataataggagctttgaaccactggttgtctttcaaaatctgcagaccctcaaccgatttgtcgggcaagagaagagtgatcgccgacccatctgcatgtggtttgcaaccaacaataaggtcgggccttggacatctcgggtatagggtgaacctttcataaagttttgatcttttcccatactgctccacaaaacaattctcttccaagttcagtgaccttgccatggccttaaggataacctggcttattgattgaatcttcacagaatattcatgtgtcatagacctgtaaattcaattaatatgcctcaatacttgacatgtcaaaacatctttatagctagaaggaataaggtgaacttgtattgaaactcatctcttatgcactaactggtgtgtgccactttatcatctcagaaattttggctaagatgactacttagtttttgcaagtataaatactaaaatcactctcaagatcaaatcaaacaataatattgtgcctaaatcaaaaggggtttcagtgataacaacatttaacatgtcaaagaaactttttagctagatggatagtaaaactagtattgagacttccatagcaatgttcttaccgaaaatttttgggattttcaggccaatgtttgagcttcctctgatcttcagggtatataacaaggtagagacggtcactccaatcaattttttgttgatctgaaagaaccatgtcattcccatacccttcaatatcgttttcttctctcaagtatttctgcttctcttccaatggaagatggaaaaattcttttgtgatttcacgcacttgattcaaatattcaagtgacataccatggtttattccctaaaaaaacccacgataaacaaaccttgagctttgattaaccatggttagagtcatagccagccagaaataatttaagggcagtcccatatgcttttatttcttaacatatcagtttcaattattgatctttggataatttatgacatgggtttgtaagaatcttgcctggacagcctttaatgaatacaattaatcatagttatgttttacaaattggtgaagcagggttgttagatttcatacctgaaagcaaccaaagttggtgagagctgagttgagcttctgaagctcttgtgcagaagtagcaagaagaccaatatcaacaactggaatatccatgactgggacatctggagatccaccatgaccatctttgtacaaaaagttttcaggtacttgttctccttggatagccaattcttgtacagtttttggaagagaccccattggaaatggttagtaaaggatgagttttcaggttcagctagctgctttctccttaatttggaagtttgtttttgttaaggctattt

SEQ ID NO: 243358 - DNA, 3267 bp, Cannabis indica
ttcctcaattattcataattatctaattagggtttttctaatccatttcttaattccaggatattacacttgtggtgtgagtcgagataggcagataggactttccttcgaagacttaaaagatcagatttttcagttacacatcatgtattcatgttttcccatctcaccaaaaagccttaaccttgcaattatccaatggatcatggttacaagcaataaagcaagccttatctctcatcactacaacaacccaatcttgttccctccaaacagagttttacacaaaaccaacatatgaaaagtgcttctccaacccattatgatctccccaacattgaccaaactcgacaaatccatgctcacatgataaagacccactttgataacaaccttcaaaacattcctctgagttttcgaccccatataagcccagctgcccaatgcaacttcttaataacctcttacaatgacaacaactttcctgaatgttctctcaaaatcgatgctcacatgagaaacgtggaccactatgttgaaaattttattgttccctctatccttaaagcttgtggccaatgctcgttggtcccattagggaaagaggtacatggttatgtgttgaagaatggtgtggacaaagatgtgtttgtgcgtgatgctttgatacagatgtatagtgaatgtgggagtgtggtttcaagacgcttggtgtttgatcacatgactgaaagagatgttgtttcgtggagtacgatgattaggagttgtgttcggaatagattattaggagaagcattggaacttgtaagggagatgcattatctgggaataaagcctagtgagattgctatgaatagcatgattaatctctttgagacctcagacatctgaaactggggaaagcaatgcattgttatgtcatgagtaatagcaacattaagcaagttggtgttcatagtgatacttctttgatagatatgtatgccaagtgtggaaacttgacttatgcagaaaggcttttcaatggtttgacttataaaactgtagtttcatggactgtcatgatagcgggatacattagtaccagaacattgggagaagtagcaaaacttttcgaggaaatgagggacgaaagcatttttccaaatgagattacagttttaagtctgatcacagagtgtgattttgtaggtgctatgaaattgggtaagttgttgcattcatatctgttgagaaataggtttgtggtgtccttgcctttggctactgctctgttagatatgcatggaaagtgtggtgatcttagaaaagccagaggtgtttttgatggtgtgaaggacaaggatgtcatgatttggagtgatatgatttcagctgatgcacatgccagttacgctaatcaggcttgtggcctgtttgtccggatgacagaagaaggattaaggaaaaataaggtaacgatggtcagcctcatttcactatgtaccgaagtaagagcgcttgacttgggaaagtggcttcatttgtacataaactagcaaagattggaagttgatacattattgaaaacagctttagttgacatgtatgctaagtgcggtgacatagatggggttggttactgatagagacatctgtatgtggaatgcaatgataactgggtttgctttgcacggttgtggaaatcgaagaaatggagaaacatggcgttgaacccaacattatcacttttattgcagttcttcatgcgtgtagtcacgctggattggttacagaagggaaaaggctttttgagaagatggctcttggttttggcttggtttcaaaaattgagcactatggatgtatggtagatcttcttggaagagctggaaaacttgaggaggcttatgaattgattaaaagcatgcctatacacccgaacagtgtagtatggggtgctttccatgctacatgtaagctttataaaaaccccaatttaagggaacttacagctaaacacctccttgagctggaacctcagaatagaggttataatgtgctgttgtcaaacatttatgctgcttcgaatagatgggatggcgttgcctcagttggaatggctatgcaagacaatggaatcaagaagcaaccaggacttagctcaattgaagtaaatggtttagttcaagactttgtaatgggagataagacacaccacaaacaggaaaaatatatgaaatgttggctgagatgagcatgaggttgaaacaggctggttattgtcctgacacatcggttgtgttacagaatattgatgaggaggaacaggaaactgctcttaattatcatagtgaaaaattagccatggcatttagtcttattagtacagttgtaagtactccaatgaggattatcaagaatttgagagtttgtgacgattttcatgctgcaaccaagattctgtcaaaaatttatggcaggataatagtagtaagagatcgtaatcgatttcaccatttcagagaaggaatttgttcttgtagtgattattggtagcttttactctattatcccggatacaatgtaactattctatacagaatacggatgtacaaataaaaaatgagagcaatgagatcgagcttctgccatttgcaattgactgatcaaggccattctggcactatcatattcgaggctaaattccagccacatgctttgtgatttcttcaatatacataatgatgtgataattttctatactaatgtaattttacaaagcaaccacatattctttaaacagcagttacagtttttactatctctcagtcaaagaatggatgtcatctgcaccccaaaaaaactccttaactttcaaccaagccactgctgagcacgacgagctccacttccaccaactgcacgtcgtatactgatcttttcaccagcatatttttgttgcaaccattcaaagccatttacatcaagtttcccattaactgattttccttgctttctattgtgaaacttatatacgcaagtatacgcagtcaaacaagtaataaagtgataagtaagatcgtctccacagggattgcaaacaaaggttgatgtaaaaccaactaattacaacttaaagtaagaggagctaacatggaaatggttgagtaatgattcaaaattaaaaatgacatgaaataaacttgctaaaattaatactactgctgctagaaaaattgtttgcaagataaaaaatgtaatatgtcaaaaatggcttgaata

SEQ ID NO: 243359 - DNA, 4559 bp, Cannabis indica
agttataacttacatgaatatgaaaaaaaaaaattaaactaattttttttctgaatgctgaaataagttaagggtgcatcaatacatcctttttatagggtgtattgtagaataatccaaaaatatatatcaatatttttattagtgagagtcattatttgatctaggactgggtgggacttgagcacgtagtagactctgcgcttgaacgtctcttctaagcttttccgaagttattaatcactcactcgtaactcacccaccaccaaaccaaaccaaaccaaaccaaacccaattctcacactgcccacctacctcttctctctacccttcattgaaattgggttaattgtatctaaattcgacagagtagagtaaaagcttcaccatggccaggaagaagatcagagagtacgactccaagagactcctcaaggagcatctcaagcgccttgctgccatcgaccttcagatctcctctgctcaggtttcaatacccatttctctgttttttctgtttttgtatttagtaattgaaatttgaatccttgttttttcgtattgcaatggctgatgagtaatgaatgtagtagaattggttcgaaattgtgattggatgggtattgttttaggtgaatgaagcaacggattttactgagttgacgaatcagcagccatggctttcgtccacaaggttggttgtgaaaccagatatgttgtttgggaagcgtgggaagagtggtttggttgctttgaacttggatcttgctcaggttgctgagtttgttaaagcacgtctgggaaaggaggtgattatttttgcttaatttataaatttgagattcaaatgtgcctgcttttctacattgtttgtaataattgaataattttcaggttgagatgggtggttgcaaggcaccaataacaacttttattgttgagccatttgttccccacaatcaagagtattacctttcaatagtttctgacagacttggctctaccattagcttttcagaatgtggaggtattgagattgaagagaactgggataaggtatgttagtgtgaaaatgtctctgatgttttcattgtgtggatttttgttcttctttggattaaatcttctcttaccacttatggaaatgaattgactgaattatgccatttttttcaactgttgtgaaatacttcaggttaagactatattccttcctactgaaaaatcattgacgctggagtcatgcgctccattgatagctacacttcctttggaggtaggtttgaacgtagcttggattatagttaggtgataactgtttattttattttgttatggagatcagagtatgccatcttcataggtcttccagaaatatggaaaaagtaagttaagttgttgactatggatgctagttcttactgttcggcgtagtctcaactaatttagcctaattgttgacaacccctagctaaagatatagtcaccaccaagcttatccaccgttgacaacccctcggctaaagactttgtcaccaaggttatgtactgtttggcattttctcaactccctagctaaaaactgtgtttagcatacgagaacaatagtgttaaagcaaaaaatatctaagtaatttgaacattagatgttgacgtcctgtatctaaatctacttctgtagccacaaacacaacatctatagtgtgggtataacatagcatggcccttttttgtttctcaaaggtatagtataacactttttctttgataatgtcattctagttccttcatgtttaaaaccttaaagaagatatagaatagggtgaaaagaatatacagttgtgataattggtgtttactattatgaggttatgttaccatcgtactttccattgttgtgttattgtaatatgtcctgattatacttgtgttcacaggtgcgagggaaaattggtgacttcttaatgggtgtctttgcagtatttcaaggtataaattattgacaggtagtatgttaatttacaacttcatgaggacattatcattttgctggaatgttgtgtacataaatttgaagcaatggatatatttttttttcattttgggtagaaaaatatgcaattattgcataaaagaaagaggttttagcctttcttatgttactcccaagtattatctaattggccgtgcttatatagtgggttttttccccttaaaagaatgagaatgctatctttgccttttaacagaaaacatttcaattctggattctgactcatcaattctatttcaatagatctggactttagttttctggaaatgaatccttttacgctggtcaatggagagccatatccactggatatgagaggagaattggacgacactgctgcttttaagaactttcaaaagtattttcaagaactttgtgcttaaattcattatgaacttttcagtttcacatctactgtctactctttctagagtgtaacttatctgtgttgttctttccaggtggggaaacattgaatttccccttccttttggaagagttatgagccctacagaaagctttattcactcattagatgaaaaagtaatttcacattcaatttaagttatatagtatttcaaagttaagagcattaaaatcatatggatattgaagtttacacagtggtgatcagatttacttatcatgctgtcaaataaatgttgcagacaagtgcgtctttgaagttcactgttttgaatccgaaaggacgcatctggacaatggttgctgggggaggagctagtgttatatatgctgatactgtaagtggtccaacttatcattttcatatctctgtatattctagaggtttttatgcctgcttataccatttcatcattgaattccaatgtgatctataggttggagatttgggctatgcatctgagcttggtaattatgcagaatatagtggagctccaaacgaggatgaagtcttgcaatacgctcgagttgttattgatgtaatataatctattttaagatttccaattgcagcatcttcttttaagattttcattttagtgttgccattttaaaatgattctttgcatttcatctcatgctgcagtgtgccactgcagaccctgatggtcgtaagagagcccttttaattggagggggcattgctaatttcactgatgtggctgctacttttaatggaattattcgtgctctaagggagaaggtgtgttctacttctagtgaagccacttactacatatttaatatttttgtctgttttctacatttcccggcctctttcctgtctttcccttaatgcatgtgtgttcctcattttcatttacttttaggaatcaaagctgaaggcagcaagaatgcacatctatgtacgaagaggcggtcctaattatcagaccggtttggcaaagatgcgagctttgggtgaagaacttggagtaccccttgaggtatgaaattacaatacatacacatgcagaagcacatggctaactaagacattagcttcaaactcaaccataatcctcaaatttgtagagtttaaatattttatattaatcgaaaactagaaactgcattccattgtcaaatttcctgctcttctgaagattgaagttcccttaggcgctcttcattttgtcctttttttcattgtgtttttcttcttggtcttttcaggtttatggaccagaagccacaatgactggtatctgcaaggaggcaatagattgcattatgtccacagcataaagtccaaacattgatctctgaaattgttgatgtgtgcccagaaaataatgtagaaatagatgtttaccaaaaacaatttgcctaagccttctttgaactatgatttacttttttgtttgcttgtttgtttttgctgaaataataaggaactaatctgtgcagttgtcattggaacagcacataactagccccaaaaaaaggaagaaaaaaataaacgcagagagggagaaatagagatggtcgcgcatgaaactaaaagaacatttttcctttgtattcaaatggcattggaacttttgtgccctcaaaagaagaaaaaaggaaaaaagaaaaaaatggcattgcctacttctttttgttcttttatttatttggtagaaaagtgcatgcttaacaacatgtaataatttcttttcatatacataatgtgtgaatgtgtactttccaaagtgtttgatttagaagatactattaaatttagaaattaatttaataaatgagttgtggaggcacaaaagaattattaaaaatattgggaataaaatgtataatagctaaattttaatctcaccaatactatcattctaattaatttatttttgttactaaaataagtaaattaaaataataataaaagagaatcaaagaatgataaaatgtaatttttctatcttattttacaatgccaaaaggttgtctttatagtgttaggctaaaattagtctaagtttcgggtcatattttcagttagttttcactctttgtttctagt

SEQ ID NO: 243360 - DNA, 1850 bp, Cannabis indica
ttgaatgtgaaaagaactcatctttttgctagctagaagagatgtttagcatcaaaaaaaagaaaaaaaaaccaaataaataaataagtaaaataaaattctatttatttgtttgtgctggaaaaattatgaacaaaaacaaaggaaaaaaagaatgggatcaagagatgaggaatttacaataaaaaatatctagtttaagttgatgtttgatattttttatcccaatatatttttacattttaaatatttgtacttttaattaaaaaaaaataaatactagagttataattagagaaatgctaaaatgtatcactgttgtctaccaccctcctagatgtcatatcgctatgggtacaattaagtatcagatctcatataattaaattaataggcacgccacatgatgaataaatataagttaaagtaccctgcacgtaggcaggagcattctcccgaacaagcggggatggaggttcatcgtttgaagagtcttcttgctcctgctctgttagaacgacctttccctttccctcctctggggcggatggtcgagcaggtctgtcgggctcctccctaattttgatagaacattcagctggtgcttgattattgggaggagccttcttcttctttttgctcaatttttcctgttcggtaacatcctcctggtcgggctttgccttctttgacttcttcacggcccttggcatgaaaccagctgggaaaagtttatacttgacgaaattggcttcggaagtcaagagataaatgttccgtgcagcagagggcagttgaagaatcttttgtgccctgtccctgagctccagagtgaaaggagggcgacaataagatggctcatgttggaagctagtgtgggcagtgtccattccttggaagaagtaatattcattcacaaatttccctattttggtcacctcagtgtctgtagtgccagtcaaccatttcccctcgatctaggaaaagtagaaataccccgacctgttctgtttacgacttgatttcagatcgaagcaccagttagtatcatgcggggacggctcaccccatccttgcaaggcatagagaatgaacagggcagacaagtatttgattcccttaggagtaaattgggtcggacttatatgatagtactccgcaatcctcctgaaatcctcctgaagtatgggagcaaaggcaacatggcaccctacttggtatgaacgcccgaccaagagcaataaccctcccttgggctagtcgccaactggttgggggagggaaggaagcatttgacacctcctaaataaacatgcattgtgcaaaaataaagaatacaatgctaaccaattgtaaaaaacaataaaacatggttaaaatccatagtccaatgattacaatcaataatacatacactcatctaacatcttcaatattagtttatacctagtaatttgaatattactcaacactctcatgtggtgtattttccacactattgtccgcatgcaagtttattgtatcgatttcaacctaaaagtaaaacaaaaaaaatataaaagtggcaagaagagtcaataactattataatagttagaatcagatgtaatgtaatgatatatgaggtttcaaaattgtcaatgtaaacttactaggcgacgacgtagttgatgtatgagattattagaaccattcaatcgttctttagattcaaggatcttcgtgaccaaaacattgtgcaatccaacaatcattgtcatcaaagtattgaccttttgcacactaacctatcatccaaaaaaaagaaaacttatgaatactttaaaaatgtaatatatatgtaggactac

SEQ ID NO: 243361 - DNA, 7016 bp, Cannabis indica
ttggatttaaggacttttttccaattttagtaaaaaagtgtaatatggatgaaagttcagggacataatttagtacatatcaaagtttgagggacatgatttgttagatatcaaagtcaagggagcatggtttagtacataaacaaccactgaaatagtaattttgaatgaaattacccacaatgtgccaataattttgatagaacattgctgacataccatcgcttcccgagcttttgtcaggacttactgtcttcaaggctgttaaaacctctgctgcagtaaaagactgagtaagtgtgtcattaatttctgcatttattgttgttggaatggttgctgtaacaagatccaaggcttgaaggtcaattgtcgaagccgaaaagagatcattaaaataatcttgtataattgtggtcattctagcctttgatattattttgtttccattgcaatccataatatttagtatgaattattgaagttgttatactaaaaataatatttcttacaccaaatcagtgtgatcattggtgtggtctaacgcaccattgcttaaactttggttaacaaaagaaaaaacttggttaagaaggaatttcaaaaatacctacaaaaaccgttaaaataaggtcgtcatccctatttacccagcaaaaaaaaaaagaaaaatgtcgccatccctaataatgcctaactcatctaacactcaatctgcaccgtcggtttagctctcagtccccattcccaatttcacaccatcagattttcttttgtctttctcgatcgacattcttatctttttttttcctttggtgaaccaaatctttatgttccctaataattaacttataaagtccgcgggaacccgaagtttcaagacgaccatcattatcccattaatggattcacctcacttcaattctcatcattcaattttttcctaaccaattattgcattgaattgttattatttgatctgtgttttgaaggaattggagttaaatagatgagtttcctttgaatcgtaatgatccatattgtataattctgaaatttagagttttgggtctgaggagaaaaagttctctcgtttctgggttgtttgattcgatccattggaggaaaaagaaacaaaaagatgggattttcaattttcccatcatctgcgtccttcattcgttgatttcattaaccaccggatcactgataatgttttaccttaacgagttctcagtgtttggccatggcgccgaaacggctcggaagctttcgggttcaacgccacatgaccaattgttgattcaaacctccaattcttttgcagggctgcttctttttgttatagggtttttgttgttcatggtggcttttgtcaaagacagggaatttcagagcttctttgctaaagggtgtatgcttcttcatgtttcaatggcattttggagggtttactttgagaggaggctcgaggtgttggcttgggactggcctaagcaggtcattggggatttcgctctagctctttcatgggttttctttctggtttattcttggagggagaagtatgactaaactgaacgtaaattgagtgttttgaattgaagaagttgggaattcaaggccatagaatgtagttagttactctgctgaattccccataaattgtatccaaaattgtgagcttttctggttgcaaattcaggctctcctactgttagaatatgaatttatgagaattgggagggaccaaacagttcaactcaaactcatacaaatatatatgaacattaaattgttttaataaatatcacaatccttattcttctggggtttttgcatattctcatgaaatatttgctgtctagtaataaatgatgttttgtttgaacattgtctctaatcacgaacttacattgcttaaaatttctcatatccaaattgtgttggaaggaaggctgtgttacaatttcatttcagaggtaaagtgttgtagtgaaagactgaaagtaccttataatgtgctacaaagatgtgcaatcttaaatgatactcagttgcagatcactttgtatacggattgtactaaaataatgaccctgtttagttgttgtggatggtgatctttgatcagattgtttagtgctggcatatgctgcctggtaagctgatatttattagtctctcattagctctgtctggattttttttttttcaactgcaatacacttttgtggtcttttttgtttggttcagcaggtccgttttcatgtctctagtcaaaatgctccaaatggtagagttttgtagtttaggtatcttattagagaaacatgataactttgacatgttccagtagcaaaatttgaatgtcttggagggagaagaagctattgaatttgttgggccacataagatgttttaattatgggcaatgggcacacagaccaagggattatataggttttcaaacaatggggaatggggcgtgactacgggctagtcacatatggggggaagttcaccgagtacaatcaggtccacaaggaccaccaacaccaaccgctattaacacctcatctttgatattactccaatttaccaaataagtccttatactacaattcagatgggcttgtgtgagtacatactattggcattgttatgctaattctgaaaacaaataaataatgtcagggtaaagttcagatgttcagttttccaaatcttatgttaattttgttatacttgtgctcgagttttcttttcgtccaaaaaaaattgtatatttgcatctcttttatttatactgattctaattagagattttttcgttatttttttgagttgtgattgcatttgtcactacataaagttttcattgtttcattatgtgaacaagcttaacttattacatctcttgtctctcttttgtttccttttttttgttacttttgttaggttcatatatatctcttcttctcacttttcttttttcggtttctttcttttactatatagcacaaaaagagaactaaagacatgtcattggagagaaagaaagaaagaaaggaaggaatataatgcattacgaaacaaagagaagagaatctactagttgtaaagtcctgtagcctgaagcataaaccactggaatcaccaatagtggtaagtaaaggctaaaaaaaaaaaaaaaactcctgagaagttgcctaaacgttacctttgggttttcctatattaaaagacccaaaaagcaaagaaataaagctgaagctgaaagaggaacttgactgtcattctcgtcgagtctaataaataagtgcaatgtattgtatggaaggaccctctcgtcacactcgtgatgtagcgtgacttacacgctccatcatttttaccaaagaataagtgtcacgctctacaactgcgcgtggtagtctcattgagcacctaatctttgtaacatctactttttctcgtcatctggtttgagggacatgggatacatagacagaagtatcagaataggaaagtcaccaaaaccaaccaaaaacccagagaaaaggaaaggaaagcaaagtcaatattgcaaagaaaaaccttaggaaggggtttggatttcttgatttctttctttctttctttttagtcaaaaaaaaatcaatctttactaacagaggggtgaaaaaaggtaggtcaagctatatcaatgggagacaacatggaagaagaggtggaaagaccatcaacgcccacaaatcagtcacaagcatctgcatcttacatgttgtttatgagaattatgagcaaaaggaggacatgggtatgcatctttgtgctggtttatgcaataattttaacttcttcatggaatttccttaaatctatactttcttggtacaacttacactcccaatcccagccatcttcttcttcatcctcatcttcttatgggtgggcagccctttatgcatctgtgcttcttggagctgtatttggggttgtttccatggttgcagctctggcagtggtggtgccagccactatggtcacatggatcgccattgttgttctgcttgccttctttggaaaacccaggagggctttggtggtggaaggtaggaagattaccagagagattgtggggtttgtgatcaggattttgttgaaggaaggtagccttgtggctgctgtttgtgctgttttaggttattctgcccttgttgggaggaatactgaggttgattaattataactcctatgaaaattttggtaaagtgttcctcaatctctcctgagacaatctttatttttacttgttctataaatttaggatttaaaaaaaaaacaaacttttttctctgggggctttttaaccttattcactgcctgttttaaatttccacttggatgtattgtaaattcttctaatcttgatgatgttctatttattcttttcccaaaataacaagcttgctactgctgctgctgcatatgtgtattttatttactggcctttatgatctttacaggcatgtcaatatgtagatttatatctagtgttggtggcaaaccccattaagattaggaaattacactgatttcttgtgctcaaaattactttgtggagttgtgagtagtttgaactttagtgttttgttattaatatttttattcaatgagaaatagctattattcaactggcgatttcttagctataagttcaagaaaaagaaaatctttgtttggttggattaggggtcacaacactttcttatggcttagcacttatttatttttatataacaagagtcttcttttgaaaacttgaatccttttaatttctccctttagtttagttgtgaatatattaggtagataatagatatgatatgtgatgatgtgattggtttatgagacagttattttgttcttgggagagtagacaaggaagaagattcttaaacaggtaacttatttgcagaactgggcaatataataacaactttggggtaagtcttttatgagaaaaaaaaacatatataataaaatcatttctttgtatacaatagaaatggcaacaatattaaaatattatttatctttttgagctttgatttaatacccgcatttaagtaacacgtattctcattcgaagatgctaggatactcaatctaataaccagtcagattaacatatacatatttatatagatatgcacatagaattgaattaattatttctaatttagtttgttttgttctggtgggagaaacaactctatagattttatcagcaatctcagtctctccaaaaatattttaaggagaaaaagcctgccaagtttaaggtggaagcaacacgataacatgatcctcctgaacataccaaaatacaaaagtaaataaataaatacaaattagagtagccacttgcaatatattaatgcatatttaaatttgacgttttatttaggagaggctggtcataaatggttattcaaattatagtagtttttagttttcatattttgtttttctaacttgtgatttcttgtgaacacaaggacttctaattagtgtatgtcaataatacgtattattcctgtaaaatgatgggtaagtctaagtcaatagtatacttttctaaaggaatatttcggtagactatagtctatatccgttttgacatatagaaaagtttctttgttcatttttctttttagaaacattgagactactattatatgatttgtaatagttaactttataattaatttcttttagaaatattgagactacttgaattatatgatttgtgatagttaaaatctttcaaatttatatgctgttttggtattcataattccatttaaaaagttatgttaaatgcaaaataagcatgttagagtgtacataggtctacacacgataaatttttattgatctatgtaattttagttatttaaatttatgaagataattaaaaattaaaaaacaaaaacaaaaataagttgaaaaaaaggagtgctattgtaaactttctattacaacctcttagtcaactttcgtgctcgaaaatacatgttggaatatttttttaattttttttatggcggtgttcgttatacttacaacattatctttgaaatttttaaaatttttttgaatagtttacagtaccgaaaatatatttaaagtttttttaacgcgcgtggtaaattagaatatcaggaactctattttcagcattgtaaactattcaaaaatttacagagatgatattgtaactataacgaatattgttaatgaaaaaaaaaaattaaaattattttgacatgtgatttcaggtgtagaagttgactaaaaggttgtaatacgaggttataattagcactcatcaatagaaaaactataaaataaaatttaaaactctttttttccttttcacttaaaataaacattaaaattataaaagattttttttttccgttttttcctcttcttctttcttttctcagttcttcttgattattcttctcattttagccctgatcgtccatccccgaccatctagccccaaccgtctagcccgggtccatttgtataggcataccattcttttataagttctccccagtgatttgggtcttttacatcagagcattgctatgaggcacctatggttcctaacaccacaataaagtgtcgttttatagttggttagtgattttctataatatttattaaagtaaaacaagtaagactcgatattaaattgtaccaataataatattatatctcacaagagtgctagacaccatggtgccttttagcatttctctttacaccatcttataatattattaagccctatcgagagcaatcaagttcaggatgttcaacactcaaacaaaaatattgagcacccatcgagtatgtaacgccctaatgctaaggcatgctacagtgctttttcaattacagtgctatctttgctaatcaaagaatttcct

SEQ ID NO: 243362 - DNA, 1944 bp, Cannabis indica
ttgaaaatgttccaaaatgccagagattggtgttcttgagaggtttacttgctattcttcatgagggtcccctttttatttgttattattttcttttggatatggtaatgctttctaatactgtttccttttcactcgttcatgttttacagcagaaacgttgcccagtggctggagtagctcagttttttttattgtagacgaggcttaaaaaacgttcaaaggtatcatattttgacattgttcttttccttagtttattctatatgggatttgccagggcatttaaattaactattcctattgggctcaaccgtgagttacttcctaagcattgttacaagttgagttcgatagaattattatgtcagaaattcattctctgttttaatttaaattttacaaatgctttctataattgcttaaacattataccaaactcatcttttgttgtgacacatctcaaaggtgtatccttgagtagtttaaatttactgttgttttcatgtatttttgtctagtaagacaagacaaaacaaccatctaacattatcatttaagaacaaaaaagagaaaaaaaaaatcaaaattttaagtaagatgcttttccatattttagttaaacagaatatagctttgtaaactgttactatatccatgaacttggagtgaaagattgaagttgtagatatatgtatggagtttttcttcaatctttttaatagttttccattgtgttttgcagatcgttttcttgatttccattgtggtttcttggatacaattgagcaaaactgggatccctcaagaatattaacatttttcatcaactatcttgagatatttcattgataataataacaaagatgtgtaacgcgtgtcgttgcaaatgcaaggtctccaaggcacacaaaatgcccgtttaattgatttttactgtttttgagtgttttgttttgtttttatctttttcagtagtgcagagagtttcggacagttttcttttgctaatctcaaatgattgttacacacttgcataaattatttatacataataatgtataattaattttaatcatacaataaaaagttgatgtgttctccaaatagaattatttatggtaaaaattaaatatacatcatgtataaatagtgtgtacaatttgtgaaattattcctaatattattgcacttaatttattttcagaatgtttgaatggtagtgagtttgataattctgtgaagacaatcttggcttccctatttatacagtgtcggtgggcattttcttgtatacaaaaacatgatgtaaggaaagaagacatgaatgtgttctctttgtttgtattatattatgttgaagctagggctcttcatggaatttctcacaaatttgtctacacactcttaatattatctacaaatattataataacactactaaattgagctttagtagttgcattgtcttttagctttaaagagaaatacatatattattttatacaatatctttctctctctctctcttctattgccacatgggcagtatctcttatttatttttggctggatgactaaagatttctctggttcttcactgcaattaataatatggtcagttgtattaataggttacactcggtttaatgtctcatggctggtaatgaagcgtatataattgaataaattgtcatacaaaaagctagaaaagttattaacctatttatttataattaagcgggcaatatattaaattgaagggggtttgattggtttctattttgaagcagagtttgttttcttgccttggactggagggagctgcaagaagggattaccactatgggcccatttcgcacagcttttggaaaagctaaaagctgttttttgaaaaaactgtgaaaaaaatgtgtttggcaaacagtcaaaaaacaacttttt

SEQ ID NO: 243363 - DNA, 1583 bp, Cannabis indica
ataagctttgccaactaacatgatttctacaaaagccctcatgtattttcttaattactctcgatttctactgggagtacacatcatagtaatggcattgagttacatcttcggtataattttcattccacaattgtgtatctcaggatcttgtacatcaaatttctagcctcatttttatcagatggaagttgaccaattgtgagatatttgaatattgaagtcattcaagttgggttcgcatttatcatctcgacattttggtcatatgtttcgtaaatgctttggtgctggagtctctcaatcggtactacgttgatgttatcattcttgaattgtgaagctaattttgtcagggcatcgacgtttgaattctgttctcttaagacttacttgattttataataatcaaacttccctaagttatgtcgaactttttctaagcatcttgtcattttagtcccttttgcttggtattctctccacatttatattacgacgagggacattggtcgacacatgttgagtttcatgtatctcaaccatttgggcctacaattttttttaataaattgttagagttgaacagaaattaaatatataacgatatgctaaaggatataaagttatttgcaagcagttgttgtgtgtgttcatcacgtatttgttgttcttgtggtggaactattgtgactgggaatacaatttggtagaatttctttaagttagaaatttggtcgtccattctacattgttcttactgctatttatagggataggatagcagttattttttaatataatctttacaacggttatgaaatatgaacattctttatgtttcatatatctaactaacaggcagaaaataaaatgcaatcgctcctattttaaataagataactgccatatttgatttagtctttgtattatataacatgcgtttgctaaggcgcttgattgtttgaagtgtcgtcctttagaaatttgccaacacttatacttcgtgtgacttatctctattggagaacaaattgattacattttttaggtgatgaacaagagcgagcttaagcaagttaagcctctcaatatatataatgtcaacatcaagattcttcttgaatgtcttatgagcttaggcccctcaattgcgtatcatgagtatgttaagcacctaacaatgaatgcttttaatatcaacttatcccaaggagatggcacgtgagctttatattgcgaggaggatatatattaatatctctgagtgttttttttaaacgaaaataatctttatattaaacagaaatatctgctaatacaatggactgaagagcaaggggaacatcactctcagtaaaacgacgacttgaccaataacaagcaccacgtgccatacagtgtgcggttttgttagcaaaccggttaacatgaccaatagaaacactacttaaagaagataaaatagattgacaatcttgaataaatagaccaaaaatataaggcatagaaaccgaactaagaatagcttgaacaactaaaatgcaatctgtctctaaaatgacatttgacttgttattctt

SEQ ID NO: 243364 - DNA, 2310 bp, Cannabis indica
gtgatggggttttttttttttgggtaggtgtgagaattataacatgggtttgttgcttgtttcttttacaggataccctccaaaggatgcctaccctccacctggttaccctgcagaagggtaccctcctcaagggtatcctccacagcaggcttatccacaacagggttatccaccacaagggtatgctccacaatatgcccaagaacctcctaggaaggaaaccggttgccttgaaggatggtatgattctctttaaacccctttgtttttggtccctaaatgactgaaattttcatggttttggtggtcaaagatgtcgtgtatgatgtacctatttgtttttgttccttcctacacggtaaagctttgattaagatgcagatttttgggttaaatttgtttcattttttgcatgtgaaatcatagaatttaatctttgattcttctggagtggaatttcgtttggtgcttttggttttatgtggttttgcttgcaaattcaaagatgttaatatggtttttttggattcaatatttaatttttttcagctgtttaaagatttagcattgtttttggtgtcattgtcataccaaggaaggaggtcattgtcagtttccttcgtttgatgtttagctgtgtcactgtgtgtgcttattttttaagcaaagttattattatgatgggcttatcatgcttcacaagtgtccaaatattaagctgcatgttccttagatggattaattaattaagttctgtcatatgtgttgctagacacttaaaaacagtgaaaactaaaacaaagatttatttttggatgtgttttttactcactagataactaatgtgattctttgcttgcttctgcagtttagcagcactctgctgttgttgccttttggaggcttgcttttgaagaaagtacttgggcctcactataatttagacatggtgattcactccttgattgatgtcctttgtcaaattattcctctcagaactatattcttctctaattagcatcttaatgaagacttttatttatggctaagtgtagtttgatcttcttatactaataagaagattgttacatacattctacttttatatgaagaaacatgtcttctttaactgaataactttattcccatatttaaatatcttttattttccttattttggatcatgtacttgtataccttgttaataattgaataaatttgaatcttttattgatctggttgttcagaaaagctcaacattgggtgtgagtaagtataaagcaaagtttggagctgttgcagatggtaaatcatatcttaccattgagtaaaaatctaactaaggcatattcatgactacgtggccccttgtgcttagttagtggtgggttctagtaagtttaagaagatattttttagttttgggttctctttgtttcgagatattccatcttatggtgcaagccagctatttctcatatacatttactcgaggattgtcactttcccagaggcaatgttctgttgatgtcattgagagttgtatttggccaaaataatgatcataataatgctttggaatattcgtgaagataaaacaaatagtgcataaaattataagaagattattaggtctctctctctttataaaatgatgaagcaaagtcgtaagattagagggtgacatagtaattttggatagtgttgtattcgtacgtttcattttgtaaacctctgacatctgacgacaaccataacattctagcatattttactctcaactcatgattacctatagttttttagtttaatatttcttttagatgattgtgtatgtcataattattattaggataaaaataaatttttaaaatattttgaatggtttataatgttgaaattttttagaatatttccaatagtttataactttaaaaataaagtttaaatgttctattgtacaccctattaatttttttatacttgtggtaagtaattgtttaaattttataacattattataaactatttaaaaaaatttaaataacatacactattactaaaaaaaaaaattagatcaaaaaacttatttttttgattccaaaacatataggaaggtctatcataccaacccttgaagtactacatattttcatattactttgaaaggacattcaaagtttttttaagttaaggctataccaggtttatgcatgtgaaagaattatgaaaaattattctgtaaaaatagtgcggtactagtagtttacactatcactattatcaaataaataatatttttttttt

SEQ ID NO: 243365 - DNA, 1340 bp, Cannabis indica
attccaaaaaactttgacaaagtataactcccatgtgctctctgaccataaccaaacaaacaaaagaaaataactcaaaactctaatttttacatgtagataaaagttagtacaaacgggattttaatcaaagtatctattttttgttgaatttttagcatcgtaataaccctaatctttagaacgcacactacaaaccttgttttagaaagaagaaaaaatagaagaataaaaaccaaaaaacttaccgtaaaatgggacatcgacgaacaaacccctttcttccccattcacagttcttgcacccaactttctcagattttttgcttgtcctaaatctatgtgtgtttcttacttattgcaaaaccttaacaactcatattttaaggggtataaattagtagtgacataaattttggaacaaatttactaattgagaacgaaagatccatatgaattgtactcttaagctcgtgatagctaagagtaattaaatttttttttaacaaagttattcatttttaattttggtaaaattaatactatatacatatatatatatataaaatataaattaatgggcatataaatgtcgacgagctataggaagatcaacttgaagggtgtagtgaagaccatacgagtgggccagcactctagagggctccggcgtccggccatttcaaaacaaattaaacgtgaaaaatatgatcatctatatatatagaatatataatattaattaaaaagttccaactaaacaaaaaataatggcatcattgatcagatcatttatttatgaggtcaatgatgtcattttgtttgttgggcatgcaagaaatttaaataaataaatattaatataatatatatattcaaacaaagagtaaatattgactaattaaaataaaagactgcgcacaaagtcttggcaaataattgcaccatatattagcttaattaatttttgcataaacaatatacgtgaagtaacattaataaaaataatatattaatacacacatcctcttgaacattttttttttcataaatattgtaaaagctacaaccaatttaacaatttaagaacaagtgaacaacttgcccaccttgccaccatccaataaattcaatgtgacaatgaagggcactggccggttagctcaatataaatattattttatttgatttgaaagataatttctaaaaaaaaaaattatttacgcaaaaaaattttaaagacactttattttaataatttttattttatataaaatttatatctttaattgtactaagtttttaaattttattctaacaatttatattcttaaaaaata

SEQ ID NO: 243366 - DNA, 5859 bp, Cannabis indica
aaacaaaaaaaaataaaataataattaaaaaataataaaaaaaataaaacaaatttaataattaataataaaaatttaaaaattaagcaaagcaatcagaccccatcggacccacaatccgacctatcggaaaattacaaaaaaaaaaaatttaccatcgggcccatcgaaaccacataggaatttcaccaattaaggtgcatctgaccctacccatcgagcccaactatcagccccatctaccgggcccatcgaacctacaaaaggaatttttaccacttaaggtgcatcggaccaacccatcgggcccaactatcgggcccatcggacccacaaaataatttcaccaattaaggtgcatcggaccgactatcgggcccgacattgggccttcatcttccctgatgaaaatacactaaatcacaccctaaatcacaaaccctaaatctataaagaaaaagcattttcaccctaaatcaacaagtaaaaaaaatgaaaaattccatagataaaaaatcttaccttggctgacattacgtggtggtggttcggttaaaatgggttcgactatttggtgttcggtcggttttcctagcggtgacggtggttcggtcgagatccctttttggtggtcactggtggttcggttgggtggaccatcttgggtaggcgcggtaggcaggcggtcgagcggttaggtggaagaggtggatcggcatgggtaggccggtggttaatcgtgggtggaacgccggtggttaatcgtgggagggtgcggtggaggaggtggctcgacttggattgatttttgggttttaggtttgatttgagagagaaaggaggaagagagagagacagctgagaataatgagaggggtcttttagggtgtagggaaaagtatgcttatttttcatatagttataagtattagtttagggaattaatttgggtataaaagatggatagaaattaaaacccttataaaaatattctagtatggattctttcaaaaggggcacacatatgaggatagaataagtggttgtggttggtggagatgaaatttgtgggtttttgttttgtagagtgcaccacattgggattactgctattgagaaagatagatgtactgatgtatctcatatttattcctctcctaaaaaattgaaatttaaattgggttttatagagataacatttggtttctaatagaggaattttgttgaatattaatctacaattgccggttatggtgttgcaaaatgtgggtttcttcatcttcttttatttagttttttttttaataaaaagaattcaaagttctgtgaatgtttatgagaaatggtttttgcaaaccaaaaagggaaaagaaattgagatagggtttttagagtgttgatgctaaaaattgtccaacctagtcttgctagattagcgagaagagtaatagatgaaagtaagtagaaaaatagagacatcagaactttatagtagtttacccccatgttgcgatggtaatagagctatgtctactttgagcttttatttctcacaagggttacgaggcaattagctaaggaggagattctagattatatagagagaaacctgatagagatgctctcaccttatggcgacttagcagaatgtgaaaaatgagcttgtggagctctccttttataggcaaggaagtcgattaacataataataaaatatttcaaaaaataagaatattacatctagagtgatcttgaccaatgattgtgatcaaatgattggaatgctcaaatttggcttcgaatggtgatcgtcgatttttggagatcggatcacatctgttggattgttttcagattatctatggaaaaatttgcacttcaacttggaagcatttttttgaattgtaaacttcaaaattgaggtatgaatgtgatacatgagcaaaaagaacttaaaatgagcattccaatgcacttagaaacacatcaatatgagtaatattgatcgagttatgattgtttgactgatggctgtttcgcacgtagcacccaaattaataatcctgcgattgagaagttgtccaatgtcaacctgggcactgggtacttgggaaatcatgtcggaatcatatttgtcaaagtctaagttattgacatcacctagctagtttcttggttatggtgaagtctcttactagttcttggaggttttacttttttgcaaaatcgggagactcaaaaccacccgatttgtgattagtttgctgatattccactttccgaaaaaggtgagatatcgaagtgtgaatttgacatgccacaaattgtagatctcatttatgatggaaaaatagcaaaacgcttgagacaaaactagaatcggataagcacattcccatgaagcaggttgagtgtcaacctcgacgttgggtgcccatttctgagctttctaggtgtggttttagcacatcaatgatacttatgtcaggaaacgagggctcgtccctcattttggaccatgataagaagaatgaccaaaatgaatttgcatctgagtgatggaaacatgcgcactaggttaaatgtcaatgcagatgttaggacctggcctagtgtcaacctgggcactggttagagcttctggcccctagattgtcttgtgtgattctcgataacacttttatcttaattattgatgaaaatagagaaattcccaaaagtctttgttgttaaagctgttggaaatgccccaagttgataatatgttaacttgggcactggtgactaggtccaatgtcaatctgggcgttgggttggctttctgaacaccagatgactccatttgtttactgaaagtacttgtatcttcattccagaaaaagaaggagaaaattaccagggaaatatctttagaaaagtggttggaggtacccaaggttggcaatatgtcaacctagacgctgggtgctcaggtgctccaaacgggttccaatgttgattctaatgcctctaacatgcttatggtaggtcttattcatgtctaactgcattcgttgagtgatctacacaaagatgaggtctgaaaaccaaaaccctagtcctagatgtcaacctgggttctgggtcaaaccataggcaccaagttggttcaaataactaaaggatggtgacttggaaaaaacttcgcgagatttaaatgcccactcgagagtcccccatatcagcctgggcattgggccagggtcccattcccatggtcgtctgctagtattagggatgtaagactcctagagtgttttccttctttccatgtgtcaaaaatgatgtccacatcaccagggctagtttctatgtaaacatggaggtattatgatttcatgttaacagtggggggatttcttgaatattgtctaacattgaatttgaggtgcttgaaaatgaagggtatacatctaggttttgttttacagaggagtgtagagattcgaagttggtttctgttatcactagatttatccatgtttctagcaaggggcacgtggacacaagacaattacttaaagcccatcagtatgacctaaacaacaaagattgggccaagcctaatataaacctaaccttctaggaagacacccgcattactcacccaggcaagtttttgtggaatatagcttgaattgggaggacctttggctccagtttatcaacatgtacctggaagtcataagtatcttccaatttactaatccatgcagaataaggaagttaccttcagtggatctcgatcagggaataaactcaagccaaaatagaaaacttcataattgaagatcagataattaattcacaatcaattatccacaatcaaaggacacggtatgaacaactatgaccgtgatcaacattctaagtcagcatacaatcattgcctcatgggcgggacttcactcgataagcctaaaggactgtattatttgtaaacaccccattagagggaaagagtaactaagtatgacctctataactatataaatacacactgaatccttctagaaaagggttggaaattcttgactcacaagcttgagaaaagaatagagtaatcatattcattgtaatcctataggcttttctagcctatcaaataataatattgacccgtggactaaggcttattaacacctcaaccatgtaaaaactctgagtgttctcttcctattttattcccttaggtcatattttctttagctttattatgaaataatttcttttctaaaaatcttgctaaatatattggtgctttcattgagagctgaagaaagcaatggtaccatcatagattacgttcagtaatcatggtactcacgcaaaacatgtctggtcttcactatactaatcttaatgctaagacaggagatacggaagatccattgaggtgaccagttgccacaagaaggatcaacatagtaaagacccaatccttgaagatcctatggttgaagacaatgaatcagaagaaaatgatattgatgaagctggcgatgatcaccaagacgtgcctaaagatgatcaccaagacatgcctgctggtggtgatggtgaaaagaaggacaatccagacgtgttagatcatgtggtcattatggcgaggaaattacaaatagttgaaaacaaattgactcaacaagaagagttttctttgctaatgattgagaaaatgtagagaatgaaagctataatgacaacactgaccgctggagacaaaaccaaacaaacggctccaaaggacaaacaccaccgagaaggctaatcctaaaagtcctggaacttatgatcttaataaggagaaaggaaaagtaaaagtaggcaaaacttcaaagaaggctcctcagactaaaccaaaaaaaaaaagaaatctaaatctgccagccaaccttaatagaaaaataaaggaaaccatgcctcagggcagggtgaccaaactgattctagagacagagttgctcagattgataaatctaatgccaaagccaaaaggcctactacacagaaggatgcaaatcactgcaataattctacagccaaagtgatgatgctgaagaggtgcatccgctattagataacaacagtggaagtctctccacaaatgatctttggagaagattaaatgcaaagaaaggaaaggtaagaatagagaaagccagacctcacagaggtgacttgaggaaccatatcaataatttagtttgcggaagagaatcttcatattataaaactcaacgcctggagtgcaaagttgaagagttaatgaagctcacgaagaagatctcttggaagcaaaactgaactgtgtccaatttcgaagtataagacacaaagccatgcatggaaagaattatagatgcacaattgccagagcacttgagaatgcctcagatggagttgtacgatagaagaatagaccccaaggaccatctatccaaatacaaccgaatgatgcaagtggataaggctagtgatgatgcaaagtgcttctactctcactaactttgacaaaattcgtagaagactagttgaaaagattgtccccaggatcagtccataactggagatatttgcagctatgttcaaaaaaaaattcatagcagctaaggatttcgacttggaggttagttccctaactaacatcaagcaaaaactagaagaaatccttaagaagtatatccagtgtatgatggatactgcttccaagacaaaggttactgatgatatgaagatggtggctttaatgtcaagaataaccactggatctttgttgtggggcgtgttgggttttgtgccctaaataaaacccattac

SEQ ID NO: 243367 - DNA, 1786 bp, Cannabis indica
aatccaagatgggaagttccttgagtttgcttctgtccatggaaatctttatggaacaagtgttgaagcagttgaagttgtagcagatgatggaaaggttaaacatctaatactaatacccttttcctatttgctttgaaaaaggttgaacttttattctgaatatgactttttgttgactaaaacttgaatgtagagatgtattctggacattgatgttcaaggggcaagatctgttaaggctagttctattgaagctatatttgtttttgtatgtccaccttcaatggaggaacttgagaagaggcttagagcaaggtagagttagaagagctctgcctgttttggcttatatgttttgttcctcaaattttcccttttgttccaaaattgaatatttttcggttttacaggggaaccgaaacagaagaacaggtactaaaaagactcagaaatgctaaggctgaaattgagcaaggtcaatcatcaggcatctttgatcatattttgtacaatgatgatcttgaagagtgttacaaaagtctcaaggtatctttgactggctattgaagtttttcttttgaaaacttcaaacaattatttatgtcttatttacaagattgttaattttggtgtagaaactcttggggcttgacaaaagtgagaatggttcccctgaaattggtatgaagattaagttgtgaggctttttgtttaaaatttattgctgtgataaactttgatgaaactaaatattgtttgtaatttctattcagaacccatatgggttgatcttcctgaggatcattctatctcgaaaatcgaccagaaaatcatcataagcagcagaactcctgaacttgaaaagggattcaaggacttgtaagtttcttcatcatatggtttagcaaaggcttgctctaatggcttgatgaatactgacttgattatcatggtttgagcaggattgtcatagatgtttcatcactgaaaggcggggcaccgggacgaactcgagggctcaacatctattccaccagtccagtttggaaagcctgaatgggattcatagcttagctgacaattaatctgatggaaggactaacttcaattccttaatttgaaattttttatgctcttcttattttagttcttatatttttctttgaaaagaaaaaaccaaaaagggaattagtgatgaaaatccagctgagaagattatcacacgagtcaaatttttaatactccttaaacccttttcattctttgcttattttacaacagaaaacatgactttggaattggatccaaaatgaagaagaagaagaattgttatctacacaactgttgttcacatgagcatttatatatttgattttatgattgtcaagacaaaatagtattgagttgaaatttacattatgatcttttctatctttattattgttgttgttatttgctttaatctaacctcaaaaatataaacaaatttaaaaaagagaatgtattgaatcaagtagcaatctagtctaataataaaaaataaaaggttaattaagatttttgtcttctgaactttgacatgtactaaattatacccttaatttttaaagttgttaaaaatgtttcatgaactattgaaattgttggatttaaagatttttttttccaatttttttgtaaaaaagtttaacataaatgaaagttcagaggacatgatttaatacatgaaaaaaattctaattaaccaaaataaaatagccattaatatttaccaaaatgacaa

SEQ ID NO: 243368 - DNA, 3616 bp, Cannabis indica
tttttttacctagtatattaaaacaatatatgctattttttagcatatattgtcaaatttccctaatcttattggtttggtatttctattggagcataataattcccaacaattattagagttagtcttacattactaatatgtgaaaataaattgtcatgtaaaataaaatgaaggattacccttcttattgtcaattattttgagataaaatctcatgcatcttaaatcacttcttatcccaaattctaacagtgatcatgcaattatcctcgatcgagtatcaagctcatcttcaacatcatataataaaaaaaatatcatatatatcgaggctattgagtttctaccaaacctataaagcattaacaagtagtaaacaccctaataatatatattaatattgctatttatattattataaggaaaaataaacatttatactatataatggttacaaagataccattttaaaagatttttgtttaaaaaaatactttgtaattacaaaattaattgaatctagaattaagcaagcgctggcacgtgaaactcttacacatgcaagtgagaacaataatgagataatctctctcacacaagtttatagtgtggaaaatttaagtttataactacaaagaagtcgcgtcaaaaatttacttacttattcatgttacctatcatcactttatttaattttttttattttttttattttaataatatatatcattaaaaaaatatgaaaagacattgttttaattttttcctatcacacaactttatattcacatttaggttatcacttgtaaaattgggaggacaaatattaattttggtaaataattcatattaaatattgtttggtctatagctattgctttatgtatcttattattactttattttttttattatttttgataatatatatttatagggtatatatacaattcatatagtttgaaaagtaattgaaaattatctataattcaactaatttataactaacaatatagtaattaataaagataaaataaacatcaacttacaaaattaaagttgcatacactcatttatatataaattttttaacaactaaataactaaaaaaaactatcaacactatacaaatcatctagacactaacatattgtattgacaacttgaagtacacaagtatatatatatataaatatatatatatatattaggaaacgaaatcgatcttcgaacagttttgagcatatatgtagaaaaatttagtagtgccacaatgttatctaatctttcgccaccttctgaaagttggtctcacaagccaatctcagtatgtccctcctctcaacagggagggacaagatgtagttagctctgtccctcacccgaagagtaaggatagagcgtgagtatgttggcaccctttagaagcgatggtggacctgcgagatatcccagattatgaaataagtcctggcgatcctcccacttttgataaagttgtgttgttggtgttgcctagccactaatagcccaactgattaaagtagaagtatctagaccgaatttgctttgacatggattttagctcaaagaagtatccaatctcataagggtagggttgaggccagcccaactctgcataccgaacgaatatcgccaaaagatactttatacctttcggggtcatttgagctggacacaccctgaagtacatggctatatctctaaaattagggtgcatgtgtctgctctatgtggcgctctgaccaggccatccatttgtatgtcaaccgatgagctcactggtctctcataggcctatcacactggacatctcctaccatccctcctgccttgatcttgtcaagcttctgggaggaaatagaggacgagggagatatttaccagttttgttggtccccatgctcgaggactcgaggctctgcagactcctccataacgtggtatatcctgaccttgaaaagacgaccaaagttgttcaaaggttgcttgacctcatcatacgaacccaagggattattgaggaaaataacacaagtcttgtattgcctcctggcagacacagcctcctcaacctcaaacgcattgttcgtctcggatgaggtctcctcatctcggccagccacaagctgcccgaccaaaagtgcctcagcctggctagccctaactctccatcatattgaggttgtgcagcctcctcaacaaggccaactctccttctagttgttagcatagcgatgtgagggtcatagggtggttccctacgacaagtttgcttggtccttgtcgtaatggagcctgagtgcttggcaataataaatgtggtctttgcggcaaaaagatcctacgatgaagaaattgcctaccaacgggcaaagtattgggcacaccgtcctagacaatataagtccaagaactaggaaaaaattgcctctattctaagttcagctcccagatgaaccgattgtacctattcactctgaataacagtgatgttggacctcaacttctaaaaaacaacaactgacctcgagatcacttgagggacagctggaagaatcaattggacactgatattcaaacaaaagaccgagtaaatcttcgttgatacagttgtcacctccccataagtcactcaggatcatctgcacataaaagacaagggaaggtgagcaaccaaacaaagagataagattttggttaaccatacccaagggtattacttgccagataatttcaatgtacaaggatgggtatcagcgaagtacagtttcaagtgtaacaacttggacaagtgttgagtcttaagttgattatttactacaataaactcaccacaaagtctcatacaaagtttctaaggaaaccacgtatgagacaaaggttttacaggtgcacaaggccatgacaaggttcttgtcgaggtcaaaagatgacaaaaaattggccagcctaaatctacatgcctatatgacacaaccctacatgttacagtcacatgcctaattatgtttatgtaacatatacctacgtgttgcgctcacacgtctaattataataaggccttagaacggttcatctcggttctagttaccgagtccaacctggttatgccttgaacacataaccctaaatctcaatatattcatatattcaacatggcatagtatttacacaacatatatcactagggtaataaccttaggctattaaaccgctcatgtcagggtaataaccctaaccccagttactaattactcacatatatcatttccaatataagctccaccgcgcataactctacgtgctaactattgtcttacctgaggtcccgcaatagcagagattccaaatccctaggtgctcctgaccaggtgctggtaatcctactcacaattctgggatttacacaaatagggttaacccctaatttcacattcataaagtacacacatggcatttaaaatacagattatcatatagagctcggaacgagctttccaacgatatatagaactcctaaaacggagttcagatcacaaaattaggcattttcaaagttgcacttgaatttgcccagaaactcgagggc

SEQ ID NO: 243369 - DNA, 4648 bp, Cannabis indica
ttacctccaatcaaacgccacctgaaattttgaaaaatatcgctacattttgcttcggttcaaaagagaggctaactttttttttacttcagtttaaaactgaagctaaaacagtaccgagtattaacaacagaagcaaaatgttttaatttttgctaaacccccttttgacaaatgaaactatcatttcttaacttaacgaaagaaaatatttcacaacccaattccaatttctactttctagccctaaatcatttcttcctcaccattctcgttcatctcgctcttcttttcgttttctttttctctcttatttttctggtgcacgaagatcacaccaaggtaaccgtggatcaacatcccacttgatttcgtggcttcacatctgatcgaggtaagtaaatttcctcctcgcattcatgtattggagatataattttaaacttggtcatttatgatttctattgtgtgggttggaaatttgaggagctatgaaatttgtcaacgatgatttaatttttcaaattatatatatatttttggtgttgtgagatgattttgaggtttgtacttttgctttctttgtctctctcaattttcttgagactagttattagaatttggggtgagaaactgatattttgagtttgggacataagctgtttgaagaaaggcctctatgatatttcaacattttttttacttctcttggtgaatcacgattgttgcttgttcctatgttgttatatttcatcacagttgatgctttgagtctagtgaataattacctgggaggggttgaagatataagaaaatctaaagtatgttatattattggtagtttttgcttttgactatttcaaaaattttgctttcaattatagttgtatttgtgcttttgtacactatttctgtttcagcatcattaaatatactatttttctcttcaaattcaattatttcctctaaagagtttggatttgtaaataaagaagtctacttaaagttttaaggtttaaactattaccagaacttctaaaatggattatgggtcatcatatttagtcacacaatcagctttgtttcaaactttgtttaattttttttttcagtctttccttggtgttgaggtcaaaatagattgggtagcttttgatgacttataaactatgtagacataataaacttagctcttttggtagacttaataaacttttattgtaatatttaattgtcaaatgattgatggtagttgtaagttttccctacacctaacgacactatagtctataccacactgcatttttttaggagaaaaaaacattcattaataattaaactacactgcatttagtacgtttaatacaatatattagtgaaatatcacatcacttgtactataaataccctcactaaaactcttaataataaaataaaattaatatgtatgtagtttcttcatgcatgttatatgtaaatgtatattctcatttgatatttttccactgtagattcctttaaaactaattaattaataaaaagttttgagtatcatatccttgaagtttctttggataggacactaattttgtaattaaagcatttcgtgttttacatctctaagtcttaacacactaacacaaagtttacacctacaagacctttccaagcattgtttatttatatattagttgttgaaaggtttatcatctcattatctcttgccataaatatggataaattttctcataaaatggttacctttatgtacatagaggacctaaacgagtgttttaaagtcctttgagaatacaacatgaagctcaacccccttaagtgctcatttggagtcaactcatgaaagttccttggcttcatagtaaatgcccagggaatcaaagcaaatcctgagaagatcaaaacccttttagacatgaaactgcccataaatatcaaggaggtatagagtttaactggctatataataaaactaagcaaatttgtatcaaaattcacatttaagtgtgttcttttctttaacatcttctaggaaaataagaagtttgaatgggcaaaggagtgtgaagttgtctttcaagaattgaaaatgtacctagctcaacctcccatcctgtcaaaacccttagataatgaagaattgggaatatacttggcaattacaaaatttgtggtaagtgcggtcctcattcgagaagaaaatggagttaatcatccagtgtattatgttagcaagaggctcattaatgcaaaaagtcgataccctgtaatcaaaaagctaacatattgcttgctactagcttcaagaaaattaaggccccacttttaagctcatcctaccagagtatacaccgaccaaccactacgacaagtgctacaaaaacctgaagcgtctggtcggttgcttaaatggacaatggaacttggataataagagataacctactaaccaaggatagtaataaaaggtcagactctcactaactttgtggctgaatgcacaaatgtaactcctaaaaactccgagcaagagcaagaacagaagaaaaagcgaaaaaagaagcgagagtaagagaagtagcgagtgcaagagctagaaaaattggcatggaagttgcacgttgatggtttttgtatggattaatcatttggtgtaagaatttctctcattgcaccttgaggcagcaactggacgctgccataaagtttggtttcaaagttgactacgaagccctcattgccagactaatattggcacatgaggtctgggtagagtaccttaacatattcagtgactcctaaattgtggttaatcatgttctaggtgaatacactacccgagaataaaagatgatggcatatctaagcaagatacaaaacttactaagccaactcaaagggtacaccatcaaacaaatccctagagaagaaaataccacaccagatgcccttacccggctagccagcaacacattagtggataggacaaatatagtccctattcaatacctacaagatccaagtatttctattttaaaaggaatagatatgctggatgatagcccaacctggatgacatcaatagcaccatacctctagtcatgagccctaccaaaaattaggaataaagcaagagagataatgagaaaagctgctcagtatctaatcctaggtaaaattatgtactgttgtggtttttcaatgccagttttaagatgtgttaccaaagaagaagttgcacgactactgatcgaagtacatgaaagtttctacaacaatcacgatgggggacagtctttcaaagaagatactcagacaagggtatttttggcctacaatgatcggggattcaatggactatatcaataaatgtgacaagtgccaaaggttctctaagatcccaagagtagtgatacccttaaccagagcagcaagggtgtcgaatttggccctacacacatcatgtgtggtgatgtgtgtattagctggctacttcttgttaatgttgttgtgcaggctcttttgtcttcctagtctatgaaaggcattaatcgacataggccttgtggttgtaacctggtcgtgtggctttgctggcaactgtggggatctatcctttataatgatagagtcatctcttaagcgtttactttgtgaggagctactcgcagtactacactgactatttccttcaaaatagtcttccttagagtgacatgtgtggagggagttggatcgatttctcaacgtctccatgcacctgtgggaagtatttgtactgctggccatcaagagctcaggcaaagtacctacaccaagcacctagtgcatcacataagtatttttgagtgtggagtagttcattaatcttcagcctctgaatctcacactcttcacatttgtgacagagcttctgggttcttctcctatgtttgactgcaggtcgctttccctttgcagggtcatggggtggtctagagtcatcaaaattgtgaagagaattccatagaggagatttgtttcatgcattgtttgaattacttcgagcagaattgtagttggtcttaccatttgtgtgtggcggacctgtaggtctgcgatctcgagtatgagtccttttagacgctcactcgtagctcgcttccctaactggtgactgctccatattaggaggaggacccatagatccatgttcttgagtttgagtcctttcagacgctcgctcatagttcgcttccttatggggaatcccaatggctgttgcttgctgagtagtggcatggctaccaggagtggtagtgtggctttgcatgttcatgaataattacttgcttgaattcctttcgaaacaaagttcctagagagaattcgaactgtagttggggatctcaaattgtgactcccaatgaaagtaccaaaatattgaccctgaaaagtggccaacacaagctcactagattcgcgagatgaataatgagtgttagtaaaaaaaaatagagagacacacaagttatagcagttcactatcatgtcgcgatggtaatggagctacgtctacttcgagtttttatttctcacaagatggtaattatagaaaaaggctaaggggttgtttagcttcataacttaa

SEQ ID NO: 243370 - DNA, 3107 bp, Cannabis indica
aaatgaaatggaactactctttaatttgtaaaagattcgcttcttcttttgtttgggcctttacccataatttatatgatttatggttgtattgacattactactattcctaagaacatttgctgtaatgaccgcgaggtctaatatattatgaatgaatgaacgttgctttaaaaaaaaaaaatgaaatagaacataaatagtagccagatggataagtggacgggtggacgaatggatcaagtatagtggtggagtttaaggaataagttcaaaacggatgactctctgcttgagtgagagcaagtaattaagtgttgaatattcaatgatgtttacattgtttggttccctttttatcgtgactttttcacaacttttgcccactattcacacgaccccttgacttgttcaagttagttgctcccctagtatcgtgagaatatttactgttttgctggttagtttcaagtttacttggttttgctcgtttagttgattggttagatttagacttgagtgcaacgcgaactgttgcatggcctatgggtttgctctttgtatatttcaaggcctgatgaattcgtttgagtgtcttattgagtttaagaacattgaatttggaactgatgggcttgcttgactatcatatggcccttctttggtacactaaggagatttctaacactacactttgtccctcagtttttggtaaagcgacttcaaacaggttaggatcttgtatgtatttgggacgagttcaaaaggtacgattctaatataattacagaaatccttgaagtattgcttgagaggaagtacaacccttgtcttaatatgctcgatactccaagcacctatcctcgaagaaccactagtgttgcagttttcatgatttgacaaaggagttggaggaaaacaactgaattcgcctggtgtgactaagcgaatttgaaattcttcctcattcttgatactgcaggatcttaagaacaaacccacatacggagcaaatgacctaactctagattcattcaactgagcttcgaattggactaaagggttctgaggtaatttagacttgcgctcttttggagacatgatgccaaagtttagtttacccggggaaaaagctacggtaacctcgggtaaaaataaaggtctttccaaaggatactttgttaaactagaggactttggccaaaccgcatctcacaagaaatgacgtttcccatcaacaacttagtctataaaatgtttaaagcgagcagaggcctcttctcggtcaagttttttattgaacaacctaatttttttgtcatttatttttaatattatttttggatgtttaactcgcggtttgaaaggtaaggctgacagttttgggttttcctatcctaaaaactttggacttgaaaatttcgaatcaggtataaacattgttttcatagaaaagaaaatatcataggaattcagacattttgggaagtaattcaaagaaagggattactaaaacaataactactttttcaattctgaacaaaaataacgcataaacataacaaaaatcaataaaaagtaacaaggaaaaagataaaagagtaaaaatcaaagtcttaccaaattcttgatttttatgaagatgttgatgattacttactagaagtctctagtaccaaggatctggaatataacgagaagaaggtttggaaaaaaatgatgttgattacacgaaggaaatatgttaaagacaagctgggcatgcaaaagttttttttaagtaaaaatgagttttttatttgattttgtatttcaaatgaggtaatgaggaagacgatggtaaaaacctttcttatatcaaaagataaggaactgttgatctagttctaaatcagatcaaacgagtgggggatctttccaagaaatactaaaaagacatgtaaaaaagcccgtcagttgaaaggacgtttaattaataattgattaacttttcttgggaaaaataaaaccgccaaagaaatgcacattactaattggagaaacaccgaattgtcccaccaaagattgtttaaaaaactcttccaattctagatagagctttttgaggggcaattgttgtgctctttcaagctataaatatgaacatgttacgtggatattagtctctatatcaaaaattaaaggagattcataaatacaacgattatcttatctcaagataggttacaattaacagagatatctatcttgcactgtgttacaataataccaacatatgatgacaataaaaatgcacagtttggcgagacgacaacagtctgtgatcatctcaaagttagccaggataactcaaaagcgtacatgacccaaagtgatattgttagaaggggtagataatgagttcttaaaggctatttcgagaattgtcataaatggcaaaagcgagaacaaacatcttaactagcgtctcgcggattacgactagttgttcccgaacactattgaagaacatgagtcatatttcgaatatgttatctcggtaaagaaactactttctaaggacagaaaatggttatcaataattatgttatttatccacctgttctaaatataaaacgtaagatttatccacgtgtcatgaacgattacttagataagatcaaaatagagtaattgtcatttttaaaagccctataaataaggatggaacctatggtgtacgggaggagttttaggagaaagaactttgagagattaagtataagtataagaaataacctaaaaatactatcttgtacccaataaaataaacaaaaaaaaaaaaaaaaaaaaaataaagcataatcaaaaataaaattaactcgtggagtatgtagatttttaattacaaaatgacgtaaaaattcttcgtgaattcaaatatatttaataactataaatatctaatttttatttacaagacttcatttattgttaacaaaattatgtgttaacaagtacaaccacaattcaaatgggaaatttgattttctatgcttaaaaaatcctaaaattatatccctaaacctaaatgttatactataggtaatatatgactacttttgctt

SEQ ID NO: 243371 - DNA, 4968 bp, Cannabis indica
ttggtaaagggtgatttcgggttttgggtaaaatccggttagaggatgcggtgcggtctttctcaattctctctctaactcaaaactggaactcgtaagcctcaactctggtgcgccgttttggggaattcattttcctttctcacagagtttgcgccaactggaccaaattaacaactttctcttcttcctctttccctccaatccaataacaccaaacagaaccctagaaagggtttcctccccccaattcactttccctctttcctttcaaatctctgattaacaagaaaaaagcttctgcctttcgaccttaatagctattcacccactccattacgctgtcgttttttcggttaccttccgctcacttcttgcctcttaaattgctcagctcatcattattcctctgccaccacattttgccaaatttcatgcggcgctttcccatcggaagcttgaattttggggggcttttggtttgagattgattcgtgttctgggtttttgagtgtttatatttgataaatcaaggtgtgttagggttttctttttcttgttttgggtggagctgggtggtgaggaagcagttttaaggtgggatgagtagtgtattcactgagacgatacttgcagacaagctatccaagctcaacagcacccaacagtgtattgaaagtatccttttttattttggttaattttttctttggtcttaattttcttttctctttcaatttctcggtggcaatgaattaggaacttgtttggatttctttatgatgctgtattctttctctttgagtaccactcgaatcgctacttgattgtgaattatatgagtcttaattaaaagataagccttggttttcaactttcttcttcatcttcttattggaattgttatataataatatagcttttgtcccgacttcctaagtttggatttgaaattcttaacttttgcatatagctttatcgcattggtgtatatttcatcgggccaaagcagaacaggttgtcaaaacatgggagaagcaattccacagctcacagataacagagaaagttcctctcttgtatcttgcaaatgacatcctacagaacagcaagcgcaatggaaatgaatttgtctcagagttttggaaggttcttcctgctgcactcaaggatcttcttggcaaaggcgatgagcgtggaaagagtgtggtctccagattggttagtccattctctcattttttatgttcgattaagattaagggtgtttcctttttatggatcttcagttttgaatctaactggaaagcaatggatctgtttctagtttaactatcttcgttgttatgacttagaattattgcccctgtgtaaatcagtagcagagttgttaacatgtgtgatatttgaatgaggaaggtttatctttgttgattgcctattattttcttaactgttgtgaatcagaaaatcagaaatggattatgatatgctggtggtaatatgttaggttgctatatgggaagaaagaagagtatttggatctcgtgcaaagagcctcaaagaagttatgctaggggaagaagcacctccgcccttggtgttcagcagtaagaaacgcacacgttctgttaaaattgtaaaaagggattctcgttccattagaacggttagcacaagggctttctttcttttcacagtgtttttgctccattgttttcctttacaccttgttgaacgtttcttttttattttccgaaaacggtttaagatatgttctctaacattttccatttctctgttaaaccagaaactttctattggaggttctgctgaaaagatagtttcagcattacacttggtgctcagtgagcaacccaatgaagatgcagagatgagtaagtgcaagtctgcagtcagtcgtataaggaggttggagaaagatgttgaagttgtctgtactagtagtaagtaattttaaatattattttttgcatgattgttccctgaatttttctctgtttggaagtatgattcttgaaaaagtaattttggcacttaagttttttgattaagaaacactacggatttaaatccaatttgctcttgaatctaggtttttttgtagtgtattttgggtatttcaagtgacccgcaccttcactctactcaaacatcaatggcttgctttttattattaaatgtttgcacctttctgtgattctttagtgtttttctccctaaagcttagtttcattgttgtcagcgaaggatccaaagcgaaaaacatttgccaaggaacttgaggaggaagaaaatattttgaagcagtgtattgagaaactgaagtcagtggaagcaagtagagtagcccttgtatcacagttgaaagatgctttgcatgagcaggtagcgggtgataccattatttcttttatgttttaacacatttatattttcttccacctgcagttagcaagtatgcacaaaatatttttttagtttcctcacgtttccaatttcttcttcccaggaatcggaactagaaaatgttcgaacacaaatgcaggtattgtttgtgacaagtagatcctttgatgtttgtattattgctcatttatatgttactgagagctattgaaagggaattgtttacactttctagagtcctgtatcttacattgatgtatggttttactgtttcgggtgctgtgtattaaattttttaaaagtttaaacagaccaggaaaaagatgattgccactttgtatattgcacttgctgaatggtgctattcacagctgccaatattgtgagatttggagtgtagtaagctgtgaacgaactaactgaaatctaaagttttgtagctcaattttatgtttccacatatttggaaatgccatcactacatagagttaatgccctcaatagtgtcacagaggttgttcaaatctaataattgtgtatttatacttgtaggtagcacatgcacaggcagaggaagccagcaacatgcgaaaaaggctggaggatgaagattatgtatcaaaaccatcaaatgctaccccctctcctgctgatgcaagtgcagcttcaggacaaacacgtaagaagtcagctgcagctattgcagctgaggttgcagataagcttgcagcttcaagctcctctcaattaattatgagctctgttctctctacgtttgctgccgaagaggccaagaaagctaatctcacaaaggcttccacaccgtcaagagcatttacatccgggcccacaagctctagtgtggattcagcttctaaactagaaaaacccgtgtcagtctcagatcctaatatgtatgtgtcagcacagccgctgactgcgccccctccaaatcattcataccagtcagttttggttccccaatcaacaatgcagaaccaagcctcaaactctcagggtcaatatcacatggttgcaaacccaggttcccaacagtatatgcagccatctggaggggtcatggtcccatacggttataataacattccacccttgcccccaggaccccctcctcccccaccgccgcatatggtgagtccaatggtgcctctaaatcagcagccattacaaatgactcagcagcaacagatggcgatggctcaggcaccgccaataacgcagcaacaagctatgcttttaactcagcaacccccatcaactcctagtttccggccacttcaacccccggggattttgtactatggtcaccctcatcattctcagttacactaattcaactttttagacgacggtaggtaagatcagtttgatcttgtttttaaccttttgatatgaagcagtttgtcgcggtgaaaattttgttttgttattattattattatttttttattattattataatgagatataagttaagaggttagaataatgtgaatgcgtacctctaatttgtgtttttgttgcacattccttggcactttacctcaacttgaggtcctcaagtcaggggagctatcgcatatgaagtgtgtatgaatcaaatagaagattacaagtctcgaaatacattaccatacaggttaacaattattgaaaaaaaatcaacgggtattaatggtgttctataatatttctcataagttaatattatcgctagtttgatggtcatttgtcgtacttgaaactgaaaggtgatttcaaaagaaggaaaaaaaaaactgaaaacagttaacagtattttcatttattgttttaatggcgtcgtggaaaactatagtccacgtggtagatgaccaataagagactgcgctccaaatcgtcccaacaaggccagactaagcaagataaccaaatttctataacagaaagggtgctatgcacacataccctttggcatccttattataacataaaagccaacaagcaaacataaaacaagaacagacattaatccaaatgaaacaaaaaaagagcaaaattgacaatgccccaacccacaaaatcgaccaacacaacaattcaccaacattatttgattgaagatttttactttattgatgtttatttacgattaagtgttaagtaaattgttatgtgataatttttaattgccctaactctttaaatttttattttttttaaaaaaattagttttaacgattaggtacaaagttccagaaatataatttaatattactactgccaaaaattaaatttaattatttattaatggggagttctatttgcaccccataaacttataaatacacccattattaaaaaaaataataaacttaaataatttttaaaaagtaattctttaaatattttttaaatttttttactttctacattattttattgttaatttctaatacttatttgtatttcattttctataattttttcttaacttcatgtatatatatatatatatatattattttttttttttaa

SEQ ID NO: 243372 - DNA, 1758 bp, Cannabis indica
agagagagagagagagagagagagagagtttctcctaaagaataaacctaatgtttatctcatataattaaaataagaaatcagatttaatacttaatattaatcctccaaattactaatagacaaaaggcaagaaaaagtcaaaagactagtttgcccttgcttcaccaagaagtaactttgccacctaaggatattttggtcaaatctaaaactataaatatttccgacattctcaatgtctatttgaattgtcccgctatttttaaaatactaaactatacgaaaaagtgactatatcggccaaacatcgcgttctactgttactaggcataaatacaaaaatacaaaatttcatgtataagataaataacacacctaaaattcaaatatatctccaaaaaatcataaatcataattaaaagtctaattctaaattgaacctaattatttgctaattctcatactaaaattaagcgatcattatagcattcctctgataatttcgtggagtggctgactcttatttgaagtatttgaatgatcctggtaaaatactggtgcattttgctttgtgtttgttggagacaacctgattttgtcattacacaataacttcgaaaagttctattttgaatatgattaattcaaatctcgaatgacttgcaaaaaatagcatttgaatttgcaacttttgtgaattggttggtttccattgcccatggccctagtaatggtaaggatgaattgtagaatttcatcccttgccatttctaaattcttactaatggtgtgttcaaagaaagtagagcgggcatggtaggcgtggcccataacattcttgacaacttgctagaactaaaatgagcgagagattttgctagcttcctagaagaagcggaattgttaaccattctcatgtatgtccgatgagctcttgaaagagggtgagagcacatgccttgaataggaaatgatggttaattcaattcttagttattctgattatgtgtaattaattattattattccaataagaaattgataagtggatgtgttgaataagaaattggaaaggcaaggacaaaattatgtgctcaattagttgacaaaaatcgtggatcagtgaagaagcccaccaaaaccaaattaatgaaatccatggggagtaacgtaccactaaaatattatatagtctaaaatattcattatatatatgaaaaataaacaaataattggtgtacctagtctagatatataatataaataacaataaacacctttcaaaaaataaattaaactttgttgcgaatattcctaattaattggtcgaattggaatttgaattaacctcactaataaatcgagatgcacacaaaagttagtcccaacatttttatataaaaaatatatattaattattttattatcttttcttgatgactgagaataatagtaagtatttatccatactaaaaatacggtatgaaatcgatactagcctaaaaagtatgaacacgattaggtacaaaaaaatacaagtttaaacatgatagtacatgatactaataattgacatgacacgacacaaaaaatatatccttaagcacaacatgacacgaaaaacacaaaaagcacgacacgtaagcacaaataaactagtctaaaaaaatacaacacacaataaactcaaataatatgacacgacatattaaaaaatcttataatttattattaataataatatgaatttatcaa

SEQ ID NO: 243373 - DNA, 3410 bp, Cannabis indica
caatcatagatattatgtgcactttgttgatgatttcagtagatttacttggatatacctcttaaaattcaaattggatgcacttaatgctttccttgaattcaaagctcttgtagaaaacaaatttgaaaggaaaattaagtgcattcgaacggattggggaggtgagtatcaacctttcacagcccttgttaaagagcaagggattgaatttcaacactcatgtcctcacacatcatcacaaaatggtcgagctgaacggaagcatcgacacattgttgaaatgggattaaccttactagctcaagctagtatgcccttaaaatattggtgtgatgcctttgctactgttgtgtatcttatcaataggcttcccacacctatcctaggtcacatttcaccctttgaaaccctgttccacaccacaccaaactacaagtttttaaaaactttcggatgtgcctgctttccttgtacctggccatatcaatcccataaattccaattccattcccttaaatgtgtgaatttaggctacagtgatgctcacaaagggtataggtgtctcactccaactggtaaaatctacatcacccgaaatgtggtattcaatgaacttgaatttccatgtaaactcgggttcctaaacagttaccaaacacctacccctgttattattcagagttccacttggtccacactgcctttttctatgtttgataccatccttcctaccaattctgcagatcatccttcacaagctatgactcaagcacatcctggttcttcaactcacatttttcattcacctagttctggtcatgattcaggttttgagggggaattacctactgctatcaccaatgatcatggtgactttggttcaaatcctgaacctcatgaaccctgtgattttggttctgcttcgagtggctcacgttctcaatctatgactgatgctagttctcactcccctactcaacatgctgttcaacaagtgcaacctgttgctactcatcccatgataacacgcgctaaagcgggaatatttaagcctaaaattctggtttgtcagaccttacagcagctcgatcatgaagagcctctcagtgttgaggctcttaagcacccaggatggtcaggtgctatgagcagcgagatggtagctctaagaaaaaatagaacctgggttgttgttcctccctcaagtgaccagaatttgattggaaacaaatgggtgtttagacacaagaaaaatgctgatggcagccatcaaagattcaaagaacgacttgtggccaagggctttcaccaacgacctagaattgactatggggagacgtttagtcctgtaatcaaggcagcaacagtgagagttattttgactatagcagtgaccaaaggatgggaaataaggcaactcgatgtgaataatgccttcttaaatagagtattagaagaagaggtgtttatggtacaaccacaaggttttgaagaaaaagggaaagaacaatacgtttgtaagttaaacaagtccttgtatggactaaaacaggaacctagggcctggttcgacaaactcaaatgctcactgctgaaatggggattcaagaattcaaggtttgacacttcattgtttttctgtaatatgcataactatgtcatttttgtgttgatttatgttgatgacataattgtcaccagcaacaactcaaacaaaatgattgagttcatctcggctctaaacaaagatttcactttgaaggatctagggcctctacactactttcttggcatagaggttcttagagatgcaaccggtctgtacttaaactcagactagatacatagaggagatctcgcaaagagtcaacatgttgaacattaaaccctgtcctacaccaatgactgttggcaagcctatgtctgccaaagatggagaaccgatgcacaatgttactctctacagaagtaccataggtgcttaacagtatctctgcaataccaggcctgatattgcttatgtcgttaataagctaagtcagtttttgcaagcaccaaccacagttcattggaatggagtaaaaagggttctcagatatctgcaaggaacgaagcaacagggtcttcacatcagcagtagcagcagacttgtgctaaacggattctctgatgctgactaggcctgttgcccagatgacagaagatcgattgcaggccactgtgtgttctttggagacagtcttgtctcgtggtcatccaagaaacagcatgttgtctcgaggtcaagtacagagtcggaatacagggctttggcccatgttgcacttgatatatcctggattgagtccctattgaaagaaattggttttcctctcacaatgacttctgtcacctggtgtgataacatgagtgcctctgctttggcctcaaatcctgtttttcatgcaaggaccaagcacattgaaattgatattcactatgtgagagacaaggttctgtagaagaagcttgaagttagatacatcctctcacatgatcaagttgtcgattgtctaaccaaggcactgtcacattccagatttactttccttgttgacaaacttggagttagaacatcacccttccgtttgagaggagatattgagaaataggcaaacatggaatggtgaagatgtgtcaactgtgagggtctacggttctgcagtgtactgcagctcactgaagcaaaggaagatttgattccctaaataattctgttaggtttttgtaccatgtgcaatcattggaaaagttggtaggactagaatattctcttggaattcattttatttgacagctgtaaaagagccgttggctcttctcttccttgtatctgtaatatccatattcactataaatagaatacagtagctcacgtttgaattgagctcattttcatcaaaacctttcctctgttattttaacttgcataggggctgagattgtagtcttaggtggcctgagtcttataaagaccaatgcctatatatagaggttgcaacctcatttagatcagctaggaatttgaaagtttggattatgagagaaagcctctcaaagagctattttgtataagtttttggtgattaataaaaacattctggtgaacgtaattagtagactatttctagtctgaaaagactatcatctgttatcaagagtttaggaaaatcacaatgaatcttctcagagtataaattctatccaaacagataccaattccctatagaaaataagaaaacatgataaaatagagtaccagagaacgataaatataaagggtctgacatggacacggacatgtttagaattagaactaagaagtggtagagttggattacaaccaattcagattgaaattaaccaaa

SEQ ID NO: 243374 - DNA, 2077 bp, Cannabis indica
tgaataatgaagaaaatctacaaatttgatcagtaattaccggaaattcaaatactatggaaatcgatgatgtttgagaaaaacactttaggtactcaaataaaagaatcaaaatttgaaagaaatcgtttataaaatcccagtgaattttttgaaagaatttcgtaataattatcgaaaacaagccaagaaagaccaacccaatgtgaaatggaagtgatatgggatggaggggagggcgaacctgaagttcgatgcaatcgtcgaactcgaagctatggttgtgttttggagcaagagcaaaggtgatctggagctgtgacgaagagaaactacttttccagtaagtgcctcgtgcgatgaatagagttagacaaagaaaatggtgtttaatgaggaagtacaaaaaagaaagagaaaaaaaaaggagattttttaattttttttttcaaaaaaaaaatgggaaattaaatggtaaatataagagattattagatattatattatagatgtgaatacttaaaatatactatttcggtaaataccaaataccaaatgagtatcgcttagaggaactaactattaccttttttaatgtttattgtagggtaactctttgaattaatatgagagcattttattctattttttgaaaaaaagacataattcattgaactaaatccgttgttacagaaaaactcaaaaatcgtggacaagcatccgtccaaacataatttcctaaactagcaatagaggttgacagtgtgtgggcaataccattcgccgaacgcggaacgacgatgcaagaaccaccaccaacagcagctaataaagaatagacatctaataaaataggcagaagactaaaattcatgtgaagcttattaattccaccaattgccactgtaaaatcactattaataatggagatacagaaaccatgttgatgcgcaagagacagacccaactgaatggcaagcaactctgccacattaacagagaaatcacctaacacaccagataaccacgccgcccaaaccacacctgtagcatcttgtatcactcccaccaaaccgacaaaacccccgcctggtaacactgaaacatcaatcgctagatcaaaggactcaggcggtggtggaattcatcgattaggttgatttacaggtgagtgtgcaaggctcaacctcaaatgaaggccccgcctaccgtattccctaaactccactaggtgataattggccaattctggaataacatctaatcgagattgcatgtgattgagtttcgatcatattaaagacactaaagagttgtcatcagtatagcaaaagcctcccgagatagcttatcaaagagaaaaatgagaatatcttgcattgatccatatacacctcgacaaagcaccgaccaccccaattgctaccacatagcggagtcaacccaacgcaggaaaaaagagcatgcttagaagtttcaagttccgttttgcattgtgaatagcaaaagatacctaaactttttaggagataagttgtgttgctactagtaatgccacaactacaaaaatggtattttgcttcaattttaagtgacatataaagaatttgtatcggtctgtgtaatcgacactataaccgtaaatgcaaatattcatatttttgtttcacttgataacaaacactaaaagattttttctttagttcataaccgacgcaaatagtaaacacttacgtaaattagttttttgtttcagttatgaaccgaagtaaaagaataaaaaaataaaaaataaatataaacttttaggccgtcacaatccttcggaccgccacaacaacccaacaacaataacaacaataaataccgccaccacagcaacccattgtaccaccaaaagcacatcgaaccaccaccatcccaccagaccaccaccactgcctgcaaaagaaattagagagagagagagagagatagagaactcgaacaaaagagagagaccagagctggagctgggcgcgtgagacggagaacaatgtaaaataatgaatctcaactttgaaaagtccattttttt

SEQ ID NO: 243375 - DNA, 1835 bp, Cannabis indica
aaaacgttaggagtataaatatgccaacctcttttctttgaggtaaacactgatatagagcatagacaagaattcttgttcatcgctgcatgcctttgttatagggcgtgacagtatcagaatgtggctttccactagcataaagttttccctatgtagtccacgtttaatattatagcccgaaattttttagggtcattggagagttttatgtagagggatccttccatcgaatttcataagtggagaggcctcaatgatggtcaagatcaattcaagacaatttatgtaatgaagtttgaggtgggagactctcttgtggggaagcattaggctatgattcacagtattaaagcgatctaggagttgcggattgtgggtgacaaagagacagacttcaaattggtccatcgcaattccgttctctaaattactttatgctttagataatatgtgctttggatttttagaaagctaaatttgattactcatgcccttgcacaattgggcctttctaactccgtttctggttttgttgatttttggagcttaatgaaatttttgaggtatttcaagcaaaaaaataaattgagatcatattgagttggtataacacttcgtgacaaagttagaaaattattttagataggccgaatatttacttcaaattatggtaaggacattagttttgttctaatggtaagcttttacaattattaataattaatgtgatagtgataaatagataattgtacaattatagttaatatttgggatgcacttgaatattatttttaataatatattttaatattaatttttaaatcaagtaaaagttattttctcaatcgtttttttcatctttctacacttataatcttcttctcactcagtgcatgtcttctccacttccaattccaattaaataagaatgtcatttcctcatctcatatttctataatctattttgtcaaactattattattattattattattaatttgttattgttattattattgtttataaaaattacagtaacaatgaatctttagctccacgagactctaaaaaacatgtaaattatctcaatctcccacaattaaagtttgaggtattttaattctttctttcaagacattaaacaaaggcaaacaaggtaaaccaaataagcatgctatcgaacaccatcaactaggacagaatatcgaacgggtttaataggtttcaggttcataagtttttgaataaaaaaatgcacccctacccgcttgttcatgtcacaggttcgactggtttcaagtttgtaggtttcgtattagcaccgtctacagtaaatgggttacgggcaggttcatatgtttttttaatattatatactaaatattatatatatattatttataatacatagtaatagttatatgtaagactcttcttttataggagtttgaaaaacaaccctatggatgggaatgtttttcaaccgatcttattgttagattttctgccaaaaaaaaaacctattttaatataatcagatttattaattaataaaagatcagaaatcattttatgttgcatggttcacaagatttattttatgattattttaattgataaattctattaagtgcaggacatatataaatatatatatatttgttcataattatagtgtcatcagcacaatggaatattatcatgattacatgttcaaaagtttatttccatgatttatcagtttatttgatttagactgacatgataatcggcgataaggtatacttacaccttggataagtgttatgacctttctagggtattggcaaagt

SEQ ID NO: 243376 - DNA, 3342 bp, Cannabis indica
ttcatatttaggatgttaattcaacatacttgttagtaaatctagatcctggtaaaatattcccaacaattagcacccaggttaacatattgtcaacctacgccatttccaacaacaattctaacaaagtcttccagacatattctcttatttcatcagcaattaggataaggtacttttgggaaaaaaaaaaggagccatctgatggccaaaacaaggacccagcccttaggttgaccgggtgctaggttccactgcctaagatgaaactttctcaacctgggccaattctaagcatttttactgagaagtctcctagaaatttttgtgtttccatcaataaccaagattaaagtgttctcgaaaaacaaatgaaaccatttgagggccaaaatagggacccaacacccaggttgacactggtgctaacccatgtgctcaggttgacattcaacctggtttccatgtttctactactcaaacacaattttttctccgaactttcttcttatcttagtccaaaatggggtaggagatgtcattcgtaatcttgaattccaaagaattatcaaaacaagtcccaggacgctcactaaggagcacccagtgcccaggttgacatgtaacctggtgcgttgggttttgcttatccaattacatttccatatcgaacatctgcctattttcttttatagtaaactaaagctacgatttttcacaagtcaaattcacattttatatttcaccttttcagcaatgtgtaatatctacaaaacagtcgtaaatcaggaacttttgagtcatccaatttcacgaaaaaagcaaaatctccaagaattggtgaacaatttcaccagagctaagacgttgactaagtgatgtcaaaagagcatttaggcatcaaaatatataagtgtaacatgttttcccactcatacagcgtcaacctgggcgctggatgtcaacttgggcaccagctgttaaacaaccttcactaaaatgaccataactcactcaatattgatctgattgatgcaattccaattgtgtttgaaatatcttttcaagatatttatagacatgtctcacatgcatatctcaactctgaagatataatgtcaaaatccccaagtcgtgtaatttttctttacaaaaagtttgaaaacaatccaacaggcacgattcgggcccaaaaattgacaatcatcatcctgaatcattttagccatttgatcattatcaatggtcaagatcatgttatgatttataccctaaaaagcctataaagaaatttctaattattaaataaaaagttgaaaattttgatatatgcatgaatattaaattattgaataatttatatgaaatattaaattccttataaaatatcgacagagtggccttgctagtggtgccttcgtgagccaaattttggcggagggccttctctcttctctccatggtccttgcaatcctagagagggaaatatcatcatccatatcaggagtatgcccacctctagggcaagtctcctttaccaccgaggcctcgtctgggcctctagacaggccctcatctccctcaaaactaattacaaaaacatcttttttattaggtaccctttctctttgtggtattccacctcttggctgtttttggtcaaaagatgaaattcttactgatagttggttgtattcacccatttttgcaataatagcttgttccacagcgggattaaccgcattttatatgtttcggatttatttacttatagaccatacctttgaaagttggcctcgcaagccaaccttaatatattcctcctatcgatggggaagggcaggatataataagctctatctcacatccggtgagtggggatggagcgtgtgtaagtcggcaccctctggaagtagtggcagacttgcgggatatcacatgcaatgaagtaattcctggtgtatcctccaacttttgacaaagctaagttgttggtgtcgcccaaccactattagcctatctggctgaagtaaaattatcctgtctaattctactttagaatagatttcagcatagagaatgagcattgtcgaaatgtatttttataccttttggggtgatctaagtcaggcacaccctgaagtatatggcaatatctctaaaataaggatgtaggggcaacactgctccctgctctatatggcgctctgatcatgccatcaagttgaaggccaatcgatgtgctcgttggtctctcaaaggcctatcgcatcggacatctcccaccagcacagtttccttgatcttgtcatgtgttagggttgtgataggggatggggcagagatccactagtttcgctgctctcctgatcaaggacttgaggctctgtagccttttctagaactcggtccactccgacctctgaaagatgatcgagctattcaaaggctacttggcctcatcattatgaacccagggggtgttgagaaaaacatagcaagtcttgtacatgttccttttgacaagcgcgacctcctcgatctcggttagccacgggcttggccacaggtgcctaagcctggccagcccctagctctctgtcatccagaggttgtgcaacctccttagcaatccctactctccctctggtggctagcctttcaatatgagggtcataaagtggtgctctgcaacatgtttgcttgacccgtggcataatgaaccaccactaatctcacgatcactcaaggagctgctaaaggaatgaaataaacactacccctcaaagggaagaccaactaaatattcgttgatgctattgtcacctcccctaatagtcactcgggatcatctgcacacaaaagataaggggagaaacctgatgttgtagaaaattttacatacgcaagtgcacacaatcgtaacaagtaataaagtgataaatcgagtatcgtatccacagggattaatgaaaattagaaattaatctataaaatgaatcactcacaaattagtttaaacaaaaaaaaaataaagtagtgagaatatataaaaattggcaaacacaaattttgagaagaaaataagctagaattattaaattggactaaaaatgcaatgttgataaaatggtgtaaatgagtattattgtaaattgatgatgtcaattaagaatttaaaatttcataatcacttctccaaagtatttatggtttgattctctagttaattaacatattcttatgcctaattaattttaagaacacaaattcaaacacaatttcttcatgtcatacatggtaaataacatattcctatgtcatttacaaatcacactttt

SEQ ID NO: 243377 - DNA, 1157 bp, Cannabis indica
atagacacttcgaaattctaaacttgattttgtatgctatcaattataattaaaatcataattatggttttgcagagcaaaacagaacccaacaagcaacatgtcaattatggtgtgaaattcatctaacttggcaagttgcttttttttataaagtactacaaatttgcctaaattcatattctcaacaagaattaatagttttgagttctaattagtttgtttatacattgtataaccacaccaacttcacacataatacaaaagaataaattgcagcaaaaccctaaagtataaaagtgttagcaatttacatatttcatccattttaggtgtgaagtgttatattaaactgtccaatatacatttagctgaacacaatgtacacatgacaccctaaagctaatgaagaggtcactgcccctgccttcctgtttacatgccttttaaggggtacgatggatataatgaagttgagcaacccatgactgcacgagggaaaattatgaaggagatgtggatctcttcgccttccgtcctcacatacaagaggctggtgaatttagatatgaacggtctcgttggggaggacgttgtggctttcttacctttcaacgaccaacttgctaacaatcttggtgagggcttttgtgcgtggtccggcccgcaagctcaataggtagctttgttgcgacttcacctgtacttccaaaggttgaaaaattattataacatttgtccgactcaattcacgccgaaggcaattaaatacctggcattgttttttgtactatacgcacaactgagatagggagagctttctcatcacgacacaaattggtttttcgacttgaagtctagtccatgacaaaatcgattgggctacttttatctctgttttgctgttgttcaattttgtgtcatgttatctatgtttactgtttatgttgtgtgctaattacaagtttaaaatgcaaattattcttcatattttaggcaaaaactcttatgctggaaactatagaacaaatatattgtccgtcaagttacaaccctctcttgagagagcaaaagcaacatttaagtttatatatagttttgttgattcataataataacaatcatcatagcaatttttgaaccaaaaaaacatgaat

SEQ ID NO: 243378 - DNA, 1626 bp, Cannabis indica
aacttatataatatacaattatcccaacacaaaatattacctatatatacacgtataaaatacggtatacgtacgtacgtatatctacacacatttatttatctatatatattgggtcgtttagagggtttttgcattgccagtagcccaaaagaataaaaatggaagccttagacgaattctcaactatagaacttattcgccaatatctcttagatgactttacttctactgaagacgcattcattgccactgtaacttctacttctacttctgaagattactcacctcaatttaccacttcttcttcttctccttcttcttcttcttaccaattccagtccgttaaacaagaatattcccaatctgaatctgagtcctattcccctgtttccgacgacaacccagatcaattcctcgacttaattatggaacccaaatccgaaaccgacccgctgctagcatcatcgccagaatcgtccaattcttcgcctcagaagactacgacgactgagtactcaggcgagagaaggcactacaggggagttcgacggaggccgtgggggaaattcgctgcggaaatacgcgacccgacccggaaaggaagccgggtttggctggggacgttcgacaccgacatggacgctgccaaagcttatgactgtgcggcattcaagctgagaggtcggaaggccattctgaattttcctctggaagccggacgatccgacccgccccagaatacgggtcggggcaggaataaaaggaagtcgggccaggaccaggaggctccggaacctgagactgagagtacaacgaaacgtcaagcacgaacgtaaaccggggaacgtgtaatgacgtggcgattaatgattggagatagtttatatatgatttgtgtatgacgtggcgggtaaaccggtttgacgacggccaagggtggaggcggtgagaaagagacgacgtcgttttactatttcgggcccagaaagaaaaggtggttgagtaatgagtggaaaatgtaggatggcacagccactcccaattacctttggggttgttttaatgtaaaaaatgaatgtggttattagtttaaaaattaattaacctgaacactcaacagaaatattgtaaattcaattagtattcggtttcggtgcaataatccatcttataagattttccatatctcatttattattattatttattatttgtgaagctgtggatttcttgttatccattactttaatttattaagatatatactcaacatagtaagtttgaaaccgaaggaaatcaggaacagtatcccaggcttcaataaattaaacaagaaaatcaaataagcccttccagtggatttcttttgagaagtgacgtcttctattacgaatttggtaggccatatacatacatttgtgttttttttttttcttttttgagaaaaatatatgggaaaatattagtaggaacaatatttttattttgtctatattggtatatgcatctttatttttattcataattcaaattttatatacataatatagtttctccaaatgaatttttttttgaataattatcctttttacccctgtacttatgacactatactattatgcc

SEQ ID NO: 243379 - DNA, 1678 bp, Cannabis indica
atcaacatacacaagtaatagaatttgcttgtcaccagatcctgaaaagaactgtgagttatttgatcgagaacaggtaaaacctttactaccaagtgttgatttgagtttttcattccaagctctaggagcttgtttaaggccataaatggttttgttcaatttgcacacatgtgtagggtactcaggattaataaaactaggtggttgattcataaaggttgattctttgagtgtgccattgagaaatgcattggagacatcaagctgagtgatgtcccaattgtgtaaaatagccaaggtcagcagtgtcctcacagtagttggcttaactacaagactaaaagtttctatgtagtctatccctagagtttaagaatacccttttgccactagtctcaatttgaatttgtctattgagccatcatgtaatatcccgaaaaattattatgataattaattgggtatattttattaaatatgtaatagaattaatgttggggtaagattatgatcttacttaggctaattgtgtgataattagagaaaatttaatatgtgaataaataaagcgtaatttattaattacggagattttattagatttagtgggtatagtagatgccatttttgaaataaaatattttcaggcccggcgacgtgggaactcgacggagtggtcaaagatgtcacggcaaaataaaatggattgagttggaaatatactggactagtttagagttctaagttattgatttggcgggattagctagaaaagaccaatatgccctaggttattctatagcttaagttttaggaagaggggtaaaaaccctaatttgtttttatgtggttttctagtaggtgtgggctgattaataacttgggttttatttatgttccttaaatttcaatcagtttttagaaagtttgatcaagaattgaagctctctaagttgaggggtaagttctatagcttttcttaattgtttttcttgatgtatgaattgagttttgggttaggttttatagatttcaggactgtggtgttaaattaattttagaatgtgtttataggattgaatcagggaatccttgtgcatgggttatgtgattgttgtggctgttagaattagagttggaattttggtttaagaacttgatttttggttctaacatggtgttttgcataatttgatgaattgtagtgaattgatgatttgaataccttatttttatgttattaaactgttctgtgaagtttgagaacaatttgttaggtttggagcaagttttgggactttaaagatctgaaatttttgagtttctggtgtgtgaaccggaattctggatggtcaatttttaggaatcgctgatttttgtattttagccataacttttcactcgggtgtccgttttagacattctatataccgtttcaaagcttatgaagagctctacagtatgagtcatagattagagccaaaagatgtattttattttagggtattttcaccataagattcgatagcaaaccttaggttattttatacgggttttagacagtgtttgggaatagagccttattgatttacctttgtcgtgacattggaaccaagatcgtcgagcatcattccactcaggccagctcgcatacctgactttggacttgaggtaa

SEQ ID NO: 243380 - DNA, 4257 bp, Cannabis indica
aaatatatttttataattttaaatttatataaacttacttttataattaaaaattatagaccataaaattataaataagatatttttgaaaatttcttcttatttaatataagtttttttctcaactattttttaatacaattatttttatctacaacatattatttaaagtttcacaatgtaaattattttgaagttctccaacatagaacttctaaataaaaattttctaagctaatgagaatattttgttgaaaagatttataaatttaagtagaaagaaaaattatataaaaaaacactcaatccaaccaaatttttcaaagttattctctgtacttttatttttccaacaatttttttcctgaccaaaattcaacttttaagcatagctttaatttgaaaaaaatatgagaaaataatggctgagtaaggttaaagaaatgttctactttttaacgggcttgtcttagaatgtggtccatcacataaccatgaaaaaccaaacaaaagcaatgagccaattaaccaaaaccttagatgtgagaagagctttcattgtttatgtacacacagaaaattgatttcccaatcaaatctcaatggcttgattcaatccatgagattttgatcatttatgaagttcaactacatcaataagacagcagatgtaacaacaaactcgaaatacaatgcatactcatcagaacgaaacgagagatttcggatggggtgaagattgtaactgagaaagggctgtatcactttcatcattctcatcaaaatttataggctttccttgaattggctgcctgcatatcaatcaaaaaagataattaaatttgtatatacgtactaaatactgatatagaaaataactaacgtaattagaaatggcccattgatgatgattcaacaaatacgtatcttccaaatatcataggcatggtaatttttaaatataaagtgatgagcatccaaattcatacctctgggagatgatactttcttcagacaatgccttttctaacctctcttcaaaaggtgttgcatgccaactgaccttctgatcctgaaatcatagcaattggtagttttgttgttgataattattactatcaagattagatgaaagtgagaaacaatgaaaatggaaaagtatgatatacctccttgtacttattggttgaatttggaattccattcccatcccaccatttgggtgagatacgagcaggatcatcctcattccaatgagcagcaaccatcccaataataggtctgtccataggggttctagctcctcgaggacgggcaggaccaacaaagttgttattgttgctgtcctgagtcgatggaattggcttcaaccaggttgacagactagcttctgggtttagctccaccgacaaagtttccttgattgactctttggacttaggcgacgcattttcaggctgatcaagagattttcttaactcacctgaaatttggtcaaagttaggatcctcttccttcaatgcattccactgggagacattttcaactgggttcaaaactggatacacatattgcgacctaactcgaatcttcccatttggaaaagtatccatgtttgaaggaaaaacagttccaggcgtttgcatctcatcagaaatctttagaggggttggatagggtgagcgctttgatatgctctgattacctggtgattcagctctcttaaaattctggcgaccattttcagatgacgaacccccagaagaagataaatctgaatcacattcaaaacgcacagatttgttcctgcgttgaacatttgtggctgaaagttgaggtgtttctaaagttgtcacatgttcagtctgataagcatggctagtagcttctgtgtaactaccacctgcgccattgccttcagtagagcctactgagactattcccgagttctgaacatttgatacacaactaaggaaaagacaagacaaaaatacaaagatcaaatatcatatcttttcttctaaatgctgctaaccgtgacaaagagaaaataaattagaaaaccccgactatgaaacaacattagaaccagttgacaagaatgtcacaaaatcagaattttcagcacaatttttaaatttctacctgctaggtgtacactccaaagaacctgaggcatgagccctctcttcagagagtttaactggagtagagggttggtcaatttgattttccaactgaagtttctcaatggatgtattgggaagccatgaatggaatttcgaagtctctgaatctccatcctgaagaggtgagctgttccacttggaagaagctttgcgaatttcaataggagtctgtgctaaggtaccacacgctttaagaaacttggcctgaaaaaaagagcccatcaaaacaagggatgacctttaaagaagaatgtcaaactacaatctagatagccaaaagatcacccaaaaagactagctttagactgcaaagctcttttaaaattcaatttaaaagagaaagagaaaatcataaaagcatgtccactttcagccagtgcaacagaaaataggtacactgacagccaaagtaaccttttactagctctttataatcactattatgcttagttaaatctactaaaatactagactttcagcatgataaaagactaactttactttcactttcataaagcaacaaaaacaaattaagacccaacataatctttaatcacacgactgtcaacaaattgtgtcaacaatctgaaccaactatgatactatgaagtctataattgtgcattcaaattgaatcaacatctaggagaagaggtgaaatgttcaaatcataagcatacctcgtccttaagagccttatcaatttctggagtaccagcactactaccgcccctattcttacaaggagaatcttgtttatcttcaaattaaacacacacaacggtcagccatggttaacattggattttacaatataaaattaaagctcatttaagtgtagaaggacataccttcggacataaacagagacgaaagtcgattttgagaaactacaacctcctgatcatcacacatgaaaaaacacaaaataaaattagaaacatcgttaaattcatcacaattcgcaaatcaaacttttttctttttcctcgaaagaattagcttcttgtacataactaaattttctcagcaaccaaacaaaaacgaaatcacacacacatacacacaccgttagtttgggatgagaagattcagaaacaagatgaggctgtgacctctgacgatgatgattgtggctttggcgatcgtccctgaccctaaagcaagcgatgaaacaacccatggctccggcaatcgacctgtctaggtatcccaaaactgatctgcaaacaagccttaggtcacgattcaacagcgagcatatcatgggaaaaaaaaattaacggattagggaaaatgaaaccctaatttttctttcttttctgaaaaagggttttaattggtgaatttttttggggtttttgaggggactctctactgggacacacagagaaggagtcgttgagtggtattattcgaaatttgaactactaaaacgagggaagcgagctgtacgtctatggcgaaatgttgttcctaaacttcgcggtgtatgttaagagatgtactcgtgcgatggggttatgccacgtcagctattgatggtgcttttagtaatttggtttaaaaggaaggggttttagaaggaaaatgggtttaattgattggacagtgtaacgtctcatatgactatttgaattctctcgggtaataaatcttaggaatataaaagttagataaagaaaaaaaaaagaggaaatctcgttgaattgtaattattgaaatggaataatggagtaatattaattaattaatttggagataattttttgaccttaaatttggacatgaaataaatgattatttttttatggcagttaaaaattttacatttttagatttaaaattttttatgtaattttattcaattttactaatgggatgattatatatgtactaaatttgatatctatgtattaaattatgtcttcttaactttaatatgttaaatatttttacggacaaaaatccttaaattcaacaatctcaataatttatgagatatttttaagtgttttaaaaattcaaaaaatataatttagtacttagaattaaggggtcaaaatat

SEQ ID NO: 243381 - DNA, 1449 bp, Cannabis indica
ccgtctctctttatttctgagaccgctctttgttttctttttcctcttttgtttttataagggaaaccaaattaagcaacattaattactataatctaagagtatatttgggctgcaaagtggaccaagcttatacgtacaagtccaaatctaagagtatcttctttctcttattggtaagaataagacaagtgtgaaaatatactttttttttttcttttgaaaatcgtataataaaacatatatcattgttcacacattgtttgaccgagttatagtattttatttataaagctatttttatagctaacataacagatattgcaagagacactagaattttatttaatgatatgtaggtgcttaagggtgctgctttgacacaacccaaggcaaaacctatccatgctatatataataggagaaagaaacatcaaaatgtgaactaaacaatttgtttataaatattttcgaaaaataacaaattactttccctaatattctattttatatgctcttcttttcatgattcaatattttaatatatcaccagaaaagtaaatacaacaattgtgattctcaaggacaaattgcgtctttgtaaaaagccattttgcaaccaaatgtaaaaactaataaactctttatgaaattgtgtctcagtgtcattgttgtactttgaaaacaatagattttgatgtttggctactttaaaaaaaaaaaaggcaaaagaaaaaataagtacagcctttctctaccacaaccaaaattttgtacatgatattattacagatgatattattacatatagaaagaaaaaaaaaaaacccaaacaaacataaggaataaaagacaacaaagtgaaaatgcatataaaatgaagaatgaataatctggtttatatatttttcctatccagatatggttgagttctattaaaggctgcaaagcgtttatcctgtgctatcttggcatgaacttcatctctttcactgaaatacctttcaaaggccctgggcagaaatcttggaattagaaagacaaacagatttatggcaaagtaccccaaattcaccactgctaagcttctcccaaaccagaaccagcccacatcctgacccaccaaaatcacatatatcaattcaacatcttttatctattgtattcatgcatgttaccatggtaaaacctaaggtaacggattataaaatatctccatgtacaatatttttcatatcaaaaaaggcatatgtgataagcctgacaattttaattataatgtataacagaacctttaagttgttagaagggtacatcatgaggtgaggtaacatttttgtgcggattgagtataaaacccaattcacttattataatttgttgtagtgcgtcagactgttagagaataggttttgtctatgcttgttttagttacaactcttgtactgt

SEQ ID NO: 243382 - DNA, 3110 bp, Cannabis indica
ttaggggtttaaccattgttggatgggtagctgttctcctgggtatcttttcaatccttccttttgtggtcatgggagttatagggatcccaaagttggagccttcaagatggttggaggtagatctacacaatgtgaattggaacttgtatctcaacactctgttttggaaccttaattattgggattcaataagtacacttgcaggcgaagtacataacccaaagaaaactctgccgaaggctttgttttatgctttgatcttggtagttgttgcctacttcttccccctcttgatcggtactggggctgttccggttgatcgtcatttatggactgatgggtacttctcggatattgctaaaatcattgggggagtttggcttagatggtggatccagggggctgcagcaatgtcaaatatggggatgtttgtcgctgaaatgagcagtgactcgtttcaacttttaggaatggcagaaagagggatgctgcctgagttctttgcccatagatctcgttatggaaccccactggttggcatattgttctcagcttctggggtgctattgttatcctggatgagctttcaagagattgtagctgcagaaaacttcttgtactgctttggaatgattttggagttcatagcgtttattttgataagaattaaacacccagctgcatcccgtcctttcaagataccagtgggaactgttggagccattcttatgtgtgtccctccaaccattttaatatgtgttgtgttggttctttcttctgtcaaggtgatgttggtgagcctaggcgctatagctataggctttatgattgagccctgtctcaaacatactgagaaaaagggatggcttaagttctccaccagcactgatctgccagatcttaatgttgctcgtcaagaaagtgacgccataatagatgaccaagttcttagaccatgaaaatgtgaaaccccaacactactttggtgttactactaccttcgtgaagcgatctacaacagcttttctttaagtgatcaagctagtaaacaagtacggagttacatgtctgtattataaagctgttggtcgtcttagtatttagaatgatgataaacctgtttgtcatcttagtttttagattgatgataaatagaaatgtttgtgaaacctttaaaaatcaggcactaggataccatggtgatggtgtagcgttgtgaacttggttttagtggagtggtgatttgccttaggtcaaatcaaatacatatatgtacattagacttcataactggcacagatctgtaatgtgtaaccttttgttatggttgttattcatggaagagctttaatgcagctaagtaactgttcctttctctattactagttcaagtttataagcaacttcttcctaaattggattattatgacttcctaaacatactacctgtgattcttaccctcgcaaaagttttgcgtttttctgaagtgtaacaactatacatgaacttgttcattaatttagttatatgtatttaaatgtccacaaaatttgtttattttcccaggatatgcaaaagtgaaagttcttgcagtaagattggtgtaaattttgtcctaaatatggcataaacaaacaaggtaacagtatattggactcaattttacaattgtactcaaaaaatatcaataaagacattatttctatgaaaaaaatacacgttaggaggctttcaattaataaacagtatttatatagttacaaaaaggtaaatttctcaaacaaaaaaaaagttgaatagaaatggtaaatatcagtctgtcttcttttattctctttacagcaatgaatgtgttttatacttgtagagtactttttctatttccagaatgcataaggaaaaggggtcaaatggtagtggctatgcttattgactatatgctgcatagtcatcagttaaaaattatcacttgtctactggaatgataagaattataaaaaaggtattcaatgaaacgatttttgattaaagttatacatcagttgagctagtatctgatactactaatacacattttttaatgtggaagagattagataacaaatacatctggctctccgctcatgaatcgtgttcctcaagacattggatacatacatcacactctagtttgctttaaggaatcaaacaaaactgtaaaaaccatgagataacaagaaattgtaaaacaatttacaatttcattaaaggtatgtggaaaattacgactaaggctgcaaaattaaattaactaagctttaaagaatcaaacaattagtaatgacaagatttacaaaaattaaaccgagaaatcggagaaaaatagagcaaacaaagtatataatttcaggaacaataaatgcagaaaataaaaaaattaacaccaagatatatattgattcaagtccaataaatcgatgtaatctatggctctactgcagttctcgaacaccaccaaaatcctctttattgatttagtaagaataagtacaatgcagttgagacgagattctctgttgagttctcactaagtgttttaactctcacacttactcctaagaattttcttcatcaacaaaagattcttcatacaaaactcaaacccaatctctctcttttcttagcatatctctctctacctctcaatcttttctctctcaaactctcaaactcatctgaactgagttctcaatctcgtgttacgaaaatagcagctcaagatggtatttataggctacggatcaacatcctaaagtcggtggctgcaagaaacgagattgataagttagttagaaataactaacttaactaactcctctttgagcgaagtctccccgccagcttaagtatcagagcctctaagaacatatatgagcttccggactcacggactacggacatacgttgatgacgcttttggataggattgagccagctgaagttgactatctggaactaccattccaggagggacaactagccaactagaactccatcccagagtgaggctagctatcttgaagactgaacacaagtggacatgatagtcattgttgggttttatgcc

SEQ ID NO: 243383 - DNA, 4771 bp, Cannabis indica
gggggctggactggtgtcggctgcagcaagaagaaaatctgctgcgtttttcagcaagggagaaggaaggaagaagaagaggcttggctgggtttggtctgctgttcaaagaaaagcttgatgttcaaagaaaatagaagaaggagaggagaagaataatagggtcggctggttgtgtgtgaagagtgaataatgttttctagggttttgaaaaagaaaagattgcttttatattaaataaatgcaatagggtttttgaaaagataaaatctgatttgaaaagtggcatattcggtttttggggaaagcatattcccttgagatccgcataaaaccaaaagtcagttttgcccttaatttgtggctgttggggtgttgggtgtaggggtagtttcggcatttcagggctgccagctatttcctacaacaatgtaaattattgttataaaatcttgagaaccttttatgattctgtattcgaactgctctagaacagtactctagagtgcatggtgactgtatagacttgagtatggcacaaagtgtagtgaggattatcaagcacctttcttttaaaaaggttaaaagaggtcgaaggatatgtttcaaggctttccaaatgatggttttcctgcgacaagtaaagattgtctctttagataggtttaattcgaaccactaatgtcttccaccactcgttagggactcacatgtcccaatgttgtcaatgtgatcaaatgtgaacatagacattcaaaaagtaggaccaaaggcctatcccacgagtacaacatcgaagagcccgcgagttcatgtgttggaatatgaaaggataagtcgcagcttatcaactcgcatacgatactgcaattaagtcaagaacggatgaaatcgttcttcatttatcctttaaatatttattttaattaaatactatcatttattgtaaaaataattttaaaccaatcagttatgtaatcctaaacgacactttctttatatataaaggggtgatctaaatcaaataaactaagctgaaatcatttttaaaagtggactaataagcaaaccaagctctgattgaactactataattctcttattttctctttatttctacttttgtttttgtatatttagtagccgatattttcagtacgtgctattctaagtgagcactcgcataactgctagtgagtacttcaactttgtttgcatactcgcatatttggtattgtctaaattcttccgacaacacattttattcagagtttttttgcaaaaattagtaaatttaatttttatttttataattatatgggatatgtatagatattttttgaatgctattatgtaaaaaaaataactaaaaaataatttttaaaaataacagtaatttgtaaatttaattaataaatatcactttatattgtgcacaaatttcaaaaatactacacataataaaatactagtgttgaaaaatacaataaactactactaatcaatgataataaatcaaatgaagcaaatgatcgacttaactactgttgtcgaagcagtaagacatgttgttcctcagaaatcaaaatatttgaataggccgctaaactctcaaattaaaaaattaacattaattaaaagagaagtactttcatatgtttgtatttatagtaaagatgagtatacatttacattttgttttatgagttcaatgggagtttgtatagagatatatatattgaataatgatgatactcatctctttcattgatattctaacatatatatatacattacaaaactgaaggaaccaatttacacctaaagaatcgtacaagcaaatgtctagaccaaaagaatagcacaacactgttttgtaaataatgagtcaaacagaatatatacaaagaattagtcaaaggaaaagataattaaatatatatatatatatatattattttaatactctattatgcccctcaagttggagctccgtgaggtaagtccaatcttggtcagtaagtcatgaaaccgactgcgggataacggtttggtaagtgcatccgctagttgatctgtcgaagagacgtgagtgacgcgtaagatgccatcttgaacctgttcacgaatgaagtgaaaatcaagagccacatgtttcatgcgagaatggaagacggggttggagcagagatttgttgcacccacattatcacaatagatgaccggttgttgtgtggatgtaatgccaagctcactaaggagagatgttatccatcgtacctcagcagctgtcgaagcaacagatcggtactcagcttcagtcgaggagcgagcaactgtccgttgtttctttgaactccaggagatgggatttttcccgaggtagacaatataagcactagtggaggtgaaatcatctttgttactagcccagtcagcatcagagtaagcatgaagagtgagaggtgatttgcgatgaaacatgatgccatgatcaatggtgtcgcacagatatcgaagtaatcgcttgacagcattaaaatgtttggtagtcggacgatgcatgtattgtgacaatttgttgactacatatgcaacatcggggcgagtaagtgagagatactgaaggctaccaactacagctcggaattctgttggatcagtaagtgatgtcccagagtgaagagtaaggacgggagaagtggcaagtggagttgcaactggtcgagcatcaatcatcttagttcgagccaacaactcagcaatgtattttcgttgtgaaagaagaagtccttgaggatgaggaacaacttcaacacccaggaagtaatgaagactaccgagatctttgagtgagaaacgctgagcaagggcggagatgaaggcttgtacggatgctgcattattacctgtgacaattatgtcgtcaacataaacaagtaacatgatagtgataccattgttattaagaatgaacaaagaggtgtcagcgacagagtttgaaaaatgagatgcaagtaggaacttgcgaagttcattgtaccaagctctgggagcttgtttgagaccatatatcgcctttcgcaatttgcagacatagtgtggattgtcagcatcaacaaaaccttaaggttgggtcatgaaaacatcttcagtgagtgtgccttggagaaaggcattgtttacatcgagttgacgaagttcccacccttgactgaccgcaagagaaagaatgatacgaattgttgtcggcttgacaactgggctaaatgtctcatgatagtctagttcaggtcttggtgaaagcctttggccactaagcgagccttgtacctatcaatggaaccatcaggtaaacgtttgattcgaaaaatccatttacaccccacaacattttgcacaccgctgggaggtaccagttcccaagtgccattacgaaccaatgcatcaaattcagcagacatagcatgtctccatctatgatctttgatggcctgagttacacatgtgggctcaatttctaaagtaagtttggctgagaggctgagcttggtgagtggtttatagatgttatttcgggaacgggtgactataggggagggtcgaaccaagggtggaagcgatggtatttctgatgcttggttaataacaggtgaagacgtttgaggagcatgttcaggcgttggagtgggtaataggggaggtagggcattgggaggagtagctaggttttgtaaaggaaatgagagggcgagaggcaattcttgttgatctaccattgtcgtttgtgtgttggagtcaactggaaaagagccgccggaactaccttcagatgatgtgtatgaagctgggagaataacatgctgaggtagccatctatcatatgtggagtcgtcaggacgatcaagatggggatcaattttggacatgggaaactcagtttctacaaatcgaacatgacgtgagatgtagatttttgagtacttggatcaagacacacataagcactttgagtgagtgaataaccaagaaagacacaaggtgtggaacgaggggcaagtttgtagggagagtatggacgaagccaaggatagcacaaacaaccaaaagcacgaagcttagaataattaggtggtgactcaaagagtttgtgataaggagagatcatatggagaatgggtgttggaaggcgatttatgagataaacagcagtggagaacgcatatgaccagaatgtgagtggtagggaagctctagagagaagagaaagacctgtctcaacaatatgacggtgtcgacgttcggagaagccattatgttctcgtgtgtgaggtggtgacgtaaggtgtgaaatcccatgagtggataagtatgtcgcaagaccagtggatttggtgagacccatgtattccccctcattgtcagaataaaatgtgattattttctgtttgaaaaagttttcaacaagagcttggaaatgaggaaaaatagtggcaacatcagacttttgtttgaggggataaagccatatataatgggtaaagtgatccacaaaaatgacatagtatttatacccatcaacagaatatatacgtgaagtccacacatcagaataaataatttgaagaggagaagtagacacaatagatgattgagaaaaaggtaatttatgacttttattgcaaaaacagtctttacagtgaaaattcttggaactacaaaaacctagagataaaccaaacttagagatgatatgacgttggattgactc

SEQ ID NO: 243384 - DNA, 4561 bp, Cannabis indica
gttaagaaaaatgaattaattctgattaatgttttttacctttgcttcaaatatggattctagtttgtagcattccgtgcacaaatttgcattgttgatttggtatgctggggatgacctaggacaggaaaccaggaaattttcatgattatttagttgagtggatgcatgctctctccccttttgttatattttgattttgttatttgctggtgatatttaaatgttatctttttcatgtattgatttggaatttgtattcttgaaaagctggatgctctgatgggagttgcattatatgggattttgagacaagaggcattgccaaggagctaaaggataaagattgcagtgctgccattacaagtgtatgttggtcaaaatacggtcatcgtattcttgtatctgctgctgataagtcgttgacactatgggatgttgttagtggcgagaagataacacgtacaactctgcagcagacccctctacaagctcgtctgcatcctggttcttctactccatccctttgtttggcgtgtcccctttcttctgctccaatgattgttgatttgaatacaggaaacacaactgtgcttccagtttctgtttctgacaatagcaatggagctgctcctccaccaaagaattaaattttctgatggaaccacccccgttcactcccactgctgcttgttttaacaagtatgggatgtggtttacgtggggaattccaaaggtgaaatacttgtggtagattataaaagtgcccaagtgcgtgctatggttcctacttctgggggtgctgtcattaagaacataattttcagcagaaatggacatatctgcttacaaattcaaatgatagaacaattagaatctatgaaaaccttctccattaaaagatggacttaaagcccttgatggcctaagtgagaccatagaggaggaagatctggttgagaaattaaagagggttggttcaaattgcttaacacttttccgggagtttcaagattccatcacaaagatgcactggaaagcgccttgtttcagtggtgatggtgagtgggtgattggtggctctgcaagcaaaggagagcacaagatttacatatgggatagagccgggcatcttgttaaaatccttgaagggccaaaggaggccttgattgatttagcatggcatcctgttcaccctattattgtctccgtttccttgacgggcctggtttatatatgggccaaagactataccgagaactggagtgcatttgctcctgattttaaagagcttgaggaaaatgaggaatatgttgaacgagaagacgaatttgatctgattcctgaaactgagaaggtgagaataaattaaccttttacgtttttttatagttaatgttctaggacctgtaagtcacatatattctttgcaggtgaaagagtctgatgccaatgaagatgatgacgttgatattgtcacagtggagaaagattcagctttcagtgattcagatatgtcactagaggaattgtgctttttgcctgcaattccttctcctgatgttcctgagcagccagagaagtgcttagagagcttgtctaagttagtggacagtaataattctggatcccctctttcagaagatggtgagccaaatggaggagcaatgaatcatgcatcaagtccacttgaaggtacaatatacataaaaatattttaatgcatattttcagtaaaatggtctttagattatatactcgctggttcacttatggaagtttgtctggccttgattattggcttgtatagtctgaattccaaactcaaactaaaatcatatccttcacactgttactgtatgctaaattaagatacctttagctaaataaacacaaactacatggaaagagaaaaataatgaagggtggtattaatagtcctggcccattgacatagacatggcttttgttgtggtgcccctctaactctgtcctggatatgctgctttgtcttcattttaatggcgtagtgtttatttaaatgaaagtaaataattgttttgcagaggatgctggggaaacacgcttaaaaagaaaaaggaaaccttcagagaagggattggagctgcaggcagagaaggttaggaaacctttgaaatcttccggtagatcgtcaaaacctaaaaataaatctgtagttgatgaggatactagtaatggatttaatggagatgatgtttctgatgagtatcattagattctaattcttacatgattttcttttgtggtccaaaaatttccatcccttttgggtgatttaacttactagtctcttgcacttttatttaattttgcacggtcagcttggcgaatattgtactctcatgggattcatgcatggtcagaattcaaattgagaaaattatagattatagattaaaatttgtttaggatgtcttatcaaatgtagtcaatatatcttcttacatcttcaaaaattctattttatcacccaaccaggtccgttttccttgtatagatctgcaaattgctcaagtctttcaaacaatgatttctctatcattcaactttcactagaaatggaacttcctagagacttgttcatccacttctttgcttgcaaattttgaattttttccatccaaggattcctgctaaattgggaaagccatcgttctagggattacatttttgtctagagaaatgtttacctgttgataccttaactatgactaattgaatttgaggattgggtagaatacgttagaagtcgggtttcggttaggttatgagtacatttggacccaaccctactactctattataatcatacatatttttagttatttcataagtacattttctttcaaacatttaaatttatttcataaactacattataaaaaaattacttttatttctaaatttaattattatcttagtatatacaatatgactatcattaaattatatgtaaaataaactttataattagtgaaaacatgtaactatatatatactaataccttaggtattagaatgattagatggaaaggttctagtaagattatttatgtcttcctttatagttatatttctcgattgttattaagtgaggctgtctaataattttggttagggtcactcatggacatgtgacccgtctcaatttttttttgtgaaaaaatatactactacattagtatttaaattttataatacaaatatattcttatactgttatactttatgttgcatggagttaacacataatctaaacttataaaattaattaaacacacactactaacataattaaactttttatcaatataaattataagtacacttaatcctgtacctggtgtagtaatttttgtaagataccaactagaaataatagggcagtatcgtggaataggcatacacaaactctatcttttgccatccctactacatcttccaaggatccaaccatgaaaggaacaagttgcataattttcacacaaggatgcaatggccttccaagggcaccaatgtgccaattctcacccctaatcccatcaattctcattaagatcaattttgtttttgatcacccaccccaaactatagtgtaccaccttcttttggaaaaagccttaaccacttcattagaagagagttgttcctctattttagaatgacatttctaaaaccccttgacatttagggcgaccgaaggaaccatgtgactccatttttaacttgcttatttgcccttgtacatcaatgtagtctagaggagaatggcaacaaaatcatcatttagggtcaaattagtcattttcgtatcatctgctcctagaagtggtgttgtccaattatttttaataagaaactgagagtataataggtagaggaaatccaatagatttacaatgtcaatagatgataaaatataactatgttagacactaggattagtaggatgtggaaggatgtagcaaataaaaacgggtatgactcattgtattgaggagagtttgagtagtaagtaggatggcataaataagttagcaagggaacagagtgggtatgcaagaattaagatcaatgtctttgcatcactgtcgtcccaaggggccattagtgtaatagtttttcccttgcttcagtatacaatttctactcagtttactccattgttctattatttgtttggaattatactttgcttaaatacttaaatagttaacgatcaattagaaacaagaatgcaaaatccttagttctaaagatctaaaccacccaaaatgtaatacactcccaaagttgaaagttgatacccaattcaaaatcttgaaagattttcttatttatttatttcttcttcttttttgaaaaagtaacaaaggtcacacatgtccatgagtgacctcctccaaagtttattaagaaccctcccctgtgacggggaaaaacatgaaatttggggaaacagaaaaataaagaaacacatactctaattttacaatctaaaacacaattaatacaaaaa

SEQ ID NO: 243385 - DNA, 3030 bp, Cannabis indica
ccttggagcaaattttcaaggcccaatataatgagtaaggtgagcttgagcccaatatggcccatcgaaaccaaagaaccaagttgggtaccatgccatttaaatgaaaaaataaacaatttgaattataattgaattattattacatttggggttttgttttggaacattactgggtcttgatttgaaatctgaaatggcccaaaagtttgtaatggctattttcaaaactaaataaatcatgctagttgtacaaactattttaaattttgctatttttggtagaacattgttattgaccactagtaatgtcccataattggttagtgatattattctttaaaagctattatcttaagttatgtgaaactcaatatttaagtacaccaataacagtatgatagggtgtcaagcatcaataacactttttaacaattctcgtttataaataaaaaattcaataccttagtcaccgaaactagtaaacatttggaattatttttgtttttaaagccacttgtaacttcttaccaaaaaaatgccattaataacttatttattaccaatggaattgaattttagtaactatttaattcatagctattaaatttaaaatgttagtaactagttttaccactttgaaactactgattagaatagttttagtctcttttctaaaatatcaacctaaaaagtaaaaatatgtcatgctttgtagatcactttattaatcattgtgtaaatattttttaaaaatatttatgaatataattttcataaaaataatatcaaaattagacaaacattaacaaacgctaatttttcccttattagaaaaagtgaatggattcgtggtaaacaaaatttatattggtaatttaataatactattattattagtattactcctaacactttattaattactttctaacaacaaaccttacctaccaatttttattattattttctttaatcttgataaagctttacctaccaatttaccaccaataatagtcttttttttttggtatgccatttttaggatgaaaattccttttttttttttctacatcaaaataacattttcccacctaatttttcttgtcccacttgtaaattcatccaaattaaaaggtctatttaatttctatgttttggaaaatttatattttaattattacgtgccgtcctagctatatatacatatttatatacgatgtaatagaaaactattgtacctattttctctcaataatttttactttacatatattccaattttataaatattcttctcaatttggaccattgatttatatcacatccaactttaaaatttgtgatatataaaagagccaatctttaatttataattatctttaggatatttgcttcaataatatatactgatttttttttaaaaaaaataaataatatatactgaaattgttttattaataattgtgttttaataaattttgtttcttctactctatttgccaaacatgcaactttaaaattgcatatatatatatatatttattaaaaaaaaaaaagataaccttatttatatataaaacacatacccatgaacataagccatgcaaattaattaatataattacctaattaattacaaaaacagtagtaaaaagtagttatatagagaaagcaaagtttagttgaggttttaattaattaattaattaattagataagattagaaaccaattaacaaggaacaaataataatcatattgaaaatgttttttttttattatttaatcacctttaatttgtaatgttataaaacatgtaataattaatttaaaaaataattaagaggtgtagtgggtgggtgtgtcacacactattgattgggttaggccatctgtatttttaggtttggcatttatattttgagacacatcttagtgtcattgggcattgaccacgacatctaccaagttttaaaccttgtaataatctaaaataatataccttttaatgatttttaattgattaatatcggctatttaataatactatttgaaatataacttttacggtactaacatggttattttattacattttataataagtgatacataataattgataaatggatcaagatcaaacttgaattttagagggtcatagaaaaaaaaaataatttaggttcttattttaaaaaaaaaatgtggtattttcaaaattaataaaaaatatgtgtatttttagaaatagaaaaaataatttatatttatttttttaagttttttaagattattaaagtacgtaagattaaatactattttagattatgtattttacaaaagttagaaattggatcatctgacttgttaaatgacaaaatgtaccatgtattttccaaaatggtacaaatatgatattgaattgattttttctcaaaataaaacttaataatccgacctagatgtattatgacaaaactaattaaattttttgtatctgttcgtgttaagaattatcttgaagttcgttatatttaaaaaaaattatcgaaaattaagcttagtatcctatttatacaattttaaaaaatacaagatatattttatcatttaacaaaaataaaaggtccaatttataattttagtaaaatacatggtctaaatggtatttaactttaaagtaaaaaaagtaaaagatatttgatttattattcactgtgttactcgttttacaataaaattctaaaattaaatagaatgtaattgaaaaattattttactgtaaaagttatatttcaaaaatattattaccaatattatactataaaggacacaatgtaataatataaaaatttttgagataaaaatactaaatattctattaatatatatgacactttttttactttttctttttttagtgtaataaagcaaacaagaataaaagtattaagtgtggacaatggacctcaaaatgtacgtggatataatatataaaagatatctttaatatatatattttttcttt

SEQ ID NO: 243386 - DNA, 4539 bp, Cannabis indica
tagaccgtataattatatattgatataattattgttgttagtggtgagattcctgtatatatgtacatatttcttttcagtttttgatttaggtcagagggcattgattaagaaagtaaaaaaaaaaaaacctaatagcactttccaattatattttgaataatgcttaaaagaaagttctgttacgacgtttctttacattttcacttatgaagatgggacacaaagacacgagtatcagaatcgtggccatatgtggtgttgacaaaatatagatttgaatcatatttacatcaaattactttcatgcaaacaaaaatgtactttttttaacctaaattatgatacaattatatcatgatattattatctatgtgtattttcaaattaaatttttaaaattcataattttcaaattcgtatatatatatatagatcctaatatactctaatattaatttgtatacaggtatttatttcattcaacactggccagtacacactacttatagttgaacaataacgttctcttctctaaatattaatgctcctgttcagtattacttcgtttaacaataaatacggatttgatattgggtgatcagtagttgtgaaagatgtttagtagaatcaaatccaagatttcctctatttctttctagtagatcaccatcaccatctaccaatgataataatgatctccagcttggactcaaaaccctgctcatcattcacgctacacaatcacaattagggcagccagaaccacaaccacatgatcttcaaacccctgccattgcaaacaataatcaccattatcctcttcatgaacaacagaaaattctccattcccacaatagggttttgatgaaccattcactagtggatgacataataatggggacggatagcggcgtgcacatactcagttctcactccaattacgatgaagaagagaccatgatgatgaataggaatacaaagaagaaggagaatgagaataagaattataattcaagagtaaaaagaaaaaagagcacccttgttatccgccgcctatatctatggcgcctatggtggcgggaacaaggaatttgggtagtactggtgcaataattatgccgtggattttgacacgacataatgaagacggaagactcatactcaaaggacacagagtgcaacaccaccgctaccttgagtgccaccgtcacaacggccgactcatagtaaatctcatcaccatcaatgatgataatttagaggaaaaccatgttgatgatgacgattttaaagagctagaggtagaagaagaagaagaagaagtagtagtagagccagtcaaaaaagaagaggttgatcatgatgatgagcttaatactagtattattcatagtggtgtgtggtcatcaatgtctgatgaattatcgtatttggagaatgagctttcaataaatcgtgggatgttaatagcgaattccatgaataatttgggttgcaacaatagtaccaacattatcattcatcaaagccatcatcatctctactcatcacatgagtctcccggttcttcttcctcattgctctgccctatgactactgtcatcaactaattactaatgaattagctaggcttgcattagtttttcatatgtatatagaagtttgtttttcttacgaagaaaagagcgagagagagcaaaataggttagtggtaagtgcagttaaaattattttagaaactaatcaagaggaacaacctcttatactttaagcatccaatctacaacaacatctagtgaatgtatacttccaataaaaaaaaaaaagtgaatgtatatattgtgtttgaattatatattaacatattgtggtatagtttctccagatgaaaaggtctctaaatgttatcatcattcctgaaaaattgttgattcgcaaaagtaagtcctggaagcctttcttgtccttctgggaagagtcctcaagaaagctagccttccttcaaaaagaagtttcggatggctagttgttcctcctagaactcctagaaaagagtttcagatagttgactccaggttgctctttcctatccggaaagtttcttcagtgagtgtcttggttcgtgattccagaagccctcatatatacgctcccagaagcagtcatacttgtgttgacatggagatctcgctcaaagaagagttggttaagttggttattacctaactataacttaacaatctcgcttgcagccgccgactttaggatcttgatcctaagcatataaataccaccaacacttatcatttcagatacaacgactagatttaatttcgaggtagagagagaaaagattgagaggtagagagagaaaggtacagagaaaatagagagattgggtttggattttgtatgaagaatcttttgtagatgaagaagattcttgggtaagagtgtgagagttgaaacactttgagaaaactcatcaaagaatcgatctcaactgtattatacatattcttgctcaatcaataaagatgatttagtggtgttccagaactggagtagagtcatagatcacatcacactacaaaaaagtttggctgtatcgtgaacacttttaccgaggacattgaaaaatgtcatcgatagaggaaatttcacattggcggcaagatttcgcgcatattttaggggttttaagttcttctaacgaggacatgggttctaacgaggacattgtcctcattacaggtagtgttatattcagtaaccttgttcgtctccttcatttttctctgaatcaaaaaaatccccatttatgaaaccctcctcccctctatctctccaaaactcaaatctcaacctattttttcctctctctctctccatctatctatcctctaaaaccttcagaatcttctccaaaacttcatttttgctattaagttatctatctctgtgttttttaatggatatgttttgttttttttattttatttctttagatccgagacaaaggagaggaatagaaccttgaagcttgtcttctatcatgctcaatctcggtatttatatgtacatttgctatatgtatttttatttttatatctttttgactaaaaattgtttatttttgtttgtttgagtatatatgactgtctatgatattttttatttgttattatattttacatttcatattctagctaattaactcactctctcagattttttgttatttccttttcttttctctaatttttaatgttgcattttcagaatatgttgttgtatttttttttctacggtactctccccccctctctttgattgttattttttatatgtgagacactaattaaagttcacttaagaagcacatgagctaacttttttaattactaatatcattacaaatcacaaagatgataacttcttaaaatcattagtcttacctatttgagcagagagtcatcaataggccggagcttcaaatcatccttggtgtctccatttttagccaaaagactcatcttcatagtagtaagaattaactagataaatgaatgaccaaactagttacccctcttgacactatagaagtctaactctatagccataaaagcagaattcatgacaattacagaagcattcaaggaagcattatggcttaagggagttctttatgaattgaaacaaatcaaaggggaatgattgtatattcggatagctagtcatccatccatctttgtaagaactcgacttatcatgaaaagagcaaacatatagatataagactctaccagattaaagagaagataaaagaagggttggttgatttagaaaaggtcagaacagaagataatcctgctgatgttgggactaaggtcttaacagtaaataagttcaagtattgcttaaacatgatcaatctcaaaagttagtaaactgagatttctagaacaccaaccatgatggttgtattctttcttcatcactgtcaatattttaatttgaagtaactaggtggaatttgtggtatagttcctccaatagaaaaggtttccaaaagttatcatcatttttggaacgttgttgactcacggaagcaggtcctggaaggctttcttgtccttctaggaagggtccttgggaaagctaatcttcctctagaaaggagttttggatggctagttgttcctcctagaaaggattttcaaatagtcaacttcaactggctctttcctattcgaaaagttccttcaacgaatgcattggttcgtaattctagaagccctcatatatgctcccagaagcattcatacttatgctgacgtggagatctcactcaaaagagagttagttaagttggttattgcctaactaacttaacaacctcactttttgcagccaccgactttagaatcttaaaaataaattatcattttactatcactaactcaaaaacgaaaaagaaaaaaataaaaataaaaaaagttgaaagaataacgttgtaacaacaaatttcatgaa

SEQ ID NO: 243387 - DNA, 2200 bp, Cannabis indica
gtttctgttcttgttgttcatggtgctctgcacctttctctctctaagatttaacatggattatttttcaaataagtctttgataaataagattaaaaatgacaatgatctgccacctgcagtacagaaacagggaaggatctctctttttaaggataccatacatagagatatttgactttaagccaatcattttcacttacatcattcaagttgtaaataaatactctaatatgaaaatttattgtcattttaaaagtaactagtactactctaaatcatgatttgattcaaatagctccatgagactataagatcctttgaggctgagctttccactccatgcttgctttgcaaattgctcgtatactttttcagaaggatgtacagagtcaaagaacacatattcaatggcattataacataaactaaagtttcctcctccacagttaaattctcctctgtatgggccactgccacaacatgccactttcccttctttgaaacctgaaaattttgaagcagttttaattagtcttaagaaaagagatctcattaaattaagacacttggaaattaactagcttaagaacatacataccttgtttagaagggtgattcattcgttcttctaagaaagaataaaagtctaaaagtgagtatttgaatttgttgagatgtttttggaaattttggagaagattaaagagttgtttgttatgtgattttaaatatggtgttatttgatccaagcagccataatctccaccttttattactcttgcgaatggaaaacatgccagaggccacatacttggaaacgcaaactttcttcctccaattttgtaaatttcctaaaacaatcaaaaattaaagggttgtttaaaatagcatgtcacccatcttggaaagttaatttagtggcttaattcagtaattagtgtacctgaatgacttcagatatgttgccaatcacttgtcctgcgaattgttcgggtgaataggttcgaagaacactagagtttgtctcaaatgggaataaatagtcattgcctcccacgctaaacaagtatacagctcttgacaacaaatcttcagcctctgcatctccaaatttctcccttaaaagtttgctaacattcttgaaattaccaagttgagttttaagatcaatcacctgatagagtgagagaaatgaaacaatcatccatgttaacatatatgatattaatatagctcatcgaaagaaaaaagaaattaaacaatgatttttaaccaattataccaatccagggcgagttccaacaagggcaccagctccagcagatgcaaagttgaccccatatttaaaatcatggtgattacaaggctgaagatatggtacaatgaatggcaacttcgtatattcagctgtaaatacacataatcagattaattagattgttataatatcatgtcctaatattattacttatatttacttataaaaacagaattaataacgtttgtattttgtttacctatgaaatcaggaacaaggcgaccatttgaaaatctcccagttgggtactcaaagaaagtctcaccatatgggaattttgttgcctgaaaactagtgttgatatagttattatttccaacatcaaatgctgaatccccaaagatgaacaaggctgcattgcaatttggagatattgcaagtagtgttagagtgattatacaaagaaaaccaagacaatggctgaatctatttaattttgccatgatgtaaagattaccaactggctactactaattatatttgtaggttctattgcttcaatatctatttgggatttgagccattattgtaatgaatagtgataaactgataattaagtgatcggtttcgattcctttttctaaataatgaagtcactgtctgatatatttgtttatttaaatcagtaccatcattaaagggtcaatcatgtatatattattgtgtatcttaaactaaattatctggtagggtgtcaatgttgatgtagaataaacaacatttacttgaatagacaagtcctaattgtaaacaacaaaatttaaatatagttgctttgctcttataaaattatgagaggcataattaaggtttgaggaagattgacaccagacaaacgcaaacttaattaaagcatgatttaaagaagtgtaatattcg

SEQ ID NO: 243388 - DNA, 4502 bp, Cannabis indica
ctatcattttttccccttttctaattcatgttctgattgcactttacaggatataaggagaaccattccaggtaatttgcgaccattgatgacgaatattccggcatcctctatgtacagtgtgagatcgggccctgcacgaagcagaacaataagtgtttcagactctcctcttgccacgagcagtaatgcaagttctgaagtcagtgttaacaataatggcatttgcttagatgggattgaaatagaagatgacattggcagtgagcgaggtggtcgatctcctgctagtctgcgtggtaggtgattggtctgttgccatacattgcatataaactgatgaaattcttatatttaaaatttgagttgcatccattttaatgttcaaaagaaaccaaattagagggagttaactagagttgggctttgattggtaatccgaaatttattagagagatgggtgttcaaattttttaaaaaatgtaatttatgatattatttgtaatattagaatagttatgttctgaacattcctgatttctcattttctacacggtgtagtagtagtatcatgtcatgttcttgttttcaagagagatcgaaatccatgtgaagttgctccttttcttgtttatcactattttgaagtgaaaacggtacccattttgccatgcaacttgttgagaaatccccattttcaattctcaaagaaagaaaaagaaatggtgcaaatgataagtcacccagttcaaaatagttacttttgttctaaaactgcctgtaaagaacattacatgtcacatccaatagcacagacttgtaagaagccaactgatcaaaaagatctattcagatgaaatatctggaccacgttatctccgactcatgaagcgagcaatacatttttaatcacatatatcatcaagatcacaatatctagtagcaggaccacaaatttttacttcatttccagaaaaataaagcttcatggtaactgtttccttcctagattgcgacccaccgttgttaaagcaaaattcgtagaaagcaccaacggtctctcatctctgtacaattaaaattatccattccaatagaacactattcaactaaaaacgaaaaaaacgacttctcacttggtggggaaggaaagctgtaaagggaaaacgaagggaacaagagtaatttgataagggagcaattattaaccttctcagagaaaagaaggaaagggtagaagaatacaagagacaataatttgggacaacatgattgcataagtagataatttggtgacttattgaatttgtcagaaaaaagaatatttaaactagagaaataaattgaataagtgcattcattactaacaattattattgtggaacccggtgatatcattgacaggttgcattgctggaaacagtgaaacaaacgcgatatatattcatatataacacacatggggtgaatcctcttcaaatagccaaattcttatacataaaaggtaaaatttaaatactgttgactattacaccagaggcaaacttcaatgaacaccatacattctaatcaagtacaacttacataatttaacctaaacagactaacgtttctattaggcaacagcaacagccttagcaggagcagctgggacggaagcagctttgtttttagcctcgtttgatggggaagcaactggcggcggcggtggtggtggagcatgctttaggtgctcaggtgtactgtgtttcagttttacaagtatctgtctcatcctagaaagatcggttggtttgccaggctttggaccttggacaacaacaacagatggcttcttttcttggtctttcttccctctcctcttttctaaaactggcacttctttaggaataagctcagctattgatttccagtagttcttattagcctcagcatgaaacttctcttgattggccagaaatacctataaaggaaaagatataatttcaaaaggatatatgatattgtgagaatatataattcctccatatcttaaaatgccatttaaggcttcactttatgataagctttgctattatatataaacaaatgaaaaaccaatcaaagtctcctcagattctatagattcattcgtgtgaaactctgggagttcaatagaaattgttatgttaaacatgtaatacaagagggatcaaggtgtagagataagttccctgcattcacaattgcaagaggatcgtttactttaaactcgggatgcaaagtatccgctaaaatctagttagctaaatattgcctatagatgtgctatgctacagctcaaacacataccatgcaatttctaagtatctcaatcctcactactaccataccagctatcacttgaagggggcaagatcacctagattactccagcaaaaaaaaaagatcacctagattaaaaataataaaaaaaaaacttttacccattctgctgtggactcttccagtgagcataaattctattcaatgcatgtcaaactgttatccataacctaatttagccataataaataacaaacgagcagcattaaagtaaatggtattttgtctaaattgaacttgagggtcaacaatgaaaactacaatcgatgataaaggttttgatgttttgccaccaaaaactcaactaccaatggaaaaggtaagaactaacagcatgatgcaaaacatttccagaaaaaataaaaggaaaaagtactgtaaagtgtaaataatttcatcctaaactttaacttcaatagagatatgagatatccactctcaccttttccttttccctgttggaagttttgttgttttcacaaacagtctttctcttctggtaaaactcaagtttgtattcatcagcttcatcaataatctggttcaacaactctttttccctcttttccttctcctctagccgaatcgcattctgtctgtatgtgaacataaaatagcccatgaattctttacacctatcacttttcactaaactttacgttatttcttctaaattaactgaactgaagcacaaaaaataaacaaattccagaatatttgattaaactctgacaatctactgcaaaaaatttcctctttctattatcaaccaaaacggattctaatttcagacacaattgaaaatgaaattaaactaattgttaactaaacatcagtaaaggttcaacacccattatttttactaaatatcaaacgcaagcggattcgagaccctacctcctccattctctgagagccactccctcctcgcgttccatctctgacggaggaggcaaaatcggaccgcccgatccaccaaacccttcatcgaagtcctgcccgttcgattgggtaaagaccgatggcggagattgggcctcaggaaccgattgcgccgcgaacccgtcgtcaaccgttgaactgtggtggaagatgggtgagtcagtggtcgagtccttgattgactcggagtcgacgaattgaggggcagagaaggattcgaatcgctgggaggagaggcgggggtcgtaccctaggtaaccatcgtcgtcgaaaggacgagtggagccggtggtgggaactgagtcatcgcctggctgagtgaacgagtcggagaactcggacgacatgttgtgaattttatgtttgagacggacactgaagaagaagaaatcatgtctttatactatgtgtaaatagtcaaagtcaaactttattctttgattttatgactggtgtaatatttttcttttctaattttttaatcacaaaataaaagtaaaatttttgcttttaaaaattttacttttgaaaaataaaaatacgttgtgtaaccacttttgtttttaaattttaaaaacagaaaacaaaagcgtgttttgtaaaatttattttcattttttgattttatttatgtcgagtctaggtccggggtcggatttgggttcaagtcagaggtcgggtttagcgccaggaccgtggggggatttgggtccgagtttgatcgaagtctaaaatattgattaagaaaaaaaaactgtttaaaaaaatattgaaagtgatttttttttttttttgttttaaaaattttgattctcaattaaaaaaattaaaaccacctaaacccatgtggactaattaaattgtgccatgtatacactgtgtacacgtagatattctaacttggcgcttaacacccaaaaatggatggaaatgactaattgctaacataacatgggtttaggaggttttaccaccaaaattttaaaattggaggttaattgcaaacacctgaccacttaaggaggttatgccgcaaattaccctataaactaagtattaatttgagggaagcttctctagtgcaccatctaaatcaaatacatcccttactctattcataaaactagtaaataactcgcgctttgcaatgtttaaaaaaatttaaattatatatataaaataaattataactttta

SEQ ID NO: 243389 - DNA, 1917 bp, Cannabis indica
aattgtaattattttaactacatattcatttgcatctcttcatcattgttgttagtatttaacatgcttaaaactaacagaattttttaaaattctgttaggtaggcgtttattttatacgtgatatatatttatatatatatatatatatatttatatgccctcgcacatacatagacactaattattgttgggtgattgcaggcgactctggcggattcttttcttgctgaccttgatgacctatctgacaatgaagaagaagttgttgtgagtagaaggtttttattttttacgttcatcaagcctaaatatgtcgactttgtgttattaattatggtatgtgtggtttattttccaggatgaagataatgctgaagctggacacatggaagaagatattgatggagacttggcagacatagaaactcttaattatgatgatttggacagtgtttcaaaattgcaaaactcacagagatattccgatataatgcaggtttgttccttaaatgttcttgttaaatatatatgatatgtagtttcaatgaaatacactaaacattgtcttacgtgatcaagttggattggattaaattaatgcaaatggttgaaattaaaataaattgtaataaaattgttctgcacacgtatataatggtgttgaaatacatgttaattagagtcattttcaactcatacttattttttatgcataaaaatatgtaaccattgaatattggtttgtttatatacatagatacatatatagtattatagtgagaactgtattatggaatgtcattacaaatgtcttaaaaactatactcctggtaaagagtctacactgcatctatagatatcctgattcattagaaatatgctgtattgtttgcagaaagtggaggaggcactgctgaagggttctgatgaatctgaccagggaatggtattagaagatgatcccgaatatcagctgatagtggactgtaattcattgtctgttgatattgaaaatgagattgttataattcataattttattcgggacaagtaccgactgaaattcccagagcttgaatcccttgtgcatcaccctattgactacgctcgggttgtgaagaagattgggaatgaaatggatctcaccctagttgatctagaggggcttttgccatcagcaattatcatggtggtgtctgttacggcatctacaacaagtggcaagccacttccagaggaagttcttcagaagacaattgatgcttgcgatcgagcccttgctctagattctgcaaagaaaaaggttcttgattttgtagaaagtagaatggggtatattgctccaaatctgtctgctattgttgggagtgctgttgcagctaaacttatggggactgctggtggtttgtcatcactggcaaagatgccttcttgtaatgttcagcttcttggtgccaagaaaaaaaatcttgctgggttttctactgcgacatcgcaattccgtataggttatattgagcagacagaaatatttcaaaccacaccccctcctttgaaaatgcgagcaagtcgactcctagcttcaaaggcaactcttgcagcacgagtagattctataagaggagatccatctgggaacactgggagggtgttacgggaagagatacgtaagaaaattgagaaatggcaagagccccctcctgcaaaacaacctaaaccacttccagtgcccgactctgaacctaaaaagaagagaggtggtcgtcgattgaggaagatgaaggaaaggtatgaaagtttagggcttgtttggaagtaattttaattactagacagtgtaattacactattataaaatacaaaatgtgtttaaatgtcaagtagtaattgcatttaaattcttattttatgttt

SEQ ID NO: 243390 - DNA, 4606 bp, Cannabis indica
ttactaaattttaatataggttggacagtaattaaaaaaaaagattagataataaagaacataaatataatataaaagtaaaaaaaatgtcaatatatttatttactcccaaaaaattaaaatattagtaattttctttcctctccttcttccaaacaagtaggagagaaagtattattcttttctttcccgtccactttttctatcctctcctaccaaaaaccaaaaacaaggaatctttcatgtgctgtgatatataaaccctcaaatattgcctataaatgtctgaataacacattttgaaagctagattctcatcaactcgttttaggctactttaataaaagcacagttttatgccaacaatcaataacaccattagactgcacaaacagctacttttaagatccaaaatttacactgtcaaacatccaaagcttagtctattaaatatagaggaactctacctgcaacagttacaagagcattcatgcgccactagaatacccacatacatcataggtgacataacaaaaacaacccaaataacagcagtgcatccaccaggtctcagcgaggactgcacagaggaaaaaccagacattgtaagacttcgagaagaaaaaagaaaaagagtatctattaatctaaaggtagaactttcagccttttgtgaatgacaaacccaaaatgtaagacatcagtactaaaatcactcaatcgatttgaagagcaaatgaatacaaataaccagaattgattaaacagatgcaaatattggttcaatcaaatttctatagggcgagttgattctgccatttttttaatgaatgaattcactaattcatctaccagacaataaccaaattgttctaacggagatgtttctttcatcaatatgatccgtgcctattgagaagcattgttatgcaacaaacagcatttacctataagatcttgaacgagacattgaaggactacgagtcttgacctttggactccttgacctgtttggtgggggcaccctttcaaaagatggacttcgaccgttcgcccttggacttggggaccgcctgtaatctctgtcattaggcaaaggagaatggcttggggaccttctatagctcttagtctcacggggaggagagcacgaaattgatcgagagcgcactggagagcgataatcctccctagacctgtgatcattcccaacatatagaaggtgaattaaatgaaaatatataccttacaaaattagctcatattgcacgacaagatgatcggaaatatattaagcacaaattgaaacatatccccatttgcaaaacctacctatggtcacatctggaaaaccacaaaagctcgatgggaaaatgaaatttggcacaaaattgagaataaaaccaaattattgtttcaattctacttgcatcctcatctaatatttaaaatgcaacttttacctgaaccttttcaaggtttctggacaaaaatatgacactgtccaaacaatgacagtttaggctctatattgaggtacagtacaggtggatcagagcatctttcatcatagcttctttgccccaactttctaaaactttgttatcttttccttgaaaaatgtcaccaaacatctaccagtaaaaactttgaatagcttccatctttgaagatgatatcattctttggccaactataagctctatgttctttactaactgaatggtatatgcaaaacatatattaaattttataaattctatctatcaaaatttactttaatatgcttataaaaaatagcaaataaagctgatttgtgactgtcaatcattttgtcaggtcattcaacgatagctatcatcgtgaaaccgaaagaagaaagactatgaagtccatgcacggtgtacaatgtaacactggtcagagtgagattatgatatgcataaggcaagcaagttgcctttcactacgtttagggcctttctctctttaatctttattaatccagaagtctttattgtctctcccatttcactttaatatctgcataaacaaggtcaccagcagatattacaaaattcaatgtttatatgattatatgcatctttgacacaacctcttacatccaaataattcttatccacaactgggtgaaaagaccccaccccaacacaagtgagagacacttctgaaaatccaggtgctagccgaccaccattcatttgatttgcttaactaccaacaaagatgtaataaacatagacaccttacaaaactaacaaacagccacaattcatatctaaatttcatctacacactaaagactaaagatcaaaacaaacaaaatcagttcaattattaaggactaataagatcacacaagataccaatccttaaaatacttgaaataaatattaactataaatccaaacctggagtcatacctaacaggtgatggtgaccgcgaataagctggaacagacaaaatttataaaaattcagcaaaagagtgaaaaataaaaatagcttcaactttcagcaaacttcttctactcaagattgatttaatgccaagtaaatatcaaactgacaattgtatcggcgtgttggggacctcggtggtgttctccgtctattacttcctccatgtcggctactactactaatagaaggaacagcaaagtcaagaacaaaatttttaaaagtagcatactgcaaaatgtaataatgtagggaaaaagtaaactgctttgaaaccttgggcgagtggttgtgcgcatttcctgaggagtcttcctattctcctcggcaaacacaattcttatctcacgcccaccgataattgtatggttcaattgctgcttcgcttcagcagcatcatcaccataacggtacttgacaaatccaaagcccctcggttctctgaaaattcacacataaatcgttttacaaaatttaatgggagctcgtaaacatggcaaggaataacatttaccacttaaataatatacaagaatcatacccagtgtagtaattcttaggtagataaacatccttcacaggtccgaatcgttcaaatggaatcctaagatcgtcaggcctgtgcaaacatatgaataaagaaataaaaacacaaaattttgattacatgcacatatcattatagcaatcgtacagggaaatttctaagcttaaagattaaacaagacccattaaagaaacaaacagaatacacaaaatgtactgtttgaggggaataaacccaaaaggggggcaaaaaattgaaagaatcgaagatacctggcgtcaagaggaagattgcgaacgagcaagccggaaggagcaggagagcgacggtcccggcggtcacgttggctatcacggggttcttcctcatagcgcttgcttccacgcggtggtggggttcggctgcggcgacgagggctgtagcttctgctacggcttctgtatctcgccattggaagctgcgagtagagggtttgtaggggttgaagaggggaaaggcaaaaccctaaccctaagggggagaggaaacgggaagcgagtgaagtggagagtggctatttttgctataatgagtcgccgaaagaggggttttgttttggaggaagggagggaaggagggactggtttgatatttgatacgctgtgggtgttgtgtcccaaacacaaaacccctcctctcgaaacaatctctggttttttaatagggtattcattaaaaatatatttttcatcaaactatacatgttatagtgcgaattttttcacttagaaactcgaggccaaacttccataagagtgacgcgtggactcacatcccttgagaattcctgagctgtcaagaagggactcctcaagaataaatctcgcatgaatcaaactcgcgagatgatgtgaccgtgatagagatatatgcgataattaagtagtcttttcctgcgatttagtaaagatcatttctttacataatgaattggtttaaataacccagcgtacttgatgactcggtaaggactcgcatatcctatgttatcaacgctgataaagtgtccatacacgcgactcgaccagaacgcatataccttaatacaaggtatgttaaccttcctttgaatgataaaacgcaccccaaatctgcgagcttgtgcaagaatatgaacaggcaactcgcactatggaagtcgtatacgttgttgtatttagtgaaatggatttaaattgtttttcatttatttttttacatttaatgtaatttaatgttaatatttaatgtaaaacggttctataaccgattgagttctatgtaactaaaaggacacttgctttgtatataaaggagtgatccaacatgaataaaccaatacataaatcatttgtaacagtggactaggcagaccgtgatctgactaaaccactatacatctttgtgttcattatttttactgtttttctcttgtttgggcagtctcattcgaatactcgttgttttagattgagtagtccctacttttagttaaatattaactgtctattttctaatttggtgttgtccaaattcctccgacaacatttggcgccgttt

SEQ ID NO: 243391 - DNA, 3902 bp, Cannabis indica
tggggaatattcggcaggtactgatgagctgtcattatgattcctctgttgtgatgctctgtgaatgcagcacactgaaagctgctgttaagactcactcaagtcttgacaccacctctcaaacgctggggtgattgtgtcactccaagtttggaaatcagcagctgaaatctagatggtgatagagcttttgtgagacagtctgcaacctgatttgatgaagggatatatctgacttcaagttctttcttcagtatcttgtctcttacaaagtgaatatctatttcgatgtgtttagtgcgtgcatgataaacgagattcgaagctaacgcaccagcacttacattatcgcaccaggtcacagatgtttgtggcagaggaaacttgagttcttttagcaaggactcaatccatgttatttcagcagtgacatgagcaagggctctatattctgattccgtgctagaccttgagaccacggattgcttctttgatgaccaagacacaagtgtgtctccaagataaacacagtagcctccaacagatcttctgtcatcagtgcaacatccccaatcggcatccgagtagcctgtgatagcaagcttatcactgtatcctatatggaagccatgatttgttgtgcccttcaaatatctaagaattcgtttggctgcactccaatgaactgtggtaggtgctttgagaaactgacttagtttatttacaacaaaactaatgtcaggtcttgtatggcatagatattggagggcaccaatgaggcttcggtaaatggttgggttatgcattgcttctccatctgtcaaagagatagtctttccagtaacaataggagtgggacacggtttgatattaaccatgtcatacttcctcagtagctcttcaacatatttcctttgattcaaatataaccttgtgtcatctcttgttacttcaatacctaagaagtaatgaagtgcccccaggtttttgagacaaaataacttgttgagttgcatgataaactcattgagctttgtttcattattccctgtaacaataatgtcatctacatagatgagcaccaaaataatgattttttcatctttgtaaaagaatagagaagtgtcagcttgtgaattctgaaatttccaacttagcagggtgcctttcaatctatcaaaccaagcccgtggggcttgtttcaaaccataaagagacttgagcaacttgcacacatggtttggtttggttggatcttcaaacccctcgggttgtagcatgtacacatcctcttccaaatagccattcaagaatgcattatttatgtcaagttgttgaattgaccatcctctgttcacggcaatggttaggacaatccgaacagtagatgccttgatgacgggactgaaagtttcaccaaagtctaaaccaggcctttggtgaaaacctttagcaacgagtcttgctttacatctctgaaacgaaccatcagcattaagtttttctcgaaagacccacttgcagcccacaagattatatgaggcagaatagggaaccaccacccaagttttgtttcgtttaagagcacctatttcatcatccatggccattttccacctcttaatcttgagggcatcagcaacacaggtgggttcactaatagtggatgatggttgagttgtactggtatatgccttcggcttaaaaattccagctttggcacgggttatcatgggatgagattcttgttgtggagctgttggaggtgctggaacagtaggtatagcagatgaacattctgttggtgagggaggagaatcaggagcagcagttcctgatgcttcagggacaatattcacatgatcagtagcatcaaaactcatgttatcaagagaggaagatcgaacctgattgcttgacagtggggacagatctggtgtagaagatgctgcagcaggtgatgcttgaggagtaggagaagttgctgcaggagagtaattagtggaaaaatgaagattagggagttgagaccatgcttcattttgaacaataacagtttgttcagaagcataggtgttgagaaaaccatttttaaatggaaactccttttcattaaaaacaacatgtctagaaatatagactccctgtggtactcaagcatttgtaacccttaaaggactcactataaccaagattaacacatttgagtgagtgaaattgaaacttgtgagtttgatagggtcttaaacaaggaaaacatgcagcaccaaaagtcctaagcaaatggtaatctggttttttgtgatagactatttcaaaaggtgatttgttgcttagaacaggtgtaggtagcctatttatgagatacacagatgtttgaaatgcatctacccaaaactttagtggcatgcttgcttgagctagtaaagttaaacccatttccactatgtgcctatgttttctttcagctcttccattttgagctgaagtgtgggggcatgaatggtgaaattgaattccatgagctattaaaaactgattaaaagcctgaaactctccttcccaatcagttctaatgaacttaatctttgtttcaaactgattttcagccattgttttgaattgagtgaaggcattaagggcatctgatttttgctttaatggatacaaccatgtgaagcggctgtaatcatcaagaaagtggatataaaatttgaaattagtgttggagttgattggggcaggaccccacaaatctgtatgaattaattctaacattttggttgctatactattagacaatttaaagggcaatgcatgagactttccatattgacaagcatcacaaaagctttcattgttgttaaaagaaactggtacattgctaaaatttaaaacaagtttaagaattctagatgataaattgcctagtctcctatgccaaacatctttcttggaaagaaaattagactatctattaatactagcagggcaaacaaaagcatgagtagatggggctgactgagttggttgacacacaggctttgacattggggaatttagttggtatagcccatccttaagcttccctgtgagcagcaccttccttgtgaccttgtccttggcaaagcaaaaatcagaatcaaattcaataaggatgtcattatctgttgttagcttggaaatacttataagctttttggccatttcaggaacaagtaaaacatcttttagaacaagagttttggatggaacatttgtagataaaataccagatccaatgtgagtgattgccaagggatgaccatcaccaacaacaagtttatccttaccaccatagctgctcttttgactcatattgctgccttctggtgtgacgtggttgctggctccactatcagcataccacacttcactgtccacgacttcaggagtagtaacaaaggcagcaggtccttgttttccttgagattgattctggtgtggatcagcacccatataggtatcatcatacctattatagcacactacagccgagtgaccatacttgccacacacttggcaagtaggtttcgagttgttgctaaatctaccacgtcccctgcctcgagagccaccaccacgactgctgttgggatagtttccacgatcagtagctgagttttgttgtgtgttactgcctcttcctcgaccagtattctgagatctgttagcaaggttggcagttggctgtgatgtacttttaggcattccattcaagttttgcaagcgttcgatcttgctaccaaagctaagtaatagctcctgcagttcctgccatgtagtactagggcgtgcctcaatttgcaaaataataggcaggtaagtagcatctaaaccagataaaatattagcattcaagt

SEQ ID NO: 243392 - DNA, 2662 bp, Cannabis indica
gtttattatgtttttttattaatattaaagccaagtcctaataatatatttgttcttgatgataggttgcttggggaaaaagataggaccaaaaattttgggaagaaggattgactcatataatgtaacttccccaacaacctttgatgattagaaattacttatttgtttgtctttattttattattatttttatttttatgaaacttatttgtttgtcttaagaaattttatttatgtacttatttattttggtaaggtccctgaagtgatatatcaagtactagaagaacccatcagtaaggatgaattacaaggaagaaatgatattccccaaactctagatgagttcatggctgagatcaagaatagcaacttagatgcgaggacttttgctatcaagcttagagaaatggtaatatgttttctattattatttctttctaaaaattgtttacttttgtgtattaatattattttggaaatgaaatcagcatctttgtttttattatttattttcgcgagggtggggtggaagaaggtgttagttcacctccaactaacttaaaaaaggttccatcatgggaaataaaagactagtttaaaaagaatcagatgtcacttgaaaatgattgtttctgtatatattggtccacaaatccttcaagagggtccacaaatagagttttgaacattactaaattgactctttaacttatgtttacaagagaaaacaaagacaatgaatgaaagatactcctcaacaaactcttttttttttccatttcaggttacccttcttgaacaaaggactagaacagccaaaattcaagaatacttgtaccgccacgtggcatcaagcagcataccaaaacagcttcattgcctagccttgaggctagccaatgagcacagcaacaatgcagctgctcgcctccaactgccttcggctgaactcgtccctgccctcgtcgacaattcctacttccactttgtccttgcctcagacaatgtcctagccgcctctgttgttgccacatcacttgtcaaaaactcattgaggccccacaaggttgtcctccacatcatcactgataggaagacttactatccaatgcaggcatggttttctttgcaccctttgtcacctgctataattgaagtgaaagcattacaccactttgattggttcaccaaggggaaagtgccagttttggaagcaatggagaaggatcaaaaagtcaggtcccagttcagaggagggtcatcagccattgtggcaaatgctaccgaaaagcctagggttattgcagccaaattgcaagctcttagtcccaagtataactcagttatgaaccacataagaatacacctcccagaggtaatatttgattagactttgctatatttgaacttctcccttttcttattgtgtcttcttctgacaaatcttttcaacactgatcattttcttgcagttgtttcctagcctcaataagatagtcttcttggacgatgatatagtggttcaaactgatctttcacctctgtgggagattgatatgaatggaaaggtgaatggagctgtggagacatgtagaggagaagataagtttgtgatgtcaaagaaattaaagagctacttaaacttctcccatcctttgatatcaaataatttcgaccctaatgaatgtgcatgggcttatggcatgaacatttttgatcttgaggcctggagaaaaaccaacataagtgctacataccaccattgggttgaacaggtaagaaaaaactcttctgtaatcaggacctcaagctcaaccgagtgagtttactcgccaaaagaatgtgtcgttatgtgtttcgcttgttcctaaattgtcttttttttgatgcagaacttgaaatcagacctgagcttgtggcagctaggtacattaccccctggcctaatagcattccacggtcatgttcaagtaattgatccattttggcacatgttggggcttggatatcaagagaacacaacttatgttgatgctgaaagtgctggtgtcattcatttcaatggcagagcaaagccttggctagacattgcctttccagaactccggccgttgtggtcaaaatacatcaatttctctgataaattcatcaaaggctgtcatattagagcatcctagactttgcatttttgagaggaatatcttgatcttactgattataaagaatcgtattcgttgtatatgagaaagaaaagagaagatgacagagttcttccccaattcaaggtcttcaatgctcaatgcaagattaagataaaagagagccgtgtgagcacccacggctccactttttccagctctctttgctcagttggaattctctcatttagctcactttttttagttcttgtaatatttttgtgttgttaaaaggtttcaaaaacaaataaaagtaataatactttgttaatactctgcattcatgatgcagaaatcacatccaagcttgttaatattttcattagagaaagcatgttacatttccattgaaaaaacttaacggagatttaaaaatgggctgtatttggcacaaagaatggctttgtgaaaaagataaacagaaaaaaccatagaacattttggcttgtgaaaaagat

SEQ ID NO: 243393 - DNA, 1945 bp, Cannabis indica
acgattttcatgactggttgcaagggtgaccctcaacctccgcggtgttgtctagagcaccagaataatccatattatcaatagaaacatcttggtgttgttcatcttcagctgacaagggagaagcgaacatgtttgatttattacccctgcaccttttcagtgtttgtcgcagagtaacaccatataattgtctcttaactaggtaattaggtgacaaattttctttcataacaagcttttgtgcagcagtagagataattgaaggtgcacaattgcctggctgcaaggaatttgaagattgagttagtttttgttgtgtgtttgtatagatgggcgaattggtgggtatgtagcaaagatgttagaggacatctccatcccagaaagcagagagtaaatcttaggcagattagagacaacttctttaaggtttggctatgaatttttatggaggatttcaccattggtttttggtggcttattaacagaaaatttatggctatgtaggaacattattgagtaatgctggtgcaaaatggatggttggccttgatgaaaagtttgttgttttcgaaaccacacttgagacatggatttgttttttgtaagttcatcatgggtcaatgatgtagaagatccagtagtagcattgttcagactagcatattcagtatgcaagccttgtgtaccaatctgattcatgtgttgcagaactccgtttattgcagccataaaaatttatgcaggatttgctatcatagaggttgtgttccaaattgtgctcgtgcaatttgaagtactggtaccaagtattacagatgtattgatctaagtttgttaagaagattcacccatgaataactgtcttggttgtggttgactattgttgttcaaactaggaatcgtagaattcaaatagttctttgccaaaagagtgaggagtggccaagcattaccctttgagaaatatgttctatagtgataataatctgaagttgggagtgttgaacctttcatggttggcctatattctagtttcggctcttctccattatcaagcttttcaagtaaaccagacacttattgaaggggtgacccgactcccacactccatactattcgggcaatctttcataccagaattcaacccaaaacttatcttttgtctgctgtaaagtgataattcttcctctcattagtggctttttgatattaatcttaacccgaactcgcataataggttctcacccttcatttagtgtatcctcataaactttcataaatttaccaactatatccccaagtgcttttgcaagtcctcttgtttttctaagaaacgagagtctataaatttggactgaaaaggtttgaaaatgagtctcagaggtaacattttggccagggtctggtgtatgcaacagtatgtgcatattctagaagtgaaaaggttcacgatatttgtcacctgcacaaccaatatttagtaaacacaagtttgaagcttcaaagattttgaaaggatatcttccattccaatgctctgcaatctaatttctcaaagttgagagccagacttttctgttggtgaggacccttgcacatagcacatggtccaaagtggaatgaatatcaacaactacgtcgtcagcaaattcagatacagatcttcctcctcagttagtgtaatagtagccttcattttgtgtgtaagtggatctatggagtaaactagatttttggattgaagggaggagttacataaggtttgtggatgaaaatctgaagtaaaataaaaaaataaaaaaaaatgtagaaagcgttaaatgattaaaaactacctcagagcacatattgcaacatacactttttacttttggatatccaattttctagagttgtttttttatattactgaaacgcaatatttttgtaattttgaaac

SEQ ID NO: 243394 - DNA, 5669 bp, Cannabis indica
gaaagttcttatttaggatgttaataaacatacttgtgagtagatctcagatcctggtaaaataattcccaacaggcccagcatataacaaaatggctaaaatttttccacatatctcatacacggggtcactaaaaactctgcaattttgcaaagtttgccaacaaagaaaaatccacaaactcccttttcccaattccaacagtagagttaatcaacctttggctctcattcacacggacccatggggtccatcacacatcagctctaacgaagggttcaaatattgtgttccctttcttgatgactatagccgatgctgttggatatttctaagcctattgggtccatcactcatgacctctaaagaagggttcaaatattgtgttccctttcttgatgactatagccgatactgttgaatatttccaagcctttgatgtctttataaagtttaaaagtctagtggaaaaatagtttcgtttacctataaaaagtgtacaagcatattagggaggtgaatgtagaccatttgctcaatttctagctaatcagggtattcattttcaacatccttgtcctagaacaagtgagcaaaatagaagggctgaacgtaagcatagacacatcacagagacaggtctaacacttctggcttaagcaggtcttcgaatggaattttggtggcatgttatggcttctgctgtcttcactataaataggcttcccacacctgttctcagcaatattaacccttatgaatacatgttccacaaataacctgattacaatctgctgaaaccatttggctgcagttgctttcctcatctcaaagcttataatggtcataagcttgagcttagatctaaatagtgcctattcttgggttatttaactcaacacaagggtcatatttgtgagcatcctaatagaagaacctttatatctcgacatgttgccttcaatgaaatgtattttccttctcatcaagctgcaacaacatctcaacaggtacctgtttctacaccttatcccacttccacttttcatagtgttagtgctaatatctctgctaactcatctctcttacctatccatcccttaaatttgccaatggaacatgagcaaacacatgccatagacaaaaatccacgtgattaaacacatgatttaccccatgaaataaactaccagatggaaattaccctgagtcagtacatattccttcccttgtcagaaaccaacctgaggaaatacatgaaccacacagaaaccaacctggtccaaatgtctcattgctagaatatatccaaccagcctttatttcctcctctgtaaatctcaccaatgacagtatcagtggtcaagctcaaactcacaatcttagttcacagaatgtcgttaaccctccaatttctcctcaaataccaaataatcaactaccacacccacatctaaacttcccaacaacccctatatccctaccaaatcctcccatcacacccactgctcctttgaacatttaggtaccagtaccactactaggatccatggtatgagaattatatctcctaatggaattgtcaatcccaaagctcatttggccataaaatatcctttgaatgaagctcccattccttctgagcctcatacaacatcaatagcttttcattatcctcagtggctcaaatctatgcaataagagttcaatgctcttaaaagagcagccacttagacattagttccatattccccagatatggctatcattgggaatatatggcttcataaagtaaagatcaacactgatggtgccttggagagtttgaaatcaaggctagtagctaagggtacctacaaacacctagtattgactatgaggagaccttttcaccagttgtcaaatctgcaactgtgagaataatacttaccattgctgtctctctcaatcggttggtcaaacaacttgatgtaagtaatgcatttcttaatgggaacttataggaaactgtctgcatgaccagagggctttatggatgagtctcgacctactcatgtttgtaaaatacacaaagctctttacgttttaaaacaagctccaagagcttgaacctaactttaaagaacactctgttatagtggggattcactgctttgaaatctaataactctctgtttacttatggagcagggtcaaattttagaatttttcttgtgcatgtagatgattttctcattacaggacccaacataaatctcgtcgaaaaactggttctaaacataaataagttttttttttctttgaaagacttaggccctattcattacttcttgggtgtgaaaatttttagagactcttttgggatgtacatgtctcaaaccaagtacatcacagatttacttgtgaaactaaacatggagggagaaaaaccaagtcctaacccaacaagtgcaaacactaaaatttcccttaaagaaggagaactatttgaagataagactttgtaccgaagaacattgggggcactacaatatctaactttaacaagacctgatgtaggttttatcattaacaaactaagatagttcatccatgatccaaatgacacccactaggaggcctgtaaaaagttaatgaggtatctaaaaggtaccatctcacatggtcttcatatcacaccaacaggtactttacctcttgaaggatactctgatgctgattgggcatcctgtgtggatgacagaaagagtactagtggataaaccatgttttttggaggaaatttggtctcatcgtctactaagaaacaaaatttggtggccaggtccagcactgaaagtgagttcagatctcttgccaatgtagttgcagaaattaagtggttgatgtcactgcttttagaacatcaaatcaccacttccaaatgacctattctatgggtggataatcaaagtgctgctttaattgcatcaaatcttgtgttccatgctatgtctaaacatattgagattgatttgcactttgttagggagcaaattttatctaagcagctgttagttatcagattgttgttgtgcttacaaagtccttatctacaaaaaaatttttgtaccttagatccaaactcaagatgtcagagacaacttttcgtttaagggggatgtcaaccatgttttggggtctattacttaaccaactattctaattgttagttgttaagttagttggtgtatgttaattctgttacatttttttgttttggatcttgactatgtaatctctgttgctataaataaaggacttagctaactcatttgagttaatactttcattaatttcttgatcctctgttctgttctcctcttcatctttttctattgctctctagctaatcttactaaaggtcttcacctttcttcataccatttagtgggtgagagagaataaagagaaccataaaatgtatatttttattatttattttttttgttttttttttgatcaaagaagaatatatgcattaatcaacaaaacaagtacagacaaccaaggctaccgcaaccaacctaaaaaactgcctccacccgaggactctatctagttaaaagagccaatatcttcaactcattgctactcaactttcctatgtttaatctatacaacctgtgcttgacaacatattttatctctttaaaaacattaaagacagtataggagaagttatcatgtacacatctatttctatttctcaaaatgctatacaccgtagttacaaaaatagtaaaaagaattttgtttaattggcttggcttcctttcagctaaccagaccgtacaccccttagcaatgttcggctaggctgtaaatcccagccagtcaaaaatagtagtagtgcctctctttgaaaaatcacaagcaaaaaagagatgctcatgattctcaacatcatcatggcagaacaggcaagagatagtttccaaaattatatggaatctctcaaacttgtcccttgtgagtagttgcctattgatcattttccacaaaataaatcgatgtttggggagagtaagcctattccagacagcttcattataatagatctcctgttggtgaaggacactgttgtagagtttagaagctttgtatttccctccattagctgctgccattataacctgttcagtaaattcaaatctcaagttacagattttacgccagtaccagctagtgtcatttgggagtaggtactctcaaaagtttttttgtttcaagtaaatgggattaatccacttgacccagagcagatcatgtttctttattatggcccagatatacttaccaattcagactctattccacatcgtcccctctggaaagcccaaccctccatatctttttaggaggcacactttttctcaagacaccacatgaatcttgctttttttctcctttgagaccctacaggaaacctctacaaagcttttcaatatccttaattatgctctgaggaacgataaaaatactcatccagtagttgtggagccccaacaagacataatgaatcaactgagctctacttatgaaagagagatgtctcgtagcccaagtaagaagtctcattttgattttcttaattataggctcacagtcttccttcctccatttggttgttcttagaagaactccaaagtatttgagcgggaacgaaccctctacaaaacccaaaacctccagaatgccctgttttagatcatagagactcccccaaaatatatcatagatttagcattattagctcctaggcctgaaactttaccaaaatcatcaagggctcttttgagatgtttaacagctgatgacctaattcctatatttttttttttcttttttaatttagttaaacattttagttttagattttagtttttttttttaccctttagctatagctattatgggccagtttgacaccattgtggtgtaggaaaaaatacctgtagatgtgctgtgagaaaaaaaaaagctgtaacaaaactgtagaaaaaaactaagctgagtgtttgaaaaattagaaattttaaagtgctgtgagttgttaaggttatgttataataatgataatgttataacctagttcattattataaaaaatatataaaaaattatgtgataaagtttttatttttctatatatttttaattattttatcctatagtataaattcatatgtatttgataaaaatattttataacatttttaaattatatttttatagcttgtaaaacaaaaattttaatttataacaaactctagattgatgtgatttgttaataatataaatataagtataaatataaaatattgtttaaaacaaaataaaaaataagaaatttaaatattttttcctttaaaaaatatatatattttttaaatgtataataaataattaattatttttttagtacaaaataatttattatagttttattttcttaaaagttaggttaaagcagcttttaacttttttaaaagctataccaaataagtcatagatcttatttttgacttctttcactatttatgtataatattttattttttatgtatacattttttatttcacaatcaattatattttgaaccaaaaaaaaagaaaaaaatttaga

SEQ ID NO: 243395 - DNA, 1172 bp, Cannabis indica
tagggtgttaatcaacatacttatgagtagatctaagatcctggcaaaataatttccaacactcttccccctcttcccttctcttctcacctcttcccttcttttctctttttttctatccttggcaccatgcactctcccaaggagagtggttagcggcaaccactcttctaccctctgcccatctctttttttatttttcccatttccctcctttgtgtcaaggaggtcttagtgccaaagaggcttcccattctttgattttatcattaaataagataacaaaatgctagtctcctaccatgaaggggacaaacctaaaatctagcagtagtgaagcggggggaccaaaaggccaaaccaatgtccttcagagtgtgtgtgtaccctcctgacatctgcacccaaaaagtagtggcgaaaaagccgtgcacaagggaatcaaccgctgggatcaccaagtaccccgacaaccacaactctgcaaccacgactatgacatctaagagttagcaggtgtaccatgtattgattgtcactgaggaccacgagaatcaatttgtaacataagaccagtagagccctactataaataaccttctccatttgagaggggtgggaaattttggatgtaacagtaaccaaggaaatagaattaccatttttattcttgagtattccattaaagctactgaagttatattattttcctttaatttagattattactttgattttccaacttaatcatcgttgacgagtcctgaccataaacagtcacaaatatttttctattgttcaacccatagttcgttttcaagaaaaactatttgttatataaatatatatatttaaattaatatagcctaagtgggagaatgttaaacttttatttgagattataataacttttattattttttaattaaaacttgggttgttggatagatagtttttttttgtgttacctcatattattagtgatctataattaataggtttagcatttgtgtgtaagtccaattgaagtaaaagtgtgtacttttctagtttactgaagcctttgatgagcaggctcaccccaactaaagttatgaagctaagttcttcctactctataaatacatattgtctcatcacaattatagacttttgataatcatataaataaa

SEQ ID NO: 243396 - DNA, 1938 bp, Cannabis indica
aaaaaagaaggtaaaaataaaagaagacaatataaaaaaggtatagagtgtaatttcctccattatttgtctttgtaggaaggccgggcttgaacgtttttgggccttagaaaaaataattatattttttaaaataaataatactgtaaacacaaaatatggtattaaaaaaaaaaattagagccgaccctaaatatacatgtatagtaagtttttgactattttttagaaaattcaaaataattcataataccaaaaataaactactcttaatatacatgataggtgtagtaagctttttactaatttttaaaaatttaaaataatttataatactgaaaataaagtttaaactagtttgtataagtacctgcattaagtcgccaatattggcaagtagagcaccatttagatgaggaacatcaagccaatgattattgtgaagaaattggagaccaccaacattgtcttgtaacaatatggtaaggaaatatggatctgagtggtttgtggtacccaaagtgagttgaggttgtggacatattgggtagtaatgtgagaataaggacctacatttcatgcattccatctcacttagatattcacttcttagccctaatgcctctgatagcaattcacaaatcttctctttcaattcctcaacacactttgtgtactctattatctcatcccttcatataaaaaattaaatcacttaattgggtagaaaatcctacattctcaatttacgtagtgaataatataaagtttcaattctagatacaaatctggataaatattattgcatatatgaagtgttataaactaaacaaatgtaaaaatattaaactatttatttataagaatcaattttgaaacgaaactttataattctcgttatatatgcatacatacatgaatagtattaatttactatatataatactaattaattattaattacctgcaaagttgagggagtatctgttgttgtaaatcactatcctgaaaattacaagcaagtgaatctctccaattggcaggagctgaaatgttgtgaaggtatccatagctataaaacctaattaatttgctaacatcttgagaataccacttcatcttctcttccttattttgttcatgaaattttctagtactcatcatcaaatcatccataacttttttaggaaccccatgattcaccatttggaaaaaaccccatgtttcggcggctactcttatttgatttacaagctcggctcgagggcggcccccaccaccaaatatggctccaaggtcaatcactggcaccttaagatcgttaacagttgatttggttggtgagttgtttaaaaattcttgagaaaagatgaagaatttgggaattttttgaattccggaatcaacaagacctttcactcctaattttgttttagtgaattcttctacttcttttgctctttcttcataatctagaatacaacaagttctattactactcaacatttttttcttaattgaatggaatagaaattaattatgatattttttctagtcactacatatgtatatgtagattgagagagagtatgtgataattaattactatttgattatgcatggaatagtaattaattatgacaagctgtattatacaagttgactatggaatctaattgttttaagaagataatataaaacggacgtaggccagctcatgtggccagttacattataatttaatattgagatattgacaatttcatttataatattgccataaatataatttaatatggagttacgaaacttgggtaaaaagtagttacaaaatttgggtaaaaagtaaaatactttggacaatcatagtgtctagcactttttgacgtctcacaattggttaacggtatcctctaaaatatattttttaagttatat

SEQ ID NO: 243397 - DNA, 4670 bp, Cannabis indica
atttttattttcattttttttatgtgggtttttttttttcttggtgcgctttttgcaaatgttatggattttaagactgagaagagaaaccctgttgagattttgtgtttagccatttatttatttattttttctggaatttgaagaatatgagtcttgattcccttgttaatcttttttctgttgccatgtttgaagttttcggttgaacaatgcaaagtgttttctgaagcaatttggagattttaaatggatagaaagaaagggatttatgattttctcattaagctaatttagcataaaaaacttatctttgtctgaattttaagttatatgattttagcttaattggtcaaatgatgagcaattatttgatatgggtttttttctttcaacaaaggtaaatggagtatttggatgaatatgtttgttagtgacaacaattttgttactaaaattccataaaaacatgaactttattatgaaatttcactccatttatgttgcagtaccaaaatctgattgagggggcaaaatgtaagatcaagcacttaagaaatagttgtaaatgaattcccttttggattttgtatgtttaacattctcattacttacaatttctgatcaaagatctcagacatggatgtgtcccggtggattctagagtttctgatccgaagccctggtaaagacaggttagccaaggatgccctatcagttatgccagtaccgaacaatgacttgcgcttgaataagattgctctccttcgaaccatagagggcgaggtctctgatgctatggtcactgaaaccattcttgaaaaactggaattggtggaggcattggattcgaggcaggaaagtggggctgctgcaatggcagactccatgaagggtgcatattgtgctgtggctttagagtgtacagtgaagtttttggtgagtggtggaggaaagcctggtgagaaatacttgaatgccctgaaccgggtttggagagggagggtccgtcagttggagatgtctgggaagagtaagctgttcacgaaggaattgaagaggtgttgggatgaagttgaggctgcaatttcggacaacagtgtgtgtaagaagtttttggttatgaacactcgaaatgaggctgttagattggttttggaatacttgaaagaggcttgggcgctattgggtccttcgtttgtggagtgggcagctaaattgaccactgagcatagaggtctggtgcgtttgggagatggtggagttaggagtagaggggtggagagtgttgaggatgaaccggaggtgggtattgaacgtgtagatgaagagatcgaagtgcaggaaccaacggctgtgaagttggccagtcttggtggaggtgtgagtggtatgcctgaattgataagtgagttcagggaccaggaagataggacagggacgagtaaagatcaagtttgcaataaagatgaagagatcgaagtgcaggaaccaacggctgtgaagttggcaagtcctggtggaggattgagtgtgagtggtatgcctgaattgacaagtgaattcagggaccaggaagataggacgggaacgagtaaagatcaagtttgcaataaagatacggatgttgatgttaccttgcctgattctggacctgccacctttgttaaaggtcctcaactctcagattttatgcagaaaatgttgcttcttgatatcaattggcatgtttttctttttttagtcttttggggcttgagatttgtttgtccaaatgtagttttttgttttgaaaatgtttatggttacagaaattcagagtgaaaaggtggtgaccagaaacaagcaagttgctattaacaaacggcacagaggacgagttaggattgctgaagatgagaattttgaaacaacgaatgtgaaaaccgaaattccatctcaacccctgaagtcgatagagtacgagaagcacttaagtccagtacttcggagctacaagcagtcgtgacagatccacttcctgaggcatcacgagtggctgaagctgtagcaactgatttggcaacaaagaatgtgagccatgagaatcccttagaaagccagaaaggaacagaagcagatgcaacaaccaatccatgtattgagaaaaacaccaactctaacgatcccactcctggtaacccatccaccagtcatcagaacaacaatcctcagcccagtttgatggctcgcaatagtactgcccacacatacgaggtacttatgtttcattcaacttgggacttagtgcagggagtacttgacataaatagttgggatatgaggaatgcaaggttactaaacataacagatgatgtcaatagctgtcttggggagttggtttagggaatttctattaagtttgtcatcttacaatatattaccttatctccatttttcacttggttgttctttataaggacacaatattatagactattctcctaaaatcgtgtatcttgtttttgtagtgggacgattcgattgattcaattgatgactctgatcctcgggcaaatgcgagcagacttaacccaactaggtcaaagagaaaggctgtatctctactaaagaaggatgaatctacaaaatttacaaagagaagaaaagttaagaggtggtcacttttggaggaagacgctttaagggatggtgtgaaaaagtaagtcagtcttttatacaactttgcaaatgaatcagtgttatatattgatacactattgttccaatccaatcttgaaagaataagaacacaggcatttcattgatatcaaagagaaaattacaaagttccaaacttttcgagacagtttggtatagggacccttcttacaatatgccctctatttatactaagactccctttactgttttaacaccttgggattcactcaaagccactaagaatttgacaactcagcctctaaaatcccaatcatttattctaattagatctgttaaaatcagttctgttctttcataaaatttcaatcaaagtgaaacattaacaaacataagatgtaatcatttttgtcttctcattaaggtatggaaagggaaactggaagctaatccttaatacataccacgatttattcgaagaaagaacagaggtaaacaaagtttatgctttctttctccattacaaactttaatattcaagtttaaggtttgaggtttatgtacaggtagatttgaaggacaaatggagaaacatgacaagataatgacacaatgttgagatgagagacttggtttatgttagaattttactaatgtttgatgttatgatcttgtatagttagttggtaaggtttgttttgttgggtttaatgattgtgtaccatgttaaacccaaaacaatcagcaaacaagtgtatgttatagttatagttgtagtttattcatctagaatataacccttttaaggaatatgattgtgtcttgtctttcaactaaagttgagatttttgtgtactgagtcatttgtatatctctataacaggtataaaaaagtctcaaagatttgttttttctcactttaattcctatatttacttttatattaaccctttttctggacaccctttacacattctcattttctttttactattttgattccaaacctttatgccaaatgggcaaatatcatatctatgatctatcatctattgcaatctttgtaatagtagttaaagaataaaatagcaaaagcatatgaaggtgaatttggtaaagaaatgctaaaacacaactttggtattagatcacattaatatattgtggcattatagtaaagaatttatgtacacttaaattatgtatcaaaatattagacactataacatagtagttttttctatggatcacatttatttcatatgaaatccattatttagaaaagtagttttatcttctttcgtaaaaagaaaaagtagtatgtttgtacctagtcactcacacatgtccataactataattttaatgataaatttctcttttaattaagattatcttattgcaattgtagaaatcttctaatgtgctccttgagtttgtctatcttgtattaagggccggctttaggtataggcggtctaggctcgcgcctaaagttcacttattttaggggctcaaataaaataaatattaccatttcaattcagggccaactcttgctattgttaatgaaatttttttttttttttgaaatattgagatttgttactttgtcttgtttagaagcattgatcatcactatggcttcattattagcacttgcaccatggacaaatcaaatgaatggcctctcctagttattttcactaacccaatcatcaagaaatttagctagataactcaatcatcaacactttgttataaaacttcttgcttgaattttttttgtttttctttggatatatttaattttttattttgaaaagttttcggataaaatattatatttttattgatgtaaaggtaaatttcattactaaaatattagaatgtagagattttatggataatgaaaacttgttttgatattggattttgtaagactgtgattttttttaaatatacttattaaataaaaaaatatatattttaaatattttaacaaaaaa

SEQ ID NO: 243398 - DNA, 3249 bp, Cannabis indica
tagtttattacacatatttaatctatatattatattattataaataatataacaaaaacaatccaaagataaggatgtattaaccatactaggaatgaggaactggttaatggcatcctgcaggctttggttggaaacagagttacgtgaggacgattcttcgaatggaacagagttggaaagatcaaagatgctcattggcttgtttcttattttctttgtttatttatttattttttgataatattttctttgtttatttattaagccttattcaatggtcattgggagtggacctatctaaatatagtataagtagctgtggagaactacagtttttttttcgttgttgaagtaggaatagagaggaaaaaatacaaccgaacttttagtgggtaaatacccatttaagtacattataggcgataaaattattaatgtggacctacctagctatatgtcatatactcaaactttattattgatgtggtctagtctccatctatattaataaagtatttttttcttttagtggtgtcaatattttttataagtagcattttatagttagttagcgatattttttaaaaaaattattttcttaaataatataataacaatataacactcacatatctcatattaatattattatatcgtgtatcatatatgttatcgtctataagagggaaaaccatgtgtctctctcgagccccaaaatccgtgtattctttctaacaacacatactgtacttgactattattctatattcaattctattgtaataataccatttcaaaaacaaaataataataaaaaaaattctatgctaatcgatggttgtgtatatatacgacaaatgtttgatagacatagatgagaccatatgcgtgaggtgaaaaatgtgttaattaatgttgcataaaaaatgttgcataaaaaataaatgaatgttatatttaacaatttttttttgttgttgcgaatttacataaaaattattatggtaataaattaaataacatatattaaaaaaagagtatagttaaaatatatgtcaagttatcattaatactaaatgataatattaccactccaattatcaaatatttttatcattattgtgagaagtatttaaacaactctaaaatataagtaaacaataaatgatcaaaagaaaaacagcgaataccttgcttacaacagcaagaattcaaaggagattgcccagaaactagaacaaatgagattataaaatagttcttttaaaattattaaggtgttgttcggtaattattaaaaaatcaaatttttaattaattaatcaaaaactatgaagaaactataaaattttgttaagtaaaattaaaaaaaaaataaaaagacaaaatgattccagaacatgcctttaaggtttagaattatgtttttagaagaataaaactgagaaggagctctgaataaaaagtgaattacatcataaaaatcattaacctagtttcttttctttctccttatactcatttaattttcattatgtcaataattgtgattatttttatggaatagtttttcttaggttaagggctattttaatgctatgaacatgattattattgattaataatatttcgattgattgaattgttcatatgtttatgaatataaagtctgatttttgtcttgttcttgtttggatggccattgaatatgataaggtagtgattgattattattgtaaaattcacctaatagtctacggttctaaattgttggtattgatttcatgaaaactgattatgccaaagtagttcctaaattgtgatgaaacgtgtggcctaagttaaatagattacgcttgttgatttattgcaaagaagaatctatctctattaatcttaatgctttaatttgttgaatcaaattttaagtacttttccttggattgcttagttaaaagaattagttaatagcgcttttcctttgattgatttacatgttagagaatgagataataatttcttttgtgttaatatgtaatgaagagtagaaatatcgttaaatgttaaattatgatatgattatttagtggtggcaaattagttcttaactatcttctatcaaagttaatatcaatatttaatagttgccttgttcttttagtttatgttttttgtgcttaaatcggaaaaaaaaaaattctcttttaaatttttatttataacttgtgaataatagtccttatgggatccacttgtatttactaatatactgaaataattgataaatttaaaagaaataattagtaaatttggtacgacttacgacacgcatcaatacattaataataaacttgtttggaaacttgagaagtatggcttttactctgtcaaaagcagtattggttagctaatcgagatgctaagaaatttgattacttcgacttatgttcgtatttcttgctgatggcaaactctttggaacctcaatttatctccaaaaattaagagttttacttagaggttatcttccaattggattctcaatgtgatgaatttccaaaagcatggttttcacaatgataaacgatgtccaacatgctccattgatttaaaaccaatacatcatgctctgtttaggttgtagcaagcttgaatatgttaggaagttttgtggttttaagcttggtaacccaaatactattgtaaatgatctttttgggtttatttgaaattttcttcaatcttttcctagcaatgaaattgaactggcccttgttacttggtggcgcctatggttcgtcgaaacaaataagtccatgaaaaaaaacatcattccctagtagcaagtaacactgtgggctgcagattttttgtgctcatactaggttgattgtcgacaggattgatcgcctgatcttaagctttcagtgccgttgttggagggggttgtccaacgttggcttcatcatgttgatgggttaattaaagtgaacatggatacatctcttgatactgtgagtgagattcttgtgggttaggcatggttgcctgggattttcttggagtggttattgtgtctgctatttggaagttggagggaagctttcatttagagttggtggaagctttgctatttgtcatgccatttctcaatgcaacttcttttgtattcacaatactaagctattttgtttgaatctgactgcaagagcttgattcttaagcttaataattctatgatgttag

SEQ ID NO: 243399 - DNA, 3544 bp, Cannabis indica
atatctatgagtcaacaaactcaacaaggaaaacatataacatacaatatactactaacttgtatctaggtgcccatacacctatccacatgacttaacagatgagtaagaacgttctttaactaaggcacgaccactgtacaatatgcactatgtaccgatattgtaatagtgttgttagggtttgcactgtacctcgagtaccactaagtgttgtaccacatacactacgtacttatccgtactagcgttggtaacgctctattgtactaattgaacatcatacactgtaccaatgcactcagtaccactaccgtactagtgttggtagcatacaaatcacaaatagcatgcatatatatatatatacattctatgctagttttaccttgtttctgaattcaaatgtgccaatcgacttgaacagaaaaccacgtgctggatggatgccctatgtcacattaacgtaaataggtaaacaacttgctaaaaccctttttggggacctaaacttcaaattaaaagttttcctatcgataaatagcgtgctaataccttaaatatcaagaaagcaccgaaactaaggttctaaaaaaggcccaaaccagtaaaccagatttttggggtcttgccaagtgaaacggttatccaattctacaacacatgcagaactggttaaccagttcataatagaaatctccaaaatcttcataactcactcaaataaaacacaaactccaccaaactttctagaatacatatactaacactcaacaacagaattcacacacgaaaaacaacaaaatcgcaccaaaactaaaaataccattgttgagaaaagttttagttttccaactaaaacttgctcaaccacacaccaaaccagtaaaaccagctcaaacaagcatataacaccaatactatacaacagaaaacaacctcaaacaaaatcccaacaaccagagcctaatttaacatttcatgcaaacctaagagaaacttataaggctttaaaaggattaattctagggtataccttaattatcctttcaaaagcttttgatttccacccttgaatttccagcaagaatcaattagaacaaaaagagatgaaccctaggttcttggttcctccttggttcgaaaaagagagagaaaagataaattttatttctaatttgttttttgtgttttcttgaataaaagttaatgtaattaaactaagtttatctatactaacctaagctaaaataacattccaccaaaatccatcaaagaaaattctctccaaattggcaaaattacaattttacccgtacttcctacttaagtaacttatatgcctaggcgtaaaatggtccacaaccataaccccacttaaacccgatatctcaagtatctcttatgttttgtccctttaagaattaggttctaaacattaccatgtgactctaatggccatctatgacatttactatcgtcaccgagcaaaaatcataaaaattgtatattacatatttagcataaataatacccttagagtttaataaaatctctggatttgagaaattataactctaatgtccatttctaaaaatagaacccacaataaatataaaatcatatataaatataaaatgttaataattaattataattcttttactaatccataatctcatcatgcgatcattacataactataattcttaattagagtaaaattagttaaactaaataatgtgttcaaaacatacaacgaaattactaaattactaattagtaagtaactatagtatactaaatataatttgtagctaactagtaactaatctcactctagattactagctatattataaccgtcattcctcatgcatccataatttatccataacaaaaatcaactaaaaaaattataacaaccaagtttaagagaaacttaaatcaaataatcttatcctaattctacaaaaatttcgccaacataacaaatataattgaaaattcccaagataaaataagcgataattaatcatcattgcattcgccattaatgttttactttaatttttatgagtcaagtgtgttctaggataatagaatttaggattagaaacataattatctttactttagtttaagttttatgagacatctttgttatgtttgaattttatatcacatttcatggtatgttatttttatgagatattttatggtatgtttgaaatttctgttacattttattcatccttaagtgttctaaaatattatttcaatataatttatgaggcttacatctgaaacacctcgaggcttacgaaattactaactagtaactaattatcgtatattaaattattaactagtaataattatagtatactaaattacaaactagtaactaggtctaactctaccaaaattttggaagtgtaacatttataattgaacattcccaaaaaatttaaagctattagtaataacaaaatacaatccacaataatataaaataatcacaataacatttagcaatacaaaaatttgccacccatctgaccgaagtacatgtattcgcagaacctacttcactacggatgaatgtttaagatattcaaactcttctaagcattcataatttaattaataataaaagttaggaaatatataccttaagctaactagaaaccgattaacaccaaataagtaagattcttacaaattgacctcacaacctacaacatatagaaatactacaaaattaaaatttaaatatttaactacttactagttatataatttatgagtaccaatttaataactaattaagttagtagcttattactaactaattactaatgagtaaatagttagtaaaattagtaactagttagtaataacatatgaatatgaataaaaattagtaactagttactaatagtaactaactagtaaaaaaaataaaaacacatgaataaatgaaaaaaaataaaagaattaataattaacatattcaatatacaaaacaatataccttaaaactaaaacacccaacaactaaaatttacctgtctcaccccaaaatactacactaaacactacctgtttatctccatttatatgttcttatatgtttgaatatttatacatacccaaataacccgaatatgtatagttaagtgttatattaccatttcaatccaatccaaaaaaaatataacaaaactattaaggtttagattcttaccttattatcaaaattcgaccattaatatcgacaaaaattcgggtaccacgtacaaccacaagaccacaatcttaacaatctaggaataccctaaaaaatttataaaataaaaaatcaagaaatttatattaatgaaattattagagatcagatttataccttaatggacattgagattcaacgatttctccactaaaagttgcggctggagctacaaccaccacaaccaccatctctaagctcagtataccctaacaaactaaatataagagaatcatgttggaaattatttta

SEQ ID NO: 243400 - DNA, 2871 bp, Cannabis indica
attcatcatatatatcacaatttatttctacacattaacaatgtgggactaactcttaatatgtattcctcattttaccgaaatggatgagtgcgttgttttctttaaagaacttatctatggtgtgaggaagtggcgtactctggagatggtatcttccaacaagaatggactgctattttggtcatggagatggtaatgtatcacatgtatatttgtgtacacatagaccgttcttgtcgactctactttaaaattttagattggaattagttgttcaaattgtataaaataagagtataactactaataaccgaaaaataacagacatacatgtatatgttctttttcatttttaatttttttatttgtatgtgatgaaccctacaatctttggaatgaaaaagtgcacctaacaactcaagtcctcttcaatgcaaatttggatatattatgaaatcaataaatttgccgagatgtttaacttccataactgggatatcactttcttttaatcatgtcagatgttaaaatcagtgattctaatccacatcaatttcaagttattctattatttaaaattacttaattaatataaatatttatttgtcgtttcgcaaacaatactctaatattgttttattaataaactctttaattttaaactctaataatgtgttttaaatggattcacctcttgactttctttcggatgtcaaataaaagcagaaaattgggtttgtatttgtgccaaaacagcaggcagctactccaaagttcatgttggtggctgccatgtccctggcttgtatgtttgccccgatcctgttggctccgaagacctgaagaatgaaacaaaaacaaaagaatggacgaaataatagagcatcaaaaagaattttttctcatattttggattgattattgcgtgcttgcaaattagaaaactttatgagtgaacctactctgggattggtcttgaagtatttttctcactcttgttgccattcctattaataaaagtgaacaaaaatatgaattaaggttggcatgagaggacttacatacatgtgtggaattttaagtttaaacactggtaaaagtacacatagataaagctcagcaactaagcaaagtacaattggaatatacaaggcccaccttactccttccccatcagtttgttcctcaactttgacacctttttgagcgaacaaggaaaaaaatgcagaatcaaatctttactagtcaaaatacttaaataataatttgattaaaacttgttaaaaactattaggattgatgaactacatattatatgtaactagacttgtggagatatgggtatatttaaaataataaattatgttcatggctataaccagaaacttggtggaatgagtgggaagaagaaacaaagagaaaaagataccttctgaaaaacctggaaactgccgaatgaaactactcaggtctggacccgctgctttacctataaaagcagaacataaagttcagtaattgcataaccagaatagcagagataacagtagtaagatattctacttagtagttgaccaatgctggcacctttctgtgtactgccttcttttagtttcctttcctcttcttctttcttcataacttcatgaaataaaaagaataatgttaagccacaacatagctgaagagaaggtagaaacacgtctgatgttgaaaatacaactccaaaagagaacagacagttaaagataagcttaataaaagagacaacgaattaagaaataaatagaagtatggtcattagatcagaagtctcattaggaaagaactaatattaacaagtaaataaaaaggaacacgtacgagcaacattcagacgcacgcgctcacgccttgcttccatttcttccctttcctgaacagggaagaaggtgaacaatattgccagtagatgaaatcataaagccaagtttattatttactcccaacttgatcacaccataactttaatccagtttgatagttgaaacttgcagaaggattttctatctttctgtacattaattactaatatacaacaaggaaaaatgaaggtacttcaagacctataagattttattaatttaccgtgattgtttgaatgaaaattttggacatattaaaggaagacaaatgtgtacagtagcagaaaaacttgtttttttgtgacctccagagaaaacatttcagaagaatggaattttatagataagggttgctgaaaaataattcagttgatgaaattcctcgagtcctagaactcaatatccaaagtttggtcaatgaaatttctttgtgcctgtacataaatgaataccgacagactttccagtttacctctgacgttggagctttcttccgctggccgttcagccaacatatccattcaactacaataatcaataggcaagcatgtactgagtacaggaaaaagaaaatgtaagcacaatagttatgatccacatcttgttctttatcattttgaaacatatcaccttccaagttaaggagatttagttttgttcataatagtatattttactttgagcttaaattagaattcatattgttatgtttggctacacatttgaattaccctcactcttggatcaaatcaacttactagctcggacatgtcataacagaactaattaacattctgttatgacagttatgtcaccaacacagtccaagacctataaaaggaaccctcacctatcgagcttcattgacggagatttagaccaagctacagagagagaattgagagagattgagagaaaaaccagagttgaaagagagagagacagagggagagagagagagaga

SEQ ID NO: 243401 - DNA, 875 bp, Cannabis indica
acagaggctttaatgtcctcaactctcagctcaagaaccttcttagtcaaccccattaacaatgctgagtaagatggtacagtcgaatacttatgcaaaaacatcaacagagatccaagctcatctgtatccaaattcataacacattttaacaacttctttctagacaccaattcctccattactgccacaacattacctggatgcttaccacccaatacagataccaaagcttctttatgcctgaacttcttcaatagcttatcatgctttcctaacttaactttctttggcctcataaccaagtaatctccctctgctggcttctctccttgccctctatggaagtatctgacataagaagacttcaacgcccttacctcaggttcttccaccgttccaaaacccatgaaaccacccaaatctttcttctcttcagcctcctccttggtctttctcttcccggcgtagattatcccgttcgatgttccgataaccctcgttgaactatcaggtgaaaatgccacggacattagtggggctggaaacctcattgaatgagtaaccttcatcttggcataatcaaaaaccttcatatacccatcaagaccaacactcatgattctatactgctgagactcctctccactatctttacccatttttcccacacaaagagaagtcactgtcttgttgtgactttccatcgaacacagcatcttcccacctccaattatatcccaaatcttcacggaatttccgcctgcggtcgccactaacccaccggaaggtaagaatataacgtcttccactggatatccgtgatttatactgatcgccgattttgaatcggctactctcacgtcccaaagttt

SEQ ID NO: 243402 - DNA, 2208 bp, Cannabis indica
ttttccaaccccctctcacatatgagaaagggtattattagctctaatggcttgatgtacaaagtggtcccaatgtgacaaaacgtcattatcttgctgcatgtcgcaggtgctagatgtggccttactttcatacccttgtctagtgtcagacggtcgccggttgcaggagtgcggtcgccggttgcaggagagtggttgcagcgtacgcttggtcgggtcccaaggtcggccttatgtaaatttgggccttagacaaaaataaaaaattggggcccagtgaaaaagtgaggctattgggatttgaactctcaacctcttagttgttaaactaatcaaactactactaggctacaacacatatttaacattaaaagtattattaactattttattactaactatattttattttatttttcgaaatggagccctaagcggtggggggtctaaggcggccgcctccttcgtcttagctcaaggtcggccctgtcgggtccttaaaccttgcaagtctgttgttgtcgctactcatacctcctcgctttcagagtcttcataaggcgtggttgtacgcttttcccttgaacgccttgtcttttggttcctctttccatgtccattttgtcgatgtgcattcacccttcaccttacacttactacccccaaaacacaaacacaacacacacaagcaacacaatggcttgcatgtgagcccccgaggctctctccctgcaccatggttcacaacttccacaacacacacgagcaacataatggctcgcattcgagcccccgaggctctctccttgcaccacgactcgcaacctccacaacacacacacacaacacgcacgagcaacataatggctcgcatgcgaccccccacatgggctcgcatgcgagctcccgaggctctctccttgcaccacagctcgcatcactttctccatgcaccaccagggctcgcatgcgaggccctgtcttgcacccctacttctgcacacacccgcatgcatacaccgaagtgcacatacttgcattcacacatgcatgatttctccttcttacgctcgtactttcgtctttagatcaccacgaggtcagtcatcaaatcatacgggtgaaacccgggaactacaagcatcgacaatgactttatgaaatacctactgagtaggtaagcttgttgaatatgcttccgttaatcgctttgagattagttaactaaccttggaagttaacaacgctaatttttagggttaacattctttttgagacattatttttttcaaaaatatatatgtaatgggtacttgatgagaatttttctattgttgagtaatccctgcgccgtccccgtttttatttaaacgggtattgggtgtatggggtgagtttagaaagtaggtataggagtgggggagcaatcttcgcccctaccctgccccgtttacatccctaagaaaatgtatagttcatttaggaaatctttaggttagtgtagttttttttttttttttttgttggggggtggggtatgtttgtcctaattatttagttgattttgttgtaatagtaattgtggtggaattggtaattgaattaattataatggaattatgattataattgtgatgtttggtttgtttctaaagatgatttaataaagggataattgcggtaaatgtctccagaaatttagagtttatgtagattagtctccaattttgaaaattagtactaatagtctccaatgtgacattttctgtaagtccgttggtcgctctttctaactgatatgttgaactcaaataaagtgtcacatgtcaatttttttattaatccaaataataattataataaaaaaaattaaaataaaatagaaaactaaaaatatattttaaaatcattatgttattttatttattgtattatatatattttttttcttgttcatctttttcatgaacccaaagttcgactgaagcacccccacgaccccaattagaaagagaaactaacgaacttacagaaaatatcaccttaaagattattattgccaatttttaaaattgagaactaatatgcatcaatcctaaattcttagaagggaaatttgattttctatacctacatatacttaatatattttttttaaaacacataacatttaatatttgtaggatatgacacattttagaatat

SEQ ID NO: 243403 - DNA, 5587 bp, Cannabis indica
ctctctctctctctctctctctctctctctctctctctctctctctctctctctctcttcctctcctatcattctctctctagctttttccccccttttttaaaacattttttttcctccgtaaaatacaaacccaaaagagaaatttttttgttaataccctttatttatttttgttgggtttgttttgaattagtctcgttatttgtttgatttgtggttcaattattgtttgactccgattttttcaacactttggaccactgcccaaaaaaaaaaaaaaagaaaggaaaaaagaaagggtctttttatggctcctaatgtttttttgggcattagaaagtttattgtaagatattttaaagctttgggtgcatgattttgactgaggattaatccaatcccattcgggttttctttgctttgtcctaatatctagagcgtggactcttgaaaggttgaatatttgtttcatttcgttggcatttttgtttggttcaaatattttattagtatctgatgttatcttctcatctatttatataaatatatatatattttaataatttcatatgacgaccattctactgcggctgcttatgtctattacaggttccaaaatctatatctttccctgatccagcataaccctctggtttttgataattttctgggattgtttgggtttttgagctggttatgccatcatctgtggatgatgatctactgagtcacagtatcaaggcaggcagatatatcattgctgtatgattttgaagaagtagaggtttaagtctgagggattagtttaataatatcagggaaaaaaatggagcagaaggaggaagagaactggagggaactggtgagaaagatgctccccccaggtgcacctatgcctgaggattcttctcatcttgattattctatagccatggagtatgtgggtccccctgtcgcctatgatgttccgaaagttgagcccctcgatgttaattcgcgggcaatcccaactgcagaaccactatctgaatcaagaaggtctaatctgggtcagccagtgattgaaccaattccactgcctgtatcttgtattgctggtgtgacaagttccctggggcagagtagaagggcatcaggaagttcagagtctgttgtgtctgttttgcaaaaccctgatctttcttcagcctcaccttcagcttctccaggttcagtccataatcctccaaataatgcttccaaacaaggacccaatgaggtcaaaagagctccagttgtcactttcaatactgttgatagatctgagaggaaagaggctgaagtagagaagccagttgttcctgagtatgttggagttatgaaagagaagaagaagaagaagaaaagtagaatatgttatcgttgtggtaaaggaaagtgggaaactaaggagtcttgcctggtttgtgatgcaaagtattgcagcaattgtgtgctaagggcgatgggatccatgcctgagggacgaaagtgtgtaacttgtatcggccagcccattgacgaatcaaaacggttaaagttgggtaagcattcaagggttctctccagattactcagtcctttagaagtcaagcagattatgaaggcggaaaaagaatgctctgctaatcagcttcgaccggagcagctgatagttaatggattccctctgaaaccagaagagatggcagaattacttggatgttctttacctcctcggaagttgaagcctggtagatattggtatgataaagaatctggtctctggggaagggtgagtgtatacttaatagtggatattcaactgaattctttttccattaccttcatgaattggatatgtaagtttcatatccccagaaagttagtaactttaattgtctttacttgatgatattgcaggagggagaaaaaccagatagagtagtaagttcaaacttaaattttactggaaaacttagcccagatgcaagtaatgggaatactgaagtttatatcaatggtagagaaattacaaaacttgaactgaggatactgagagtaagtccttgaccttggtattgaatacatctcagaatgatctcactagcaattttactcataaaaggcctcctaggttattggtattggtcctacttctgttggtccaaaatgcagtgatgatgctcctccgcctatggttacaatgcttccattgtctattccattctcccacttaaaattcttttcaatccaaatattttaaacactagtacaaatgtttgtagttactttttgaatattctttattgttaaatatgtcgaggagaatgcatcaggaaattgcctatacagccatgccacatcttttttgtgtttatattatttagattaaaataaaaattattgttccatccacatgcatgaacacctctcatacatataaaaatgtgtatgaattcatcacctttgatgtcataatttgttgaagggtttgttagaacttgtgactaggtttaagaattttcaacattcaaaatcttaagttggtttttattaaatcatttattaaatttattagagttgttaaattgtctattaattgatcatttttttaggtttagacataagagttgcctaatctctgtggtgctaacttcctttataatatatcagctggcaaatgtgcaatgtccacgtgacacccatttttgggtctatgatgatggccgttacgaggaagaaggtcagaataatatcagaggaaaaatttgggagaaggtatgaagtggaagccatttttggatatttgatttcagagtagattgtttatacttgatatctttatcatactgttttttgctagccaggcgacaacgaggtttgtttgtaccttgttctctttgcctgtgcccaatggtcagccacaaggattaagagacgaggctagcacttataccaccgttcctaattatctggagcagaaaaaggttcaaaagctgcttcttcttggacttcaaggctctggaaccagcactatcttcaagcaggttcagccttttatttataagaaacaaatgttattgaaaaagaaataaaaattggatggcaagttgtcttcaccataaaagaatcagaagttaactggagcagaatgtgattgcagatgtctccatcccaattcaattaaacaaaattgaaacacccttaattcttttatgagaaacagccttagaaacacctggtttttgttttatcttataggaagtaaacatattatcagatattcgtttgttcttgtcatgccaaataatgccagaaatgcattttggagggaactttagtaagaccattacggccattaatattataaatcctactacaaataagtccatgtctatcagaattatagccctagtattttgaattgaagatttgtcttctaacatagcttacatttaatttgcttttcctttatttcacttgaacatctcaccatgaatgggatgatgattgcaaggtttttttatactcttgggtactagctagtagctatcattggttgagttgatgtcaacctcccaccccattaaagatatgccttttgtgtacactcataagtttgtattcgataaacattccttaaattaaatctatctaatcagagataaccttaggcggtaatgtcttgtagagactagtggccaatttgactggtttaggtgaagtttttatggggacggggaatgtattgtactgtcgttcattgttgaaaagttattttaagattcatgaaatctttctttagaatgtcccagtactggtaacacaaattacagaggtataaatcctggtccattgttttgttcttgctattgactaattgccccgtgtcaaatacgttttggttttaatggaaactgttcttacactagaggtttgtcaaatacgtttttgttcttacactagaggtttgttgaacaagttaattcaaatggagtctttgaaggttaaagctgttttcaaggtgtctttgatttttaataatggtgctttcatttttattttgttgttatatgttgatgctaccatctagattgcacacttttgctgctcaagatctctaagactgcaggtcttcttgttgctgtatttaactgtgatgttaattactttcctttatgtaggccaaatttttgtacgggaacaagttcactccagaagaacttcaggacattaagttaatgatccagagtaacatgtacagatatctgagcattttgcttgatgggcgggagcgttttgaggaagaagctctatctaaaatgagagaactaggattctgtgatgaaacagttgaaccaggtaatatttgcatttgtgtgtattagcgtaagtgatatttacttttgtgtggacaccgacacatagaagagaactatgtgtacctttcacatgcaagcacatatctcatgcattggattacctataattcgtctcagttctcatcaaccatattcgctaaagattatagttaataactcagaagccattacttgttttataaaaattatcgtaactatttgagcctacgatcattcattgaaatacagctaaaagctatctcatgtattgttcttgttaatgtggataggggaatgggcaacattctttttcttaaaggcagtaagcacttcatgaattaaaaatatagatgccctaggctcttcacacctactttttttaggtttctatgcttgttgtgtccttgtctataaagttgggagtttcttttaatgagtctatgaagttctgattactttatgtaattttcaggtattcccatctgtcctcagagcagatcgtggaagtctattttttattttattttttgttcggattagatcaagaagtttgatacaactggtgttgtttttttgatatataattctattttaactggattctgagccagatcttcaaaaatatctttagagcattattcctgtgtacagtctatttcttgcagaaattaattacttgaaggaaaaaactcaaaatatttacaagaacttccgtgcgtgacgtcacagtcaagagtcaatataagctgtaggacctctgttcaaggactagcatcttgtatgctgataatagagtgtgaagcttctgttttagctatttaactctgatatttggttatctcaactcttctaacaagatcaataaattgaaacacaaataagaaagaacaaaagaaactggctttgctgcattacagaaaatccagtacttgttatctggtgctcattgctgtcttgtttcaggtggagaggatgattccaatgaaacgactcaatgtgtttactccatcaacccgaggttgaagcatttctctgactggttgctggacattatagctaccggagatttggatgcattcttccctgcagcaacacgtgagtatgctccattagttgaagaggtgtggaaggatcctgctatccaggaaacatttagaagaagtgatgagctccatttcctccctgacgtggcagagtactttttaagcagggtactttttttt

SEQ ID NO: 243404 - DNA, 3730 bp, Cannabis indica
agagagagagagattatcgtgagggtgggcgactgctaatcatatgtaacccttaaatatgagatctgagtgagatataattgtcctcattgtataaacgtcggctattcccttaaaaaatgaaccccacaattttataaatattttaaactgaaaaatgttctcaaggagtgtttacaaccgatggctattcttcactatagacattcacttcatttcttattgacggttcctcaaaaaaaaaaaaaggtttaaggaccggcgggaatataagttgttgaaaaaatattgtcgaaaaattatataaacataattgaagttacaaaaaatacatatatttaaataattagcataaaaagaaaaagtaaaaaagtaaattaagcacaatgaatatagaaatagattggtctatttaagaaaaacgagttgatcgacctaagtaaaacatgacacgaacatgagcacagcacaaaaatatcaaacctacaagtatttgtcgggcctaccatttaaaaatattagcataatacgacacgacacaatctatattttttatgatactacatcaagactcatattttaaaaagcacgaaaaacatatagattggaccgacgcacaaatatatatacaatactaataaatgtagacattgagtgcagaaggctccctaagaaagaaagagagttaatgtattgtatggaaaatttgatgagacccaaccttcagaagtactatactcgtgccaaaattgactgttagcttacctaattcttttcctataataatgtatatagtgatatttaattaccaagatagatacattactggatatctcaactactcatatatccaaataatatgagctgaatcatgatcatgatcttcttaattaaagtgaagagctatatcatcatctgaaacctctctctggtctgcttcgactatacaacgtaagtaatagtagttccacctcttccaatactcttttcattaatcttttcactgtaataaacttttctcagtcttctttcttcttttcgtttaaaaagtttacatacatatagtttcttttgaaaaagaaacctttacacttataccaactatataaatatatattatatataggtgtaaagagtaaattctttaattaacatgtaactcaaataaaaagtttttcattaattatatatatgaattttcagcatgaagggggtcatcaataaccatgcatggtgtgtagagatttatactcgtatgattattaataacttaactttaaaggtgttgattaagttattttttggacactgttcatattcatacttggttttatgttaatactatattaaaaataaaattaccaaaattgaaatcaaagtattattttgtataattttaaagaatactagtacaactaataacttttgtaaaactaaatgaaaaataatatttacctattttatatatcaaattccatatgttagtttcacaaaagttaatacatgcaaaataaacaatatgtaccaatagtaataatgtaattcatatacatgattaaaatgatatgataataaaataattactaatctaattaatctctttgtttatgtacagatactatgtattgaatagagtatagtacttaagtgttaattattattaggtagtaatgcaagtagagaaaaaatcaggtgtatacacgtacgcgtcacaatgggcaatgatctatgcattagcatggtcactaaggcaagacaagcagaatcgtgtagcaatagggagctatctagaggactacagcaacaaggtagagctcgtccaattcaacaccgacacctcggatttcatcaccgatactcgccttttcttcgaccacccttacgctccaacaaacctcatgttcttcccctcagaggacacctcaaatccagaccttttagcctcgtcgggcgactaccttcgcctatggaagatccaccacgatcgaatcgagctcaaatccttacttaacaacaacaaaacaacccaattcaactctgccctaacctcttttgattgggcctcgttcgacactcgcaggatagctgcctcgagtgtcgacacaagctgcaccatttgggatattgagaaggaaattgtggacacacaattagtggcacatgacaaggaagtttacgacatttcttggggtggttacaatgtttttgcatcagtttctggggatggttcggttagggttttcgatttgagagataaagaaagatccaccattatttatgaaaaccctattgagaattgtgccttgttgagattggaatggaataagtttgatccaagatacatggccacgtttggtatggacagtaataaaattgttgttttggatattagggttccaactactcctttagttgagctttgtaggcataaagggagtgttaatgccatttcttggtctcctccattggggaaacaattgtgttctgttggtgatgattcaagggctttgatttgggatgtggtgggacctagttttcgatccgacggtggtgatgatgatgtggagcccaatatgtggtatgcatcgacggctgagattaatcaagtgcgttggtctcccgtggatttggaatggattgctatttctttcttgaataagttacaactattgaagaattaggatgttattattaattaacaaaaattgtattttatatattaattagcatttgataaaagtcccttatatatgtcatttatagtgataaagtacttgtaatatttattctgttcttaataaattagctcatcgaaattttttcatcttaataatgctatatatatattttgtaagaattaatattaataagttattgcaaataaggttgtaatgaaatgtgtactttgtacacgttttccttataaacatgttcatgtgtaatttttatgggttatgacatgtttatggaaatcacatgcatgtattgtaagagtttttggttgagaaaaataaaaataaaaataagaatgcaatgcaatgcaatgtaataagatttaatatatttttttataggaagcgattttaagggctttcaacgtcaattttaataaaatttgctattgacgttgttctaagcaacaagaagaaaagcattagccgacaatatacagatgagtaactatgccgtactttagttattatcaaataatcgacaacatagggaagaattggggttattttgtacaatgacacctttatggcgtcaactattagcaaataacaaaagctgtaatattttatggcattgattatttgcaaataagtgatgtcgtagagtatttatttttaaaactattgaaaattaaattttatttttcacatatgtttttttgtgtattttttattaatttatttaaattaaatattaattttatataattaaaaattaaattaatcatataactaaatatatgtacattattctaaatacatatattacataaatattttaaaagtactccaaatcttttcaaattattaactaactaaacatagaaaaattaaaaaaaatatgtaagttatccaattaaacatagaaaaataaaaaaaataatgaggaaatgacattgtatacccactttactttgtttgttttaacttttacttttattttcttattctttaagatattcccacttttatagatgatgtctccattatacctctta

SEQ ID NO: 243405 - DNA, 4147 bp, Cannabis indica
aaaaaagtacggatttggatcggatgaacacccgtactcatgatcaagacgacatatatcttcatttttgttttgaaagtattagtcaactcttggtacaggagctttccaacattttttaatcatgcaagacctacatagctttttttaattagtttttttttcttttgctgaataatacagatcattataattatagtatctttattatcctgtagtccctactcactggaagtgcaaagaggtgatatatattcttattaggaaaacaacaaatcaattataaagtaacacttaagctgcgaaataacaaagaaagcccatagaggactccaaagatgtaaaactgatatttttctaatttattaattgttgtgaaaaccacacagcatgctcttttataatatctgagtactctagctacccagaacaaattagttaccttgttcttttaatactctctttctctctatattcatgaagaatctcccagttgtgatcatcaccccttcctacttgtttattctcttcttttatcacatctctaccgttaactcctctaccactcctgcctatatccccgtcgataacattgccctcgattgtggggcctcgactgaagacgacacggctgcaccagatggccgaatatggatagcagaggaaccctctaagttcgctcaaacacaagctaatactaatagcagctatgtttccgtggccaagtcccaacccaactctggcaaaaaggtcccctacttcaccgctcgtatcttccgctctcaatttacttacacctttccactcaaggagtctggtccaaaatttgttcgtttgcatttctattcggctcagtacacggatttcgatgcctctaaagcttactttgacgtcaaagccggttcctcctttaccttactcaaaaatttcagtgctagtctcgttgctgaaagcttaaaccaagattctttcatgagagaattctgcgtttacgtagtcgagccaaataaaacattgagcttaacttttattccttcgtcatcatctaataattattcatatgcttttgtcaatggaatcgagattgtttctatgccaaaagatctttattactacgattctatagatcagccgaaatacgtcgacctcatgaataataatcaaatatttcgaatcaatgataatttggcactcgagactattgggagaataaatatgggagggagatcgataccaggaagagatgacactggcatgtatagacaatggtccgatgtaggtagaacaacctttctgactcgcaataaaacccatgtgactgatcataaaccttttgttactacaaattatactaaacctctcaaatactctgaattaataagaaactatactgcacccgatgaggtctaccagtctgctcttttcatgacaaataactcgacctacaacagtctccacaatttgacttccatcttacctgtggacagaggattcaagtatctggttaggcttcatttttgtgagtttcaggaagagatcactaggcccaacgacagatcattcagcatctacgtagccaataatgtggccgagtcattctttgatgttatttcctccagcgggggtaatggaattccgttctaccgagactacgtggtaaatattcaagaccaggactctatttccattgatttagtcccgcttgaaagactaagtagatatactaataccatcttgaacggggttgaagtgttgaaaataagcaatcacggcaatctcgctggaccaaacccagaagtactcggcatagcaaacccatcttccggcacagaaaaaaagaggcagaagaaaacagctctattcattgccattgggagtggcatgggcctactcacaattatattgtgcatagtttgttgggtagcttttggagagtacagaagaaaagagccagagattcgcacaaaggaaaatccaacaaattttcaaaagcttcatcgctgcccgaagagatttgccgccgtttctcactctcggagatcaaaacagcaaccaacgacttcgatgacgagttggtgatcggaaggggaggcttcggcaatgtgttccgagggattatagacgacgagtcaacagttgcggtcaagcggttgaatcctgattcaagacaaggcgcacgcgagttcgttacggaaattgagatgctctctcagcttcgccacgtccatttggtctccttgattggttactgcgacgacggcggcgagatgatcctcgtctatgaatacgtggcaaatgggaccctccgagaccatatttacgggtcaaacaatgacccgcttccgtggaagcagagactagagatttgtgtgggagcggcgcgtgggctacactaccttcacgcaggcgttacaaacacaatcatccatcgcgatgtgaaaaccacaaacattctactggatgataattgggtagccaaggtttcagatttcggattatcccgaattggtgtaactgatactgtggttaatactttagtcaaaggaacattcgggtatttggatccggaatatgccaggaataaccagttaacagacaagtctgacgtgtactctttcggagttgtattgtttgaagtcttgtgcgcgcgaaaagcggtggacgtgaagttggaagatgaccaacgcaacttagtgtattgggcacagaagtgtatcagcgaagggacacttcaaaacataatcgacccgtttttgatgggtaagattgccccagaatgcttcaagaaattcgtagaggtagcacaaagttgtgtgcgtgaacagaggatccaacggcccaagatgcacgatgtgatggaaaatttggagtttgccttgacacttcaagaacaagcagacaatgttaatgaggagagaaatcccggcggtttgtattcgtatccacagctctcattccatgcctcggatagaaatgttgctaggtacgatgatatgtcaggtttgcaaagtacgaccggtttgacctcgtttggttcaaacacaactggattgagctttcctacggtggaaacagaaagtaataatgcagcaaatatgttttcggagtccgctacttcgagatccactcaatgaaataaaatagttgatatggtttgtaataataatataaatctcattagtttgacgtttttcttattgttttactttcatgttgtgatcgtaataagcttgcgtagtgtctgtaagttgtgtgataatgtatgcgcatgagagtaatttgcatgcccactatacctagtttgaagttactggttctttaatactattaattattcgtgagaatttgtacgttatctgcatggtttgttatatatgtaactactaataattagcttgccctggttaaaagttcgatcgattgtgtgtattcttacagctacttataaattgggtgggtaaacaagtcatatcttatcacatatagacataaaaatagcaataaaaagattccaattatcaaaaggaaagattcaattgtaaaaagcaaaatgaaagatgaaacaagccaaagtagctttattgctttttcaaaagctagcagctttcattattgttggatgtaaaaaagactcccaccaaggctagtttagtggtgagggagcttggaacctaagatctctctatactattagtaaaaaactaatatcttaggttgcaataaaagaaaatgtaaaagtaatataatcaaagataaattagatatgcatatcctttgaaaaaaaaaataaatacaagatgaagctgggtaatactaagaggtttataaaaagaaaattatgtcgaattttttgtgaaattgaaataaaaataaaggttcgagagcaaagcaagttaagctgatcggtaaatacagttaaagatatatgtcaccattcaattcgaattagcaaaagtaatatcaccttgcataatatatatggattccaaacattaatcatctggatgtatgagttgaattacttatctctcgttttagtaaactccctcttcagagattatggaagatgttccactaaaaatatttttattattgcttcgactcatattcccccaaagtggatcccgctctaatagctccgaaaaaa

SEQ ID NO: 243406 - DNA, 2124 bp, Cannabis indica
cgtaaagtttttatgctttaaaatgcgaaattgaaccccaaaataacaaaatccttctcaattatgaataaaaaaaccataatccttctcaaaatccttctttagattatggcattgaaaaaccataattttgaataaaaaaaaagagggggactaacctccaataattcatgggttctcttcatgttcatcctgcaaatatcctcacaaaagattttcacaacctccgatcgtctccaccgctcatgaatcccattcacaatgccttctgtaatcccagccttccctaccttcagcttctttttcaactcaatccctaatcttgttaacctcctaagctctgccctcgtcaaggttagctctgccaacgtcggaaccgtgggctccctcatcttcttcgttgactcattgttcttcttctcctgcctcacttggtccctcagttcatgaaacctcttaatgcctgtaccggttcccggttctggaaccggattgtgcggcgtgctccaactagtgtcgattgtgtgaccaacacgatgattggccaaccgttttggcaacggtaagaaaatttcaccagcagaagacttcgcgacatattcgggttcaggacttggaacttcttctgtgaagccaagacctctaagcttctcggcaattctttggatggcggacttaggtagtatggtttgggtttcggatttggagctggagtttcggataatgaatttgtgtgaggtccaactctggcgggtagtgagaatcagcggtgaggagaagaagagtgtaaatgggtggtgagttgggtgttttggcggtagagttggggtgagtagttgagcttgagttagaggggctgacatttttcagtacactgtcatggaattcgggtttcaacaaatgagggagggaattctactcacgtggtacaacactaaatcaatcagtttggtcgaattatagcaagtaacctgcccagataagaaaaaacatactattaacttgtcctggttgggtaaagccattcaatctagctccaatgtatttttttccttctgattttagtatactattatctttcttatcatcctaatatattcaaagtggaagcaataaattaacgtaacaatcaactaaatttaaacatctcaaaaactttcaaacccaaatctcagaatttcatagtgtttctattataagtgccataaattcagtacttagaacacaatggttatgaaaaggcagttcagtaaataattttcttgctaaaaaattgttggaggatgtgatcatgttacttcaaataagtaaaaattccaataactgtttccctactatctttacttccagtaactggttctctcatctcctcacttcaacacaaatgcattatttttttctacttattttggtatgaagttttaagtacaaaaacattttaattaactttgtcaagtttaaccaatctataaagtaaatgagtaaaaaaaaaaagtgataaaagctttctttgatgcattttctcaaacatgtgatttgcataagaaaaaatttgaaaccctctatcaaattatgttatctaaatcactcaaaagattattttatcatcatttgaattatctcggtaatcaagtaaacctacaatatattcaatctaaaacgtataaatattgcaacaaaggattgaaaccctcaaattttaaaaacaggaatcgatccaagtaaaatttctaaagaaaataaaagaaattaaatctcttttgctcaaacaattcatcaaagagaaagataaagaagtaagaaaaactgtatggcagggagataaagaacataccaggacaaaagacaacaatgacgacggtggcaagagatgagtgtcgacaatggtgtgagtgagcagagaagatgacgagggactgttttctttctaaagagattcgattaggaatcccaccattttagttgggactgattatcctacagagcaagagatagaaaagcaaaataagaaaaagtagaaacaaaaatcagggaagcacatttatgtgatgtgcataataataatcacagagaaaatgttcgagttatggaagatacaaaggttgaaccaatcaattagagaca

SEQ ID NO: 243407 - DNA, 1249 bp, Cannabis indica
ataagtagagagagagagagagagagattggagatagataggtgtgggggggtgtggtgcatggtttgagtggcaggtagtgcaacactgcaactgttatttgtctgtgtctgtgttaataagttttcagttttggtggggaatgactttgaaacctctcattctctttcttgctttactacaatatagtaatcttttctctcctgttgccacgtgtacgtaccaacctacacagtctcacaccactactacacctgtgctggcctgtcataataataattattaatactcactcaactctcttaattaagtatacaattaaaactctgtgtttcttttcttttgcttaatcgctttcactcagatgattatgaataataattaatgatcaaatactcatttattcattcattcatgcatggtgaatgaacggtgatgattaggacgttcaggctgaatccaacggccatcgttgcttctgatcatgcccttattctcctcttgtctccaaaatggtggaactaagtaatgatctttcaagaaatcaaatgctttgttcactaaggctgggtatcttccactcgataacacaaatctctcatcttttatgtctgtggattaataataataattaattaacattacccgtgaagcaagtgtaagagagcctccaaattatgagagcacacaggatcattagtgggtttcaaaaacggcgatttcttatgatccaacgccaattccacgcccacatgagagtaacaccacggcaatccctccccgattctcatcaaattgggtaagaagaagagatgtgatataggttgttgttgagaaaggttttttgggtaagtgggattgagaagagtggattaattgtagttgccattattggagattgaattgagtcgagttacgatgagtataagaacaaggtgtgtatatatatatataatataatacacattgaattgatcaatcatatatatagtagagttaaatagtaatcttggtaggttatacgtaaatatgaataaattaatcagttcccatcccatatgatacatgttggcttattatattacttgttaagtagtctttgtagttgcaactctattttaatttttctatataaaaattactaatataataatgtgtgtaagattcctttcactaataataataataatatatgtaattaattagtgtagaacaattaataaaacatgaatgccactcggaaaatggc

SEQ ID NO: 243408 - DNA, 1083 bp, Cannabis indica
acaaatgagagttagttggatcttttcccctcaactgaagcttttttgcaatgggaagtttgctcatatcattgttattgctctgttaagtagttggaaatagataaggttggtatcaaagtttttcgttttctcaattatttaatgggtcattcagactataagaaaactatgatacagaactggtgtaggttaattcacgggaggggtctgaatggtattgtcgataagttcaactggctaaagcattgtttgaagaaattcaacaggaatgagattaaggacatcttcttggcgtttcagagtgctaaggacaatttcattattgcccagtctaacttggcaggcaactccactaatgctagtttacaatctaccaaacgtgttgctcagattaattttaatttaccgaacgtcttccctttggtgatgaaaattcaaactactttcatgctagtataaagaaaaggaatgagcaaaatcatattacgtcatgcatggaaaatggttagattgttgatgattatatgcgagtcatttctcactattttgctcactaccagaaaaattaattcaaacttccttatgtatggtaccaagctcaatttgcaccagcaactccagctcataagacctttttctaataaggaagtgaaggatgcgctgtttagtatccactcaatcaatagtcctggtttggatgagtatggtgttggattcttcaaggagatatggaatgagtttggtaatgaaataacttttgctatcttatcttttttcattgaggggcacattcctaatgagctaaacaagacagctatttccttgatccctaaaaccaatgctctgtcctcggatgtggattataaacttgttgcctattgtaacactttatacaagtgtatctcgaagatgatatgcgctagactgagtgaagtgcttctgtgctttattcatagcaaccaagaagcctttatcaaatagagatttttagcgcacaacatttttatctttcaagacttgtcttaaaggctacattaggaagaacatttaagctcggtgtttgatgaaaattaattttag

SEQ ID NO: 243409 - DNA, 7700 bp, Cannabis indica
ttgaaatcactgcgctctccaccatagtccctgtacgttacttcttcttcttctttttccctttttaatttacttcttcaattcagatttgtgattccattttcatttcaggttctatttcttctccgccacgcaatagcttctccttgcttaatcggtaattggcattttgaaatggttctgtaattcgtgactttgattattgattatatgattaatttaaggtgtgtaattttttttctcagatactgataccgatttgaagaagaaaaatgatgttgcaacagttcattctaagattttgtggaattacatggctacattagttctggatcttcttttcattgttcttcctatcatcttgttcttaactgtaagtgttcgaaagcaactatacattcataattattgatagtgaaaatttctatgtccagaattgaagtatgtcaaccccatgtaatggctaaaatatttgtgctcttaatatctgttctgtcttctgtcttctaatcattctcagtaacaggctttagcagaatggatgtaccaatgtgtgattttgacgacgctgttactgctttttgttgttgtgtcaaaaaggtgaaacttaaattagaaatgttgataccatttgtttacttcttattcttttacatgttgatcacattactaagttggaatgctgtagatactagatggttgcatgttgtagcttatttataaccgttgtgaattcagtagttgatacaagttgaattcacatcattacaggctgacttcttctcctcatgtgaatgatggacccctttctcttaggagaaatatctcctcctacagggtttctatggtatgcagtcttgcacttgcgttgttttgatcttttgtttggttcagttatatttaatttttcatttatcttgaccttaaatgattgatgcagatgattgtaacctgcttaactattttggctgtcgacttcagaatatttcctagaagatatgccaagacagagacttatggtactggcctggtgagcttctttaatcagtacttcagaatattttacctgagtatccttgtgaggttgtcatgtattttcatttgtcagatggatgttggagttggctcatttgtactagcaaattcactagtttcacggcaagcacgtaatatttcatctatgtgagtcactttgagcttttttatattgaaactgttggttttgagttgtgacttttgtgtgtgtgtgtgtctccgtgatttcatgatgaagtgatatggagctggatattaaatttcaatctatatgttgtcttttgtgcatagataagcaagctcgtatgtagagaaattatgcatgagggaaaatgaacatttgtgataacctatagacatgtagcatattagtgcaaagaaacttccaaacaaaactcgatgtgaggctccaagttaagcacaaactgaatacaaatcagttctttatcttagttttacaacctttacctataatcattagagggagctaaatgaagttagttaatttttttttcttgtggttgtgaataaatgtggattgatatgattatgtgatctctcaggaaattgaaatctgctgttctatccaccagtccacttctcatcctaggatttgttcgtcttctatctactgcaggtgttaattatcaggttagattttcttttctttgtaattaatcattgctgtcatatgtcacacagttctcctcaagttttattttatattagttattcacctctgtttccaacattgcatgtgactgagattgaagctcacactattacctccacctctcttttcatttcatttttgttgcattttcttttccagaagagaaattttagtgaatgcatattgctaatctaaaatcaatgaaatgcatatatatttaatgtaatgttaatctgaaatcacttggctgatctcaatattatcatttccgaactgtttcattaatgttgaagtatatgtagtttgttgaaattatgttcacacaactgctgagatataaaatgagaaactaattacttcaaattgttgaagatgttacttgtaatttatactcaaggacaacataataactgtattcatcttggaaactggaggaaaggtttccactttataagtttgattgtaaatgttagccaccgacttcgtgatgaaagctgtttgtttaaaattttaaaatatattactgttacactattttgcaattaaatataagatgctcgtataggtttgagtgaatgttgtaaactatgtttaataatacatagactgacacggtgttgataaatttagcatctaagctcttcaaacacagagtatggcatagaaatacacacactatgatagaccttaaactttaattgatttttgtaagtgtttgtgcttctaaacaatgatatgatggaaaacctgaagctacaaaaaagagaatcgagcaatcatttcagttgatgagtgaattctttcacgcttctgaaaagttttaggtatggaagacaagagcgtggcaccctttgcctctgacatatattttcattagaagtgttttttagagtagcacgtgttccatgccatctctatgtattcctcattgttagatggtgtatatctctcaccttatgaagaatacatgagaccagcaactctatgtcattgtaggttcatgtgggtgaatatggcgtgcactggaatttctttttcacactcgctgccatatcaattcttacatcaataattaatgtccctccacgatattgtggaattcttggttcactaattctagtaggtataatttcagaaccacctttgtatttcatatgtttgaaaaagtaacttttcatttttatattaatttgtaggataccaaagttgcttgatgaaagggttaaatttgtacctcctatctaatgaaaggggaactgatctaatcagccaaaataaggaaggacttttcagtatatttggtatgttttgtcgatcttcttcaaactaagttgtggattctgaactttcatctgtctgaactcctgtcaagaatatataattgtggtaccagatttcacattaaattgatttgtcatttctagaattgagatttcatataattacatggtacatttaaaatagcagtattatacaatttattaaagaaagatcttagaaatgacttcagatttggtaagatattgagcgccattccattggcagtttttatatagctaaatgactggagttcggttgccactacacatagtttgttttgctatatctttcaaatggatattataattaatgtaaaattccagctaaattagtaactttgccaaatacacaagctaaggaggcgaagatgccatgaagattagatcggtaaacaaatattgtgaaatttccaataactgtgcttgaaatccttcagaactagaagtaggagaaaataattttaacattctcttacaccaaatattcttaatagcagtgtaacatgttgggggtgtcgtttttcacacacatttaacaccatttacttaattgctttttatacacatataattgagttttttacaagtaaaattttgccatttattctcaggttattggagtatttaccttattggtgttcagttgggaaactttcttttctttcagaaccaggcatctggaatgagaagcaataaacgggcaagaattggagtctggatactttctcttcttttctggtactgaatcacaacaaaatgaacacttttgtgttctattatttgaacatgggactcctctttgtgatcactaggctatgcatatatgatcaccttcttctgtactagtattgctgaagacttttctaattcccgtgattgatgcatgtgtaggttattgacactgcttatagacaagcatgttgagagagtttcccgaagaatggtaggctttatttatttaatttttaaaatttggaggtgttactagcagatggaaactgatcgaaaactctttctgcagtgcaatctggcctatgtcaccatggtttttgctgtaaatctgcaggttcttttctcctctcccagatttcaatatctaaacatactattgctataacatattatccactttccatgtattgtgtcttaaacagttagttttttgtgtgtgattcagccaatatcttacttcaatttatttactatccactacttgctacttttattatatacacacacatatatatatattttccctatcatttcttgtttattttggttactgataaatgagctgagcttggaacaattgtgtatatttttttatatgtactttacttcaaattatcagtggatatagaagtattcagaaaacattcatggtgtcttaaaatttggccagacttgtgataagatcagagacagaaatagaagaaaaattatattcaagtaccaggaattccagatcctggttctacccagaaaagagcgagccaatacaaattagtcataatccactctactccctcacatatcatttatttgtgaccccgaaaacagaaaacacagttcccgatgatactaacgactagaaacattccacttgtatgccagtactatctagttattactcatacaaccattggtacatcattagaaccaaggtcagtcctgaactttgagggctaaacgcaaaatgtgatatttttaaaaaaattgagggcttttttaatataggaaaaatgggggacatttttaaagaatttggatccttttaattgggggccctaggccgcccctattgcctaatgttgagccttattagagctaaggtatgcgacagcttcttcaagaactaaaatgtttcgtttggtcaatactgaggtgtaagcaactttaacaacaaaaaaattgctaaaaattcttaaaaaataatgaagaaagaggaagtaataagaataagctagacatagattagtagtactacacctttccccacaaagaggtctaagtttggatatcttctccccaatagtaaaaaaaatgacaatgtgataataaattttgtaactcctgaatgagtcactataactcataaaattactagcagaaaaaatcattattccaccacaccattttatagattattatgtaaagcacccaaagtcttatttttccaacacaagctatttgtttcttatttgtcctaccattcaaactttaaacactccatcaagccactgaggctagctcagtggggtgggaggggatgggcaaggtggagttctcagattcgaacacagtactccttggtcatttagttgcagcatttgtgttaagtaattcaaaaaaaaccttgaggcttcatgtaagtcgaagtaaaaaaaaaagtggatattccaaggtagcaagggagtgtgaaattgtcttcgaaataagaagtggactagcctgattttttagttttttaatctagtgttgtaaatggagaaactccagtgttaagaagccagattttcaatagttgtcttgcctaggattagggattgtttcctcgctgtttatttgaaatcatgtcaatcgggatcagcctggttttcttatgtaggctaaagaaaattttctgtattctgaatcatctctcttgatgttatgtaatgactcaacttacttatagtgatttggttgttaattacaaaaagaagtgttttaaacagattctcattcaactaattttaattctgaagggatgtgaatctattaatgcaagataagaacatagtttgaccaatagaagtcttttgttggagtttgagattcgtacatttttatttatattaattaccttttgtcattgtatacttttataaacttgttaatttatgtttatgttttacagaaaaataagttattgtcgtttttatccttcgagttcatttgaatgtatcttgatgaacacactttgaatctttgactaatcattctataaaaagtactcaacagattctctgctgatagttatcttaaaaatcttattacattacaattcaccatgtttgacaatggtatgcacaatggaccaggtattgtccagagtttcaattgcttcttttttgttttgtgctctgtaattcagactcatgccagaatgtctagtggtcaatggctcaactaactgttatactgttactcatcatattctcgattattcatattattttgtcttatctttctgtaaaaacatttgtattatttcactcattaacttgaattatcatgtgtttttcaggtgttaggaatactaatgctctctgattttatccctggaagaaaaatgtctgtgctcgaactagcttataatcaaaacttactggctacctttcttttggtaaacctcaaatcctcctatatcactatttcacttaagtttttttcccctcttattcaaaatgatgtatgttttttccctcctcttcaggcgaacgtgctcactggtctggtaaatttgtctgtgaataccctttttgcatcatcgttaacagctctaactatcttggtcgcctatgcatttattttgtctattattattggattattagatttttatggtgttcgtttaaagttttggtagaactaccgtttataattatatgaacatcgtcagtttgggacataaacagggccaaaatgagccaaagttcacttatctcatgacagcatttttcttgaccttcagtgcaggatttggcatcttaaaattatttgtttttttgttactttggtgtcctgattcctcaaaatgttaaattctgatagattagaggggcaatcaatcatcattaaatttgttactttcttttattttagatatatataatgcagttacacacataaagttgctttaggttcgcctatagtgtcatctcgttatttggaattattttagacataaataaaccatattggaaaagccaggtattttggtatatagatgttgcgttagaataaagataaatgatatgattcgcattagaattttggaataaagatacagtttgatgatgattcatgctctatgaaaatggtcccaatagaattgtgcatacatgttatgtgtacgattaatttcatctcacggccatacccacatccacatgcttgattggatctaaaataaaggaaaataaggcgaaagaaagaaagaaagaaaacgttcctgtacacaaatggtacggtgaagtagaaaaaaaaagtatattttattgtatagatacgattaatcaaaatgaaatgattaagttttttaagtttgagaaaaagtagggttgaaattaggttgagaattagaacgatggttgaggttttctttgttataattaaaagattgttttctctcgagatgagttgaagctgaccgtcacatggatttccctgcagattgtctgacagcttggaccatggtccaagctcgacaatcttcctcttcatatcgtccccacttctttcagataagaaacatctctctctctctctctctctctctctctctctctctctctttagttttttattttgtaaataattatcatgatttgtccttaacatgatttaacttttttatcaatttaaaaaagataattaggatttttacctctaaactttgatatgtacca

SEQ ID NO: 243410 - DNA, 3187 bp, Cannabis indica
aagtgatttttattggtttgacgttcccaacccaaaccccgcgttgcttctctgtccatctctctcagacccaacaaaagcaaccaacagccaatctcacctgtcttctttctcttctcacacaatcacaaaccctagaatttcaataaaggtaatttcttcattcttgatcttcttcttcttcttcttctcctttgttttctctgttgttattattttctgttactctaatttcggctttgacgatccaaacttctatttttatttttgaattttcttgtatccaaacgctctaattttagcatagcccatctgtcaatcctgtgtttttccctatttgactccttcgttttcctttccaattctttccttatcccatacggttctcctatttcttcttgcttggttgttttttcttttttttcaatttcgctattttttttaacccttttgggagaactgggatcatttcatttcagaagtttttcatttttgtgacattataaaactgtattttcttttatggatagaagagattatcagcgaaacggtttagtggtaagaatatattggggagttctttgtttttgaaatatgggattttcattctttggccaataaatgtatgtatgatgcatatttgtatacatggataattcttgtatttcaaaaattattatatattttgtgaagaaaatgaattttccttacagaattgctacagtaatcatttaaataaaaacgtataaatgtatattaaatcactagatagttaaattggtgttgaaatcatcgttttctgtttcatgattaccattgattttcttgtcattttcaatcaaaaacccttgaattgtgttctcaataggtgttttctctgatgcctcagttttatgtcattttcatggttggtgaatgtgcccatgatttctgtctttcaccacacatttttattatatatatatatatatatatatatacatctgatttgatttggaattggtaattgtgttagattgactttgatttggatttggatgccactggctgcatttagctattcaattgttctactttgttacatttgaattaatcggtggatcattcaagaatttgttcttagtttgacacaaattggggattttgtttgttgtattttctgtaagcgttatgttgggattggtatttgtttttgaattgggttgaaattctcatggaattagtatccattacgaatttctaggatgtcttatgcttggggttattatgattcaagatttactcactgtgcaggcacatgcacctcctcctggctactttgtacgtttggaaaacagaactgaagacgatttgtatttgaggaagagagtcaggatgcgtaggtggctttgttgtacttgtcaggtagaagagtcttacccttcaaatgaaaatgagcatttgaagagtccgaggaattattcagatggtatgtacaagcgaagcttttttttgtttttccctatttatatataatatatatatatatatatatcatgacaagcttagaatatagttcaaacaaatgtcttgcaatatatttcataccatattgttgattgtgtttcctatctgtcgttagtgcatttgtcttaatggccgtacctgctgaactcattgagagcttctgttctgtgtatttgtagactattgtagggttcttttgtaatagaaacttctaactataagtcatattgaagtttttcatttctaaaaaactgagaaaaaaaaccttgaaagattctatacatgcattccacacatattatacatctatatgtaagttaaacttctgaccagtctatcattgtttgtaatttgtttttcctctttactattttcttgtttgtttatcaatgtatgataactgggtcttttattttactgatggtaagggaaccaaaagggttcaagagtagcagcgcctgtcaaacctgaagtacaaaaggcagcaccaccacctattgaggtggctgctttgtctctggaagaactcaaagagaagactgataattttggatccaaggcattgattggtgaaggatcctatggaagagtgtattatgcaagcctgaacaatgggaaagctgtggctgtaaagaaacttgatgtttcttctgaacctgagacaaatgttgaatttttgacccaggtgtgcaacaacttaaatgttgatgtgaattgccttgtagctttttaattttctttctgactgtttgatatgaatttttacaggtttccatggtttctagattgaagcaggaaaatcttgttgagttgcttggttattgtgttgaaggaaatcttcgtgtacttgcatatgaatttgccaccatgggatctttacatgacatattgcatggtgaggaatgccactttcatcttgtccattaatttacaaattgatttttcatctttaaaagttgagaatagttgtaacatttcaattttcaaatcacgatttgcaggtagaaagggagttcaaggtgcacaaccaggtccaacacttgattggatgcagcgagtgaggattgctgttgatgcagctagaggattggaatacttgcatgagaaggttcaaccttctataatacatagggatatcagatctagcaatgtgcttctctttgaagacttcaaagccaaggttgcagatttcaacctttcaaatcaggcccctgacatggctgctcgtcttcattctactcgagttttgggaaccttcggttatcatgcaccagagtaatgtttctggaattccttttctgcatctatactagtctatgagacgtttttgtttcacacgtttcttaatcgatattgcctgtgctgtacagcttagttgctgtttttaactggtctaactactaataaccatactttttgtatggtttcatgttcttccgattcagttagagtctgagtaattattttgtttctacattggacaggagtaatggttatcaaaactaggtgatggtaacgtaattaggcatatccttatatttaaagttgttaactgggtattgtttgcaacgctgcagtctttcctataatgaaattctatttctccctctcttttttaatctgaaagcaaaatttttgtgatatttaaatgttattcagttgctaaattgtcattaaattg

SEQ ID NO: 243411 - DNA, 3359 bp, Cannabis indica
aatagcattgaatacatccttttcgagatatactgtcaaactatcattcaactattgatctcccattttgttgcgcatttgttgtgggcaattaatataattaaaagattttttttttagttaagaagtaaaagaaattttttttttcagcatgggcttaagctcacactggtccttcattgggtccaccagtggctaggatcccacatcgaataaatatggatttggttggtagtttatcgcccacttagtcaccccctccataggctagtcttgaagtgagttccacctaagtggttccaacagactaacaatcatagagaaagtaacaatgtacatacctgaagggtgtaaagtccagattctagcttcatgttgtacttctcttcttcatccatctgcaacttagatacttatggctcgctcataaattttttaaataatatatgcacataagaaaatgagctagaatgaaaaattacctctaaatcatcaaattcaaggttgtttaggcgctcagtctctactgttactctgtcagaatatctggaatgacaaaatgaaaagcagcagaaattcagaaagtataaatgttactccaaaacttgaaaagacaagaaaaattaatgagccaacccacctcatatagagttccataagccggtctatcttctcacactcattttccacaaacttactaagtaatctttctcttctagaacccctcaaaattccacctagaatgtgaaggcaagtaagattgtaaagatctatcataagaaaaacggttgtaacaataacaatgtcaagtagttaatgaagagatcacaaagatgtaaaaaagtagtagcatagacgaaaatgggagatacttgtcattgtgtttttagtctctataaccggattaggacattgtaaaagcctcaattgtatttcatgcttctcaaatatatttaaaataatatgacagctaagagcactcacaatagatactctataatagagaattcttgaaatttttaaagaaaccaagtaaatacacactatattagatccactcactgtattagatcgtctaaattgcttcttcattttgaaataaaattaaatttacaattcatgctctatatttataaaagggaaaatactatttaaacctatgtttttcaaaaatcaccaattggacactctattttgttcaatgacaattcagaccctgtgtttttcaaaatagtacaaaatagaccctgagtttaatttctgtcaaattaaaacttaataataacatgacctagaaatgttatgaaaagactggttactattttgcaactgttcgtgctagaaactagtttcaagttagttatattaaaaaaattgatgaaaattgagtgaagtgtctattttgtaccattttaaaaagcacagagtctgaattgtcatttaacaaaatagagattccaatcggtaacttttacaaaacacagaatccaatatgatacttaccctttataaaatactattcattactctaaacataatttaactttttattgccattgacgcatatgccttgcactgcgcatgcgaatgaggcgaggcgtatgatatgcaagccttaggctttgttttgtgttagggctgttgttttgtgggctcacctgggcttttctttagagctatttttaggcttttaaatgacttggcttttgtttgaactttttttaacagatttataataaatagaataggaaagataaatgaaatcctaaaaaccttgaaccatcgaggcatacgacacccctttagcctctaagtcaaaagatcgtgacaggctcacaccagccactcctactcttcatctccctcttgcactatctcctttactgtttcccaaactcaaggaagctcctaagctagtgttggaactaggaaatacgtgttctttatatgttcagagtgtaagtattcctgacatttatgaattatatgagtttgttatagaattatgtgttgtttgttatgaattatatgagttttatgatattttattaagtttttcatcttactgttgaggggtaggcgtcccggggctaagggaaaacacctcggaatctgattccatttttcaaaacattttggtgtaatgtaaatgtttgaggtacaataaaaaaagtgaaatttttgataatgtactttgaaggataaaatagaaaagttgtcgggagtgctctaatacaatataaaacttgtgcggccatgatgttgtaaagtatatagccattcaaaatttcactgaaaacactagtcatttattcctttgtagcccaatgtgaaagaggtccaaataattaagatataaataagtctcgcttaaagttataatggcattccataaaccaaaacataaaaactttctgactttgcaatgtaaattaagattcattgaacttaaacatgtaagtgaacaataaagaataagggttctgttatcattttgcagcaaaaaaagttataaaatagcaaaatcaaaggtgccaaaacttgtcaatgatgaacctgcttaaccttgttacatgaatgaatgcatgtaaatacttatataatataacccatatcacttgcctgcttaccaaataatgatgcaatcaatgaaataagtcgttcttccaagtcctcatgatagtgctctttcttgttctttttgttggtgggaatctgcaaagtacaaatgacaattttttaatacagcttacaatgaacagtaatgaacatgacaaatcaataaatatcttaaagcagtaaaaactgcagagaagataagaaaatgacaaacatttattcattcattgtggcttttctttaagattgtggtacaaattatttgagtttgatgtactttggggacccctactgaatgttgggagatgttgatgttctgtgttagactagaggaagcaaggctagacgagacaagttctttcggtcaccgctgtgtcagctcttctacgttttatggttgacagtctatgcgaaaaaatcaggctctaggtagccctctcgctgcattacttttaagggtttcaaatcatcctctctctattttacttagagatttgaatgtcattttatcttgccttttgcattggtttttgttgtattgccattcaaatgttggtaatactagtggtttttccacattattagagttagtcccacatttctaatgtgaagaaataaattgtgatatataagatgaatgggctactcctcccatagccaattggttttgagatggaaccccattcatcttatcccaacattctaacatggtatcagagccacttgtgatccgttgtgag

SEQ ID NO: 243412 - DNA, 3725 bp, Cannabis indica
taaaaaaattaaaaaaaaaagatgaagaggaagaactgaacaagaaaacaaataaaaaacttatatatcaatggagaaagatagagagaacttgagaaaacagagagtgaaaaaaaaaaacatgatcaataggaagagagaataatggagaagtaggattaaagtgaaacgaacgggtattgaatatttaaagtgtcacatttttcatcattaattttaattaaaaaaaataaagaagtctgtcactaaagtgacaacacaagtcaaatcacaattttatatcacttaaaatataatataataataattaaaaaaataaataataaaaaaagaaatctgtcactaaagttacaacacaaaatcaaatgatacatctatcacttaaaaaataataaaaatagatgaatagatgctcatgatagtacatggtagacaatatacaaaaacaaaataaaaaaaaacaatataaaaataaatattaccgtataataataaaaaaaatgaaaaaaaataatatgggatgtatatttcccttcttttaacaaacgaagaatttttattcaaataattactaaataatacacaccgcctaaacaacaaccaatacaacacaaaaattatttataagtgattatatttttctctctaatagtgagcttgcacaaattacaaaattgaactcttgccttaatgctaaccttaatttgattgttaattgatttgattgaaccacatgaagcttcaaaaacacacttgtttcgatttcaccaatcacgacacattattgctgtcacaataactgaagagatagcatcaaacagaccattgtaaggctcatacttttagagttttatgccttaattaaaatctcaattcaatttgtaaacttttattattatagataacgaaaaaataaattaattataacttagtcaaaattaaacatgattattttgtttaatattaagagatgcaaatataaaatataactcactttgtcaaaagtctactctaatagtgtgccaaatcttgatgctaatatctcacataacaaacaatgatctaaatttagatcacaatatagcatgatgcaaaatttacatcacaataaatactataattttatatttaccattatattatttttaatattttattattaaagtttaagtagcatgctcatttgcattaaatgacttttataattattattattttattattaaatttatatttacttttgtatgtttattattgttttatattttaataaattattagatgaacattaaatgacatattaaattttacatcaagatttacaattatgcttaatggtctaaattctattaaatcgcaaccatgtagctagtcattgttaacgcagatttttattgattaataaatacattttttttgtaattaatatgctcaagaattaaatgaacaatgataataatgataacaataataaatgacaagagaatttttaacgtagttttgaagttaactcttcataatctatgagtccatcttattaaaaaattaataaattgtataccgaatacaatgaattgcatacagaatgaaagatgggtataattctttctctttctcaaattggtcatcccctattccaaagattatgtccctatttggaggagtttagggtgacatttattcccttgggatcctatcgcttgtaatcgttcgtgaaacatgaacaattctcacatttcacatttacattacatgggataatgacaaataatctctcataactgctcttttaactttatctataaatagttatgctgactatgtttcatcctgctcgcaatgtaataattctcctttaaacactttatcatgaatcaatgtctaagtatacgctaagtaatacttctcgcattctcccattaatattaagtgagtcatacgcgagacgcttatcaccatatgacaatgtgcgaggtgaaccatactaaagatgatgtcttatcttctcaacatacttacgagtatgtgggtcaatgagttgcgagctctttggataatttattatctacactttccaaatattttcattctgctgtgtattctgtgtattctgcgagctctttgttcgtctcactggtctcatcataagtagttattattcatggctcaccattgtctgtaagagggtgagtttgaatatttctaccaattgtacttcacaaggtgagctgtctatgtatttattattgcataatttgggctggttcgtattccaacttcattacacgtgtcagcaccatattattacttgaaatattagtaaaataattgccctctaaaaagtattttttacaataaaaatgactttttaattacttaaggggtacaatcatatttttttccatttaaaaattgtacgcattattttggcagttcaaaacttcaaggtacacattgttttagaatttattacaccgactcttcttttcccaatagtttccatctattcaatcaaccatcattatgatcgaatattttttattatttgggtataaaactcaaagttcctcttattctgccattatcatttatgaagatttctgaattgaaaaaaaccttttaccactttgctccctaaaatggcatgccctcattatcccttacatatttcctctgagtatcaagtgatttcactcttcaaactcagaattgacatcgttcgggatctttatattaagagttttcaacaaaaatttcttcaggacttaacttcttacaccaatccattttagaatcagattatctccaatttcaggccatagtttttaaacctcaaattcaaaaatcccaaaccatacttgaaataaacgataaaaagattggagaacacaccactaggagcaaccaagaagagatatccacttactataggcgattcttgaatgaagttatagagggtaaaagtctttgtctgcgaaaagcagctttgacccgagttgcctaatttagcaaatattcccttagcaaagctactatttttatcacaagtcactgttacttttctaccaggtgacttggagtttgatatcatggctcgtaaagctcgcaaatctaaatttccttagaatccctttattacatccgaggcagaattgatcgagtccaaagtccgacaattgctcctcatgtaggttatgttctaaggtcgtgcgacattaggaatgaaaaggtgtaaagaccgcttagtttaatttggaaattagcagttaattatgatttaattatgaaaattatttatagatatttaaataattatttatgttgtttattcgattcctgaatgcattttatgtcatatagtgaaatttcatagtttcgcattttcggtgcccggtaacatggaactcggtgtttggctcagtagaatcacaacttagcatgttagtatagcggggcggtttatagacattgggaatgtcgggaattgttgagaatttagaatttcccaaaataccctttagtacccttgtatgttattttagtgtggaggggcaaaatggtcattatgccccattgatgttttgttctttagtgggttactttaatcttaattttgagtgttattcattaaacttggctgatggttttatgataaatcaatttttataaaccttattttatcaaaaaatcaaagaaagagcaaaattgcattttccttttaaagc

SEQ ID NO: 243413 - DNA, 5321 bp, Cannabis indica
acgtgtcgtcttgcgattagctagcgatactttttaaagactcaatacgtaatcgcaccaatagtaatattgacacgtaaaaattgctagacaccactagtgcctttagtatttctcatatatattttacgatctttgttattggacaccagtagtgaccaacatcttttataagtgacactctacaattggttagtgatactccctaaaaattattttttaaattatatgaaaccttatacaatatgacattaaagaaaatactagccaccactagtgccttttatcaattctcttattttacactccatctttttaactttactctcaaatctcaataccaaacaacacaaaaaaaaaatatatatcatctccatcctttctatactctccaaacatcctactctacctcctatctaccaaacatagccttggtcttaaaagtcattaagaaatcaccattcttatttcttgccctaattctttttctattattttttgttattattatttgagataaattctttctcaaactttgaaattgtaagtgtttctttgattttaacgtagcctttccacacaattattacatttacaccaacttgaatagtttgatgaaggtcaattaattattcattttaaagacgaaaaaaaaacacatcatttgtattcaccaaaaagaacttcatgacaaattatcatatcccactttggggtaattgttagaaattccaagttacttaaactacaattctcaaatttccttctattaatagtaaccctttattgttatataaaaggtaatataaaacaaattttaaaataaataaaatattcctgcatattaaactcagacaatcataaaatccatagcctaaacaatttatgtactaattataaatacaaagttctcgagcaaaatttgagctagaccaaaaattgattatcatttttatgtttccaattttcttttattttgatttctttagagctttagttttccggttcaccgatgcaaccggtgtatctttctccttcttttctttcttacctgacttctcatttgagggcaatttgatttgcttcgatttagtcttaaccattttaaccaacaccgataactcgtccttctctttcttagaagacccaacagcatcagattttagatgctcatttgttacagcttgtggttctacaagtgcaagttgctccacttcccgtgccttctctttttgttgcgagactaaccgagcataagtcgagctactcctgcaacaccaaactcaaaatattaggccaatataactttaaatgtcaattctaattaagagcctcatttgatacaaagctgttggaaaattgattgggttagtacagacatgtgacaaagtctacactttgtcagatacagacaagtaagtactaaatattgataataaggttggagccaaaaaggatatggtgacaataataattgagcatattaatgttgtgtagggaagtgatacctttcgaaacgtgggtcggtgggatcaagagcaaaagcaggtgaactgaaaagggaggagaatctggggtcctcaacaatttgtggtattttgtcatcttctaaagttagtttaatctttttcccatctttacccttcctacgtttcaagttataacccttagcaccagtacccgccgccatggtatcatcatcagcaagtagcaactcaagctcgttttttgtagcttcagcttgcccgctagtatcttcttgtttatttctttttttacttttacctttattagacttcttgggctcttcttcgtcagaatcgtcttcgaaaaagtcgcctggttcgtttattgcctcttgatcattatcactaccttcatcctctgatgaattcttggatctatgctttctaagcttctttttctcgcgttgttctctgagcttggtctcccaaactgtttcttgtttcttatccttcttttccatcatacgcttgcttatatcttccaatcctgtattgaaagtgagttccatgtcctgatcatcatcatcctcttcctcatctccatccgaaccgttaccagacccaagtaaagctcggtacatatctcgctttttctgttttttatcactcttaccctcaccttcttcgtcctcaccttcttcatcgctttcactgtcatcagaagcaagaaactccttcaactctaattctgctagctacatgtcaaaaacagattgcatcagaatcgaagcaataagcaacgacaacaaactacccctaaaacttccaagttttaatccttttcattcgctatttgaatgtagtttacagcatatgcatattattgttcagaaagcaaaaggattcttcccaccatactgaatactccaaattgattgtatcatttcggacccagtttcatacacgaatgttaatatatacaaaggtacaatcaactaaaaataaagaatgtgattgtttagaaaggaaataaatcctaagtgagatagttactcgaactaacgcatcaatgaaaccatccaacatacagaataagcatggtttgtagttcagcagacgtttcttagtacatgacagtatgaaaacatgaataaagtatagagataatcacggattagcataaatcagtaagtaaaaatagaacaaaatcatctcacacacccaacaaatcaactgaaccattaaacaaagttgactgaattgcaagaaaaagtgcatgcggtcaacatattcgaagtcaaaaggtaccaacctgatcggcatcaaattttcttttcagggtttttacacgatccggttcatcctcatcccaagaaagattgatattactgagttggagagctttagtttggaaattcaaaccctcatagtttgcagggacctgagcaaaataaaaatactttaacaaattccatgctagagttagaagaaaagttaaatacttccttttatattggagacatacaagtccttcgacttatcaaggaagtaaaaataaccagcatcatagaatagcttcaagctttcaaataacttttacatacattaaccttagttaaaatgattgctactaacctctgttgcaacatcacggggtgggtgtttaaattccatcgaatcaggaatgaaccttaaatcaagtacattcgatgatctttcaaactcaaccccatcacaagctttgtagaggtaatctgctgtagcaactgagtcacattccaccacagcaaagtaatacctgaagataagtacacatacaaaatattaagcttagaaacatcaaacatgatctcacccgataagaacttcagacagttattggcaaaacctacaaacatgatgtcatgcaataagcaattaaaaaagccaaggaaatgcttagaagataatttaaatgttgatgttgtctttctttccaaaaataatacctaaaacaactagatgcagcataagacaatgaaaaaaataaaaccttgcagactgcaaatagccaaaaaacattcaaactcgcaaaacaaagtggttgaaatcaccttagcctgctcttctcataagcacgcaatttttcattgtccatctcatcatcattgtcatcatcgtcatcgtcatcatcttcaccatttttctcattctcaccatcaaagagggcaacaggaccatgaatttcctcctctttcatacgctgaataccgaattcagatgggtaaacagttacggataccatatgtccatctttaggaagaaaggagctcaacatcatgaacaagtcaacagcctatatataacaaacaaaattttcagcttttaactagatttttttatgtgatatttcaaataaacaatcacaactcaaccatcaaatacaagcatgagcaagccacaattttgaatctagttttccgagattttgtttaaagaaggaacatattatatataaggaatatctgcagcataagtatctaaagttctgagtttttaaccagcataaaccgaacaaattttttaacaacataagtatccaatattagtaaaactataatttccatttgtttatgtcttagctatgtaactatagaagcaaaatataactacacgttcttatccaaatccaatgatttaaaactttgtactaatgaaattgcacgaaaattacaattttactaaaaccgggtattcataccgctaagaaaatgggtttacggtaacaaactcaattcatacgaacacaaattcaattaaaaagttctcaaacataccttaacatgtctccaatccatgttaacaacagcaagcctatgagtttctttttcgatttcaggtacatgttcctcctgtccaaaatgtaactcaaagaaatcaactaaacaatttcattaaccttaaactaacacatcacaaaatttgataatgcaatagcaaaattcagttgatcagagtatgattaagctaaagtaatataccggttcctcaggctcgtactcaacattaagctcttcatcatcatcatcatcatcatcagtatcaatggaagcatccgattcccaactcaccacatcatcgtcatcatcatcatcctcctccgattcagaagcatccgactcaccactctgctcagtctccgattcatctccaccgagtttcaccacagcctcacctttccttcttcctcttcttcttcctcttctttattttcttcaactcgatagtaactcttcaaaaaattatcggaattctgcttcttaggcttacctcgcttgtccaccggagcagaagacggtgcgaatctcttatccgtaaacatacggttgaaacgcgaatcaatctccaccttcgtcttatgctttggagctctcttaaaccgagggtccgattgtacggaagcgaatcgagagtcggtaatgagcttaacatcgggtccgccgccatggctgttggagtgagaatgcttgttcttcttcttcgtcttcttatcggaacccatggagtgatcggagagagagcttaaagcttaggtcttgatgcgaagaagcaaagcaacaatggagattgattaggtcagagagtgagtaacagtgttgattagggtttaacagaatttggagtcgtggttttggagagaagaatttacaaaaataaccataaaggtttcaaatttgcaaaataaccacattttagggattattttataaagagtaatttgcctcataaatacgtaagtttaactgacaaataataataccaactgtcattaaatcgacctgtcatttttttattggtatatttgaactaattttt

SEQ ID NO: 243414 - DNA, 5880 bp, Cannabis indica
gatgggtatttttctaccccgtatctgctcagcggaggatagggacggggcttgcactccccgtccccgtacattaaccacctaatttctatatctatttatattattttttttatgctatattagtttttttttttcatatttgtgaaaaatctcctaattttatttctagttccctttaatactaatatcaacatctctatagggctttgtgatgggaaataggttcaaattgcgttgtccaaaaagttcgtcaaattatgtcactatacaaacttgacctaattcgaaaaaatctaatacgaaaacattcccaatttttccacgattttatagtatttaaagcgaacacggccgaaaccaataattagagtgaaaaatatctttagattgtttgaagaaaaaaatgaaaattgttgaatgttattgaggtgagatataaatgaggaatctgattccaagcgtgttcactacaaaaacaatgacataaataaatatagtgaagtgtcccaccactgagctgcaatctttggacgaccgaccatgcttgactatatgtgtccagttacacagctacactacacactaccattattactttcccgtcaactggtggaaaacctttcactcaatgcattgactatgccaagcataaattcagcagcttagtgcgtttgataatagtatgccaccaaacaaaagttcacacttatgggacccaaccgggcgaccaagctgggagcatcacatacccatgtaccacatttatgaaaactcctctctatttctataattaccatatataaggaggttattgtcaagcagtattacagcatatgagcattaaattcctcaccattaaataataatcacaacaatgccaaaaaaataatataacaatgctcataaatataatccacgatccaatactttgtttaattagggcaataaattaacagtaacaacatatcttctaaagccatattgtccatatgagccatttgacattaagaatttctaatgtgatcaatacaaaacacaaggtaagtgagaaatactagagaaagaaatgtggaagagtctccttctatccacataattattattaattaaacccacttacactttgtatatagattattgcttgggcaccactagtggtgtctaacatctttagatatatcactttgcgattaactagcgatactccttaaaatttattatattaaactttatgggacctcatacttatttggatcaatagtaatattgatatataggaaggtactgttaagacaattaccaatagcagcccctaagaagcatctctgtatggtgtactgctgcacacaacattccctactcttgggagatattttcttgctttgatgtcaatgattgttgcaatgactgtgtgtacgaattctaggatattccctctgctttctattgtgccacttggcatcttgtaattggtctccattgtatcattctctctataaatgaattcgtctcgcttagaatcaattgagctgagttttacaatttcctttcttctaaaatctttcttggtatcagagccataaaggcctacgccaatgtcgacagggaactctcagactccaccccctgcaaacccaccaaatcccaccattgtccctgcttcgagtaatgcaggagctacctacaacaacaatggctcatctagctacagcaccaactttacccagccatttaatacactaaattaacctttctcccttaagcttgacagaaacaacttcaccttatggtcgagtattacatgttgttgcgtcggtactattacattttgcgtcgttttaaaaacctcgctaacacaatagtcgagtgttaataacagacgcaaaatgaaaagcaattttttaaaaaaatttttgcattattcttgtcggtttattttttatcgtcatttaataaaagacgcaaataacatattattagcgtcgtttttaaagagacgggtccaattatttgggtactattcacgtcggtcaatgctatgaatagtagcgttgaccgacgtaaataatgtaatttgtagtagtgtctgttattttaggatattccctcttctttctattgtgccacttggcatcttgtaattggtctccattgtatcattctctctataaatgaattcgtctcgcttagaatcaattgagctgagttttacaatttcctttcttctaaaatctttcttggtatcagagccataaaggcctacgccaatgtcgacagggaactctcagactccaccccctgtaaacccaccaaatcccaccattgtccctgcttcgagtaatgcaggagctacctacaacaacaatggctcatctagctacagcaccaactttacccagccatttaatacactaaatcaacctttctcccttaagcttgacagaaacaacttcaccttatgggagacaatggtttcgaccattattcgagggaataaactcgatggtttcatcaatggaaaccggccatgtcccctagaatttttgcctgcagaaaccacaccctgactatgagcactggattgttagtgaccagttgctcatggggtgcgtttcgtctgctacactgtggcaagcactggaaaacctttttggagctcactcaagggccaaaatggataacaaaagaacacttatacagaaaactatgaaaggtaatacccccatggttgagtatttaaggcagaaaaagatgtgggcagatagcctttgcaggtgacccatatcctgagagtcatcttgtggctaatgttaactcaggtttgggtgctgagtatcttgctattattgttcaaatagaagctagacctaatattttttggcagtaattacaagatatgcttctaggttttgacagcaagcttcaatggcttcatgtcaatggtgaaaaactcaaaaaataatgttgctactcagggaaatacaccaagaccagcagccaatcttgctgctaaaactccaaatcctggcactggtaaaggcaggggccagtttactccccatcatggcaattatggaagctccagcaatcaaccaagtcgtggtggaggatacagaggtcgagtgggtgatcacactccaagcctacttgccaagtatgtggcaagtatggccactcagctgcctattgctacaataggtacggcgaatggtacatgggtcaggaccctcactcacaaggctcacagcagactaatcatactgcttttgttgcatcacctgaggtagttgatagtgacacttaggtatgctgattctggggccagcaaccatgttacctctgctgcaactaatctctaccacaaaactgaatatggtggtaaggaaaagcttacgtattggtgatggtaatcaaatttatatctctcatattggttcaagttcttacaaactaataatgagaagagtttagcacttaatgaggtgttgttagtccctgagattgctaaaaatcttatcagtgtttcaaagttgactgctgataatgaagtgtttattgaatttcatcccaatgtttgttttgtgaaggacaaggtaacaaggaaggtcatgctacaagggaggcttagagatggcttatactagctgaatacctcaccaacatcctctcggaacctacaatcagcttttaataatagtcctaagtttactagtgtgtctgttttgtctaagtcttggagtaacaatgatacctcaaaagccgatgtttggcatagaaggttgggacacccttcattgagagtattaaaacgtgtcttgtcttctcttaatgtaatcatttctagtaatgaaaatgttcacttttgcgatgcttgtcaatatggtaagtcacacgctttacctttcaatttatcacaaaaccgtgcaacaaaagttcttgaattgatccacacagacttgtggggacctgcacccgttcaatccaacaccaactataggtattacacccactttgtggatgatttcagctgattcacctagttatttccccttaaagcaaaggctgatgcactagaagcttttgttcaattcaaagtgtttgctgaaaacaagtttgacaccaaaattaaagcactaagaacagacggaggaggtgaatatccagccttctatgagtgtgtcaaaacacatggaatttacttccatcactcatgtccccacacctctagtcaaaatggtagagccgaaagaaaacacaggcacatagttgaaatgggattgacccttcttggacaagctagtatgccactaaaattttgggttgatgcttttcagacatcagtttacctcataaatagattaccaacaccaatccttaaacataaatcacccttcgagacactctatggaaaaaaacctaattacaagttcctgaaagtttttggagcaacttgtttttcatgtatccgaccctaccaagcccacaaattccaatttcattcactgaagtgtgtcaacctaggctgtagcgactctcataagggttacaaatgcttaagctcaataggtcgtgtctatatctcgaggaatgttaccttcaatgagtcagaatttccatttaaaaagggattcctcaataattatgcacccgaaaaacaagttgttgtttatcaaccaagctggtcccaacttcctaacattacttggtttaatatgtctcaaaataaaacacttaatgcaggtgaaacaacttcagaagcagcatctctaccttctcttgaagcatcaccagccacggccaactcgagtcctgatcaggaaaattttgaggaaactagttctgatccatctgctgccgatgaaactacaatgttaatttcagtgaatttgaaacaagtccaagtgaacaggaggtgacaaatgaaccaagtcttgaataagaacttcagccgccttcaagaccaactcaccctatgattacaagagtaggagctggaattttcaagcctaaggcttatcttggaacatcacagtggaatccacgaaaagaagaaacaagaaatctccaagaagctctaagctcaaaggaatggagtgaagcaatgggaacagaaatctaagctctaaaaaagaacaaaacatggactcttgttccctattctccaaagtacaacctggttgggaacaaatgggttcataaaataaaatacaatgctgacggatctgttcagaggcttaaatctcgtctcgtggccaaaggctttcaccaaagacccggaatagattacagtgaaaccttcagcccagtaattaaggcttcgacagtcagagttatcctcaccatagccgtttcgaagaattgggagataaggcaactcgacatcaacaatgcctttttaaatggtgtgctccaagaagatgtctatgttggaaaatattttaccaggatctagatttactaccaagtatgttggattaacgccctaatatgaattctaaaacaatgaaaataaacacatatgaagttagaaaaccttacagtgggtgcagcggaataatacgactccttccattcagatctctagcccttgattcctttctatagcagagcataataaagatccgaatctggatcttcttttctccttctttgatgcagaatttccatagtcttacatactatgattgagataccacttgatgtgtgtgggcactactcatcactcaaggattttcgaaaatattgagagaagaaaagatagagaggcgtgtgaggcttttttgaatgaaacaaagtgtaatgttgtgtgtatcagtttcctgaagccaacactttctatttatagaaaaccctctaggtttaggttataattgtatg

SEQ ID NO: 243415 - DNA, 4803 bp, Cannabis indica
ttactttttctaccgtgcttgatgtaagtgctagtctttctttgcttgattatggtagacaagtccatggtcttttatgtaaggctggcttggattctgataagtgtacagaaagtgctcttattgacatgtattccaaatgtggcttcataaccgaggcaagaatgattttcgagaggattcccaaccctgatattgttacatggactgctataatatcaagttatgctcaacatggtcttgtggaagatgctctgctactctttaaaagaatggagcaaatgggcgtgaaggcaaatgctgttaccttattgtgcattctgtttgcttgtagccacaggggtatggtggaagaaggtttactttactttcaacgaatgaaggaatgttatggtttggtaccaaagatggaacattatgcttgtattgttgatctctttggtcgtgtaggtcgccttgctgatgctattgacttcatagaaaagatgcctattgagcccaatgaaatgatctggcagaccttgttgggagcatgtagggtccatggaaatgttgaattggggaagatagctgctgacaaaattctttcaattagaccagagtattcagctacttatgttcttctttccaacacttatatggaggcagggagttacgaagatggaattagtttaagacatatgatgaaagaccgaggcataagaaaagaagcgggatgtagttggatttctgtcaaaggcgaaatccacaaattttatgcaggagatcaactacatcaacaaaaggaccatgtatatgctaagttggaggagttaaggatgacaatcaattcaatgaattatgttccagatttgagctacgaatagtaactgaagttggacaaaaactttgagttacttggcggaattaggattggcaaaaagacttgcggggaggtcggagccctgacctgatggggcggctatgagacttgcagagggtgtattccgccaaagaagttattgattctgatttggacgatatagtcgagtatgttctttcaacaaatacaccataggtacagtatcactagagatgaaataatggatagatgtataaagaaaaatgaaaaattatatatttgttcattttttggcaagctggagatgaaataaagattattttgtacagattacaaaaaatatgaagcacaggaagttgtcttatagtgattatagaattttgactacagtaacaaatatataatttgacactataggaggttggatttgtaggttgttaaaagtttggttgatttattgatcaaaaaaactataataatgatatatatttgtcactatttattacaatatatatatggtggtgactagttaatattaatgtgattaatatttcttcttcttcacaagaaaattcttaaaccaatgtgctgagagtttggggtatcttttttgatgatctttgtaatcaacaaagttaatcccaaaccgaactgtgtaacctgaattccattcaaagttgtcaagcaatgaccatgcaaaatatcccttcactttcactccatccctacacacaattaaattcataataaatttaattttactcaaaaagaattaatatattaattaattaattaattatatgaaatatttagttaaatgtaaataattgagagatgattaattacttgatggcctttttgaggtaactaagatgtttgaagtaataatcaactctttgcttgtcgttgagggcttcttctagagataacttgggattattgaactcatcaatgcctacaattaatcaattaattaattatatgtactataaaaaaaattatttttagttataataaaatttatgattgtaagattcgtgactatattaatcacaaaaaaattaaaaatttaccttgtcactattgttaggtttttttttctttttttttttagttgataattcaaaatattaatttatttaattatatatatgaataattacttaccattctcagtgatgtaaatgagtggattgttgtatttttctttggtgtactgtaaaatgttataaattcctagtgggtaaactctgagccaaggtgaagcagcctgtaaataaatcatatgatatatattattatcatgtatatataaagtgtgaaatattattgtatttcatttaatttaatttaatgaacattaataattaattgtacatacacacacctttggaccaatggagacaccatttcgctcagctgtcacatataagatatcataacataaaattaaattcacattaaatagtatgtttgtttattaatagtatatagttaaattcaattaggttagttataactatactatatagaggagtgtaattatgtcttgtataatgtgttcccattcttatatacttctctcctattcaaaactcgctagtcatttaaaattgagaaatgccaaaaaaaaaaaacaaaaacaaatactaattgtgtcaaatgctcgggtcctttctgagcatagcgggttagacttgtgcttagaatccacatagcttagtggaccataattttatttcttcttttaataatatatataattttttttactgattttaaaaatatcatatttatttgtagataatagtctaattttttttttcctatgacctaaagttcaaccataatggtgttattatatattgagttgtatatgttttaatttaataactattataaaagtatcgctaattattttgtaagacgccacctcgtagtgatagattgagtactactagtacctaatagtagtatttattaaaataataataataattattattattatttaatccataaatgagcattgctatgagatgccaatgtgtcaagcaccattatgaagtgacgccttataattggttagttattttttataatatttattaaagtaaaataagtaaaactcgtattaaattttacttatatcgatattacaacttacaagaatgctagatcagctagttgttgattttaattgcagaaaaataatagagattggagaaatttgaaattttcaattgatgatacatattgggtagctcttttcaatatgtatttttttattgttattctgtaaaataatttttaaataaaaaaaattatttgtttctccatcgaatctcagtttcaaaccagtttcaaaccacgcggtagtatgagattagttggaattatttcaaagctgttgatctgtaattttttagtaatattgtgtcacgtggctcgaaatgaaactcatgatcgaaatgtgtagcactaatttttttgttcaaagtatgtagtattagtatttaaaaattttacattttatattttccaatacatttgattatactatggggaagaaagattaatttacaaatttctttatcaaattagggtcaatatttttgtaatagctagggtagtgattatatatataaagtacttacttgtaacattagttcttgagtcggtgttatagcttggaaaggagttattgggcaaatgagtataggctgcataactagttgtgtagtaatttaagccaacaaagtcaaatgatcctttcacaactttggcttcttcttttgtgaactttggaagtctctttcccactagtactttcatactatgtggatactcaccatttcctaagggttccatgcacctacaaattaattacattataccgacatagcgcgttacgagtagatagcagttttttatattataatttattaaatgaaaatatgtagggtccaatattaatttgcaccaataacaatacaagacgttccttaacatttctctattattaataattagggttctccttatagtttttcaaaaatctcttcttgagaaaattattaaaactggtttctatatcaaaagatctttttagaattaaaagttgaaattcattaattacacaactagcaatacaaatattttttaaaacttcataaacctaaaaataacttttaaaactccaaccaaccaaagcctatatatatatatataatcatagtatgaaatagtagtaataatgtaccatccaaaaacgaaatcaagggctcgttttgcagcatttaggttgtgctttgcgttagaatacggctcataccagggcgccaccaatgatattccaatcacgcctttttgagatgcctgcataattaggggcaaaggcagaaaaatattgtgattagggattaatatgcaaaaataaaatttaagaggagccgctaattaagatttttgcatcctgaactttgacatgtaccaaatcattccctctgaacttttaaggtcgttaaaaatgcccctgaactattgagattgttggatttaaggacttttgtctaatttcattcagttttactatttcagtgattgtttatgtactaaatcatgctccccagattttgatatctaccaaatcatgtccctcgaactttgacatgtactcaattatggcccctagaactttcatccatgttagacttttttactaaaattggaaaaaaaaattcttaaatccaacaatctcaatagtttagggggtatttttaacgaccttaaaagttcaggacaaaaatcctaattagctaaaaaataatgatatcatttcctgtagttgagatcaaaaatgtgttatttcacgatgagattgaaagcaattatctttgggatatggcttttatcaaacacgaaaaattactaagtatatcaatagattgatgatttttttt

SEQ ID NO: 243416 - DNA, 3062 bp, Cannabis indica
taatatataattggattggacctagatgaatctgaaaagattggatgtgatccaattaacaaccctaattccacttgttccctctccgtccaaacggtggcaaccaccagcgatccctagcttaagaagaattgatttgataaaaatggtattaggtttcttaacccttaaatcaccatgatcaacacttgctctgttctcaggagatagttgcctgatcaaatggaaatttcaactcaaaggggttttcttgcttgtgacttgtcctgagctgaagcttacaccttatggtcaattgcaatttcaatctcaaagtctctactgtacgagaatcaggtaagttggaacactctcccagcgtttttgtttaaattttagccccaaaagcctttcacacaatttcagttgtctacttgtttttctttttatgtttagtgcagcatagaagcctcacatggcttcaaaacttatggtaatcgcttcccatgaagcagaaaataaaacagaacactccctgagacaagcatttaagctgcttgagccagcgctgaaacccccattttcactcgatatcccaaacccagaagagtacttacagcttaaccgtgcaatagtttatggggtcttatgcgaaccctatttagctaaagcccatattaagcatttacatgccgttgtatctgatgggtatcgattgtttgttggtatgcttgtgaaggttgttgatgaattgtatgtaaaacttttggactctgtgaaagttcaattgatatgggtttgtaaagaaatgatcgatgtatctgctattggttttgatggtctcttagtgtgtttattgaggcaaattgttggtggagattttagtaatggcaatttgtggctgtgttctgagctgttgaatgtctttatgactaaatgggatactcttttagaagcagaaccaatgattttagctagtgctttatacacttatcttcgattattagctgatcactgtaggttaattcacaatacaaaattaggggcattaaagcgattggaggttgagttttgtgttagagtgttgaagcaacagtttcatttgtgcctgaggattgggagagatctcattcgtcttttacaagatttgattcacgtgccggagattagaactatctggaaggatttgatattcaatccaggtgagtttaagactccagaattttcagatatttcacagctttattgcacgaggacatctagtagattttttttacttaggattactccagaaatggaggttcagttgaggttcttgttgacacacgtgaagttggggagccaaaagcgccaccaaacatggtttaccaagaagtttttatgtggcccagagagggagactgtgataagtgacattgttcggtttatatgttgtgcacatcacccgactaaagaaattattcagtcggaaattattccaaggtgggctgttgtaggttggttgctcaaatgttgcacaaaaaattatgttgaagccaatgtgaagcttgctctgttctatgattggctcttttttgatgataaagtagacaaaatcatgaatattgagcctgcagctctgttaatgataaactctataccaaaatatgttgatatgacacacactcttcttgagtttttgttccttcttgtggactactatgatgtggagaggaatgatctcatagttaaaggtgtctccttatcctttaatattattgtacagtttcgagttattcactcattagatgtcttgttttcctgtgctgtactttcaccctttttgaaagaaaggcttgtaaatcttctctctggtaagaagctggaagtctgtacaggcttggattcatcagatgttccccataagtctgcaacaccttcagtatggaacagttcatttgaactggaatctccaacaccatcagcagaccaagaaactatattttcaaagaaaggtggatccgtttgcaaactttctgatgctttggatttgactcaagatgattcggtaacttctggtcatcaaattaatactatagggaatttggttgatagatttgaagaagcatttcagacaccaaatatgtgtctcaagacttttgaacaattattagtgtcttttgtagatcttgataaccgaggacttgcaagtgttttcactgagcttgaagttttatcttctaaaatagccaagctattagaactaaagggttacaaactatttcctccattggaatttcttcaagacaatcctgattacgatgatgaggtagggtctcccactgccttaatacttcgattctttgtcttttctcaacatcagaggatgcaagaaatgcttttgttctgggaaaggaatggctttcctgttggagcacggttattatcatatgcatcacgactagcttacgaggaacaagtgactaactgctcggtagatgaaatgatcgctaatgaatctgctaaagagtgtaaatcaaacgtgaacttactcgcttttcatattaatggctctcatacttttttgaatgccaaaggagatgatatccgtgaaatgatgaataatagttctaaagtggacaaaatatccatctcaaagttggtaaatagtgcgtttgtttcttaccgttgtttcctttctaagaagatctctatgttatcaaaagaagatacatctttgccaaaactcctttgttctgacataatttcttgttctaaatggaagaggagaaatttaaaaaacatgttctgtggtgttttctgtcatctttcagatttatcagttggtgatgaagagttgatcaagttagttgtgaatcaactgagtcacaatcatcttcttgacatccaatttgagattagcctgaagaaattctccatatttggcaagaataatgaaactatttccaatattattaaaagctctttgaattggggttgcctgttgcagcataagttatggggcttgattagatcagagttctcagtttccaaaattgaagtggagaagataattgagagcttcttttgctcatatgctgaat

SEQ ID NO: 243417 - DNA, 5051 bp, Cannabis indica
gaaatcacattaatgagcagtttatttacttttggagtaacttaccctatatactttggttttttttaacttttttttttttcaaatttactagtttgggtttctaaagtggttgctacgctagttgcaataggagtttttatacgtattttttgttgcaatttaggttgcaacgctagttgacaaaaggagtttctatgtagaattaccgtaaaatagaaaaaaaaaactgttttcaagtataaaaagaaaaaaaacccctttacttttataatttggggtatccatttggtaggattcttccccagaggctctactaacaaaactcgtgattttacaagagaacatatggggcatgtcgttttgacatccaactacaggtcgttttatctcaatttagcatgtcagagattttaggattttcctttgggatagtatcccacttattgaatttcgaggggttttaggacagttagggtttagagccagaaaaattcggattcagtactgtttatccatgaatgaatgtttacacctacagcaatgtcctcaaatttaatccctttcccagcaaaattcaacttcaccctcttgccttcttcatctcccaacactcctacttcttctctcttacccagttcttctctcctttctttttcaactagactccattcacacgcctccaaacctcattaccaccaccaccttcccctgcttgccacatcacctaactcacctgcaccttctgttgacgaccaatctgaagaattcagacaagcccaggaagctcttttcgaatttgtccaagctttcggtgtctcccacgaggactcggccgccatttcttcgggctcgccgcggtacctgcaaatgttggttgatggggttcgggatttggacgagcatgagctgtggagctcgtggaagagcgatgaggaagagaagggattgaagttgaaggggtttaaggagaaggtgagttatatggcaatggagaaaggtgataatggcaaggttgcattcttggagagttttgtcgggttgagtctatcttcggctatgaacgttgccaggtatctctcggctgagacgctgccgggtctcattggcaaggtgagaactaagcgaatgctccttttctttttttcttcctgtgaaatgaatttgctgataactttattggattttatgtctataaagtttcattctattaatgggttttggttaattaaccaaattatagatgaactttgagtttgtcttttgtatatagccagcaaaaatgacctgaaagtaagcaatgtgcaagatatgctaacgattaatggcctagagtttataaacttgacttgagtttttttcaattaatgcccatatctatttgacgcagttgatatttgtttagtcaattagttgttggtatgagaagctgttggcagattaaaagcttgtgaaattaattgtcttttattctcttatcacaccctcaagttcttatagcaaggagtagttggataattttaattccttctctgatgttttgttgaagtgcattcattttttttttatagctattgttgaagtcccattgcttatcatccattttggattataggtaaagtatatgaaggaaatcttcttttctggcagtgatgatggaggaattattgggaagaattcccgtcgtatgatgatgcacttatcaattcccgtagatgacgatttgcaacagacattagcattttttgaaaaggtttgatatctgtctttccaatgaagtgtgatgcatttgcttttgaagctgcaagtttcttttacatttcgaataattgtcaataatgaactttgtataattaatctaatgtgttgaagtgtatccccgtcttgatgatttttttaatgtcatcaatggaattttaaacttattttgtagattgaagcaagacgtggcggtttggacatgctgggttccaaggatatctctttcagatatctagtggaatcatttcctcgccttctgctgttaccgctggattcacaaatcagcaccttggtgggatttcttgaaaagattggaatctctggagaatacatgagaaacatacttcttttgttcccacctattatgtttttcaacatcaaagtcattaaaacgagaatgctggcattcaaggaggtattgcttcataacattttatcagtttcattgtacagaagattgtggatttaatacctccaaatgtgctacaatgaatcactataaatgtaccataattagtaagattatattgaattgcaagttagcagagttatttgacttgcatcatatttttcttcattttttttcttgtatattgatttttcttttgtatatcaacattaattggtcttctggccttaatagcatcctctgcctacaattgagcaattttctgccttgcagctcagcatggatgaaagagatattggaaaaatgttgaaaaaatatccatgggtgatagctacaagtattcaagaaaactacaaggatgttagcatttactttgacaaggagaaggtatactattgtacactgcatgctttgtcaagactcactatgaaatcttttcactcctctacccttgcacccttttcgtttcttgtagggtaacagagcatctctccttgctgtcttaaggaatattacttgggtagtttctgtagttctgcattgctactttacctctgaatagcttctggaacaaacttagaagagtccaacatttgttagtccttgctaagatattattaagaaaccacagttttgtagattttaattatatacttccccaaggagcttaatatccttaccaagtagaagttccttttcgtagcttattcgcttttaagtataagcagtgggcttggtaatatctcctttctcttatgtagccctaacatctggtaagagcctagcgagtaagatcattaccgggccaggcctacatgtttttcttgtgttgtccatttcagataagaacaagcttctatatttgattgtatttgaagaacaaatcggaaaaatatattttatggaaatgacaaaatgttgtttgagtaaccggatagcattttgagataaaaagttgcttttgtgacaggtgcctaaagaaagtgttaatcgtgctatcagaagctggcctcatttattgggttgttctaccagcaaaatacatttgatggtcgaagagattgcaagtttaggtgttacaaataagaaactaggtcaggtcatttgtaaaagccctcaaatattgctacggaaacctcaagagtttaacgaggtagtacttttttaaactatgggataatttctcactttagattgatggatcttgtttcatgaatttttaagtgtaatgtctgatatgagcaaaatgtgtttgtagtgaaagtgcattgtaagttgcatcattttttccatttcatatgaatgtttgtttttttttgggggggagtgtatttattgcttgtactacatacaggtggtttcacttttggaagaggtaggatttgacaaagaaacaattggaaaaaatcctttgccgctgtccagaaatatttgctaccagcatcgaaagaactctaaagaggaagcttaaatttctttctgctattggtatttctgaagttcactatccacgggttatcaaaaaataatcctgagctcctggtatctgatattgacagaactctacttccgcggtaccactcttttcctctgaaattagctaatattgttactaataaacagatgtttttctaagtcattttctttgaagacatccaagggagttcattgtctccgcaatgatagttaatgaaattgcagaatcaatttttttttggcaatctcataagagaaggaataaaaatgtaataatctatggtcgtttttctctctgattctggctgaagttttgccatggggaataaaactaacctgggaaatttggtgcacaggatgaagtatttagtgaacatggggttgtctagaagagatgttgcattcatggttcgtagattctcacctctgctcgggtacagcattgaggaggtgatgagaccaaagcttgattttctcgtaaacaccatggagaagccattaagggaggtggtagactatccgaggttcttgagctattcgttggagaagaagataaaaccaaggttctgggctcttaagcaaaggaatatcgaatgtagtttgaaagatatgcttgggaagaatgatgaagaatttgcttctgaatttttacaagctgaaacgacagaagttccaccttccctttcccccttttgaaaggacacaagctttaagaaaagctcaaggtcttcttgtacagtgtttcccttgtgaatagtaaaccacaaatctaaatagtttcattacatttttgtcacaggttttgggtgtatattatatcatttttagagtgataaaaaccattcaaagctctactgaaattgcacttaaaataaaaaaattgtgattgatcttcaatttatatatatatctttttgaaataataaaagaaaataattttttacattaaaattacaatttggtattttatttacaaaattatcttcataagataaggtgtcgacaatatttttatttttaataagcttttatttattgaaatataacttcttttttttttttagtaaagaaagtatgttattcaaatcaaatcaactgttacaggagcactcagaaatttaggacaagcatcagtccacacattaactcctacagaactagtaacagaattaactagtgcgtgggccacaccattcgcaacacgcgaaatggcacaacaagaaccaccacttacagcagctaaaagagaaataatctcttcaacaattggtttaaacacaagaatattatccggagaattaacccaggagcacaccacagaagaatccgactccacacgcaccacagaaaatcccagtctattagcccatgaaagacccacacggagagcaaggagctcggccac

SEQ ID NO: 243418 - DNA, 3300 bp, Cannabis indica
gatacatagtaaattttagaagtaaaaatacccaattagaactaaaaatttagtagacagaacgccaaaggtagaagacacccaaagataagtagaatggacctttacaaaaaaagaaaaaaataaaataaaataaaaaaataaaataaataaataaaggaaaaaaagaaaaaaaaaatagagtgctagtgagtttgtttggtcggaatggaagggagtggaggaagaacaccacctgagcagctaacctcatcttctccaaattcaaagtaagagtctttactatctctaaacctcacttcaaccagattcgatccatccacaattcaaaggtacttgctttcttcttcttttgatgatgatggtgattataataattggggtcacaccaccaaaataaagtattgatttttgatctgtgcttgtttagattattattattattgttaatggagagccaaagcagttctcgtagtccccaactggaatcccaacctcaatcacaaccccaattggagaaacgcccaagttttgggagagggattgagaaacagaagagcttccgaggtggatttatggaaaaacagaagagttttcgtatagtcatggaaaaacagctcagtttcattgggaagaagaccaaagattcacctggtaaaagaggagattcccaccttcatttggcttctcgtgctgggaatttgctcagaatcaaagaaattctccactcttgttcttcttctaacaacaacaatgaagtactcaatttgttgtctaagcaaaaccaggaaggggaaaccccactttatgttgcagcagaaaatgggcattctgtaatcgttggtgagatgcttaagtacatagatcttcatactgcatcactcccagctaggaatggctatgacccttttcacattgctgcaaggcaaggtcatcttgatgtcttaaaggaaatgttgcaagtcttcccgaacttggcaatgactactgatttgtccaatgccacagccttgcacacagctgctactcagggccatattgatgttgttaatctcatgctcgaaacagattcgaatctcgcgaagattgcccgaaataatgggaagacagtgctccattcggctgcaaggatggggcatttggaagtggttaagtctcttcttactaaagatccaagcactggctttaggactgatcaaaagggtcaaactgcactgcatatggctgttaaaggccaaaatgaggagattgtccttgaattgttgaaacctgatccttctgttttgagtgtggaagataataaagggaatacagctttgcatattgctacaaggaagggtcgtattgaggtgcttttttttttttaattgttgtttgcgttaataaatttgtttagttgtgcctttatgatatgagcattgatataagacccaacatctgatgtggcactagctattggttttctataatatttattagattagattagaaaaggtggcacctaatatttaattacaacaatagcgatattgacacctgatatagtgttgggaacctagcaatttccttatgatattcttgtgtcttttcttgcagaatgtgaggcgtttgctgtctgttgaaggcgctaacatcaatgcaattaacaaggctggagaaacacctcttgacattgctgaaaaattcggaactcctgaacttgtcttggttctaaaggaagcaggggcaacgaattctagtgagcaaggaaagcctcagaatcctgctaagcaacttaagcagaccgtgagcgacataaagcacgatgtccgctcacaacttcagcagacacatcaaactggagtgagggtccagaaaattgcaaagaggctaaagaagcttcatattgaagggctgaataatgctataaactctgcaactattgtggcagttctcattgccactgttgctttcgctgccatattcaccgtgcctggccagtttgtagaggagtcggggcctgagagtggacaagcccatatagcaaacaacgcagctttcattgtcttctttgtatttgatagcctggctctatttatatcccttgcagttgttgtagtccagacatcagtagttgtgattgaagagaaggcaaagaggcaacttgtgtttgtgatcaacaagctcatgtggttggcttgtctcttcatttcgattgcgtttatttctcttacatatgttgtggtgggatcacatgctcattggcttgctgtgtatgcaactattataggtagcacaatcatgctcactaccattggctcaatgtgctactgtgtgatcttgcataggatggaggaatcaaaattgaggaatattaggagggccgagagccagtctcggtcttactctgtgtctaatatggcatcagattcagagattttgaacagtgaatataaaagaatgtatgcactttaagctgctgagtatatttagattggattgaggaacgggaacagccatatacatattggtgctgctcctgatattctattctaccaatcagtttctgattgtaagtaaagtaagtactgaagctgaaatgttgtgttacctttgtactatgaatatggaatcctatgctcagacagagttagagaaatcataacagtcattcatctcatcataattcatcatctttcctataaagattgaaactttatactcaatggggaagagtagcagccagccaagtcaagccaagccaatatgtatattcattcaagattcagctactgagtttagttgggccagtaatgtgtttctcctgcaacattttactgaattgacatgagatgttatgattatggtttgtgatccatctttaatgtaactaataataatatttcatagctataccaacttcccattgtctttgtctgatgcttatatcttttattgcactatattattgtctttttatgcatcttcattcatatttaatgtgtttttgtgttttgcttgttcttataaataaataaataataaatagtgctaaaatattaatgttttcaaaatattatatttttgaaaaaagacttgaaaaagtatatttcgcctcaatctaaccttacaaaaacataatattttaaaaatattgtgtataattaaaagagattatttcataaatacataaaaacaacaaaatttttaaaaagataaagtcatataaaattttaaatatttttacaattttaaaaattttatttataaaaaatacagtattttaatatttactatgttgtatttttttattttattatt

SEQ ID NO: 243419 - DNA, 3390 bp, Cannabis indica
ttcttcttctgcatttgctgctactcgttttgctgctttttctgcctctgctgctgctttagctgctgttttcgtttcttctttagcttttgctgctgctctggccgatttcgctacttcttcttccttttttcgcttcttctaaaaaatatataataattacaacattaaaacaaaagagttacaacatgttttgtcaaagttatgcaaaatatccatgaataagaacaagtttcaaattatcttcagggcagtagatgatctgatcaaagtaagagtcacatcttgggtgttgttcttaaatatctaatgattcagctgaagcttcaagtttgaagtcaagagtttaactaattcaagttgtggttttagaaatcataagctattggataatatcgggcggctttcttcaaacttattggggcgctacctcaccttaactcctataattttatttttggacaccttccaagaagacatcatactaggtggaacacatattcaacaaaactcttgtttactttttcgatgtaagacttggattgatacctcaacaacagatgagtatttgtttactcaaaaagtgattgctgagatagataaactgtgaagaatgttcctatggggaactatggacacagaggaacaaagttttaataggtaagtagatttggggccatacaaccaaacaaacaatacagctttgggtgaactgattctggtcttataatctgaagcaggatgtgaagtggtactttatcatagcagcagggaaattcaaggtgagtaaaagtgaattatgctaaagcagtgcagtgccatactaccttgcccatacataatttaatctagtgccaaatttgttagttaactaaagtagcatttatccaattatcaaaactcggctttggcttgggcacatcaatcgtccaaagggagtctttcaaaacataatctcctctttgacactaccagtcccaagagggcattctattccaaattctcggcatcaagattgtactagctaggcaaaatggccgtttcatgtcccatccaatcttatatacgctatttgtactggaaacaacccattcttccaaaatgaaagtcacagtgctacgtgctacttactcttcctgctcctgttaacgctagtgctactcctaacagtgagaacagtcgttggggattcgattgcatgagcaacctactctagcagctagtgtgtgtgtttgataatatgattaacagcactattaaggctagagtttgttttgtaaagacaagctctcaaaataagagagaattggaagctatccattttgtttttagtaaaatatgggaaacattaaatcaagaacttactctagcaaaatcagattccatcttccttctcttggcaataatgttacttagcttcttatcaaagagttttctggtgttgtcatccttgagtacatcatatgaagatttgagtctttgaaatttagctttggcttttgaatcaaatggatttttatcagggtgtaacaacaatgcctttgctttatatgcctttgttatctctttcaatgtaatcttggcaccattcttgccacttggtaacccaagaatctcatagtgatcttcataaacatccatatataaacaaaggtaaagtctttgtaaattttctttgatttgtctgtattactattaggtgtgatattaacaatatatataattcactacatttccaattccaacctgtgtttgaatatttctatatgtaaatgtgaaatattggaattgatggtgattattattaattactatagtaattcttaattaatattacagcattgggtaattaattaaaagataattacattgattacattacattaaatattgtagtgaatcacaagaaatgatgcaattctctatgtagcagactaacaaaagtaccatatgaccttttcttttctcattaaggaaattgaaaggttattcttagtaactgttgtgtttggtcattatccattgaggactgtttctattctaacagttttaactaaccatgtccctactgccacaagtgaggatcaattgtaatcgaagttaagcttcattgagagttcattgggtgaattgattgtaatccaactttgtttttggctcaataatgattctaaagccattggtgctgttctagccgggtatggtaacacagctacaagaaagagaaactatgaaatcatgaagaaaaggtcaaattcatagaagctactggctactcaccaatgtaaacatacttgttaatgttgaatttagtatgttctagtcaaattgtatgatatttaatatttgtgtagtttggataattaacaaccttaactgcaatttcaagtgtatcagacataattgttattatatacactacaaagatagacacaagggaatacatgtggaacttggctgaactattaagagtgattgagacgatgaaggagaagcacagcctgaagaagctgattctcaacctgaaggagaagagaaacttcagaactcgaataagaacaagtagaagaagatgaactatctgcttttgctttggctttggcttcttttgctttaactgttgctgctagtgctgcatttgttgctattattgcttcatctttgtattttgcttctacttctgctgctgctctagcttcttctctcgcttgctctgctgctctcgcttcttctttggctttctctgctactctcgcttcttctctggctcttgcttctgctcttgctcttacttcttctctgattaacgctgctcgtcttgcttcttctttggcttgagccatcgctcttgctctcgcttcttctcttgctttaacttctgttcttgctctcaattcttctctggctttagcttctgctcttgctcttgctctcgcttcttctcttgctctcaattcttccctggctttagcttctgctctttctctcgttctcgcttcttctcttgctctagcttctctacttgctctcgcgtcttctttagctttagcttctgctgctcttgctctcgcttcttctctggcttttgcttcagctgctttggctctctcttcttcttccttctaagaattacaacattagagctaaaaattattaaaacatatcataacatgagcaattcctaaaaatttgaaaaattcatttcatctaccaaccctatcgaaatcagaatccatcttccgtctcttggcatcgcgctcagactctcggcttagctcctcgtcgaacagtttccgagccttgtcatccttaagtatgtcataagaagactgaagcctttggaattgagcagtggcttttgaatcatatggatttttatcagggtgtaac

SEQ ID NO: 243420 - DNA, 3353 bp, Cannabis indica
gacctcatttttcatcatgaagtatctccggagtttggattctctgtatgttaggatggatagaattagcccaagaataaaacaggggcatgcagcttgaaaggaaaaataaatccacttttctaataacacatgcatatcaaatgtgtaactcttttcaaatgactttcagaggcgtgtagcccttactggggaaaacctcacaaagtcaccatatgaatcatgatgctgaccttttttttatttatttttatttgtaatcttctagggtaacttgggaagctatcttcagaggaaaggaaggctctccccatccaaagccttacgctttgctcttgatatagctaggcaagtgcattgctgcagttttatttaagattcaagcaatagatatttgaatgtactgatatatcgttgaatgaatgttttgttttttgataaagagtggtataaaattgtgactgccttaagcttttggttgtttttattcgttcctaccataattgcttgttccatttcctgtcatcaggggaatgaattatcttcatgaatgtaaaccagacccaattattcactgtgatctaaagccaaagtaagacaactaaatgcaaaagtttatagcaaacacaaatatattattattttgttgttgttgcaatgtactcttctttaatattttaagttttcgtaaggtgccagaaatattttgctggataatggaggtcagttgaaggtatctggatttggtttggtaaaattgtcgacaatctcacctgataaggcaaaactggcacaagctgggtgtaaaattgatccatcaagtaagttcttgcataataagctcaacctactactgtccctttcttctctttctagaaataatatgaacctcctagcaataaattaatttttttttgtaaaaggttagcaataaattaattttgcattgtgtgtaggtttatatgtggcaccagaggtttacaaagatgaaatatttgacagaagtgttgatgcatattctttcggtcttattttatatgaggtgtggtgtggtgtatgcttttttttgtgtgtgtgtttttggcttctgttatataatgcacgtgttatatatttatatatttatatatatatattgataagtagaagttagtaatggttagtgtatctattttctgtttccatttttatatgctaaatttttaactgttccttgtgtgtggatgtgtgtagatgatagagggcatacagccattccatcccaagtcttcagaagaggcagcgaaaatgatgtgcttagaaagaaatagaccaccatttagaaacaaatcaaagaattatcctccagatctaaaagagtatgtttaatttcatgaatgtgatcaacccatcttctggaatcatgaatgtgctagtaatagtaatagtaatatgcaggttgattgaggaatgttgggatccagagcctgttgtaaggccaacattttcagagataattgtacgtttgcagaggatagttacaaattgctctaagcagggatggtggaaagacacatttaaacttccttggtacgtaaattggaatcattattagaataaataacaatatattctatggttttggtttgcaattgtgtaatgtgtttaataatctgcaggaaatgaaaaggggacacacacacacacacacacaacacactcacttgtgtcagagatgaagctgccactgctgccgcttcttacaagaataaataaataaataattattaatgaggggagaaagaggatgggttagtaagtccaagtcttttctttttttctttctttctttctttcttcaaaaatgtataattgtgttggaatagttttgttgtatactatgaatattatattcgatcaaaatcaattgtctgtgttttctatagaatcataattttattatatgatatataagttatacttacttcgttctcatttttcagcaaacaatcatataataaaataaaattacatgtcatattgtataatagtattattattatttttttttgcagggaatataatagtattattctgtattaattaatattatgcctaaaatatgtaaatataacatcggactcaacggacgatctctattagttataacattctacattaattaataagagaagggtactatctatgtataaggccaatattaactcaactataatctctaggcgtattatccatctcagtgatctcaccagtatcttattagatccttaaatagtattccattaagtttttaaagagagaataatcacgtcatcattccagagagagagagagagaaggaaatcttaactttattaatttatcacccaaaaaacaaacaagagcaattattcaacaatcataataatatgatttcataagctagctagctagctaacttatttactgcaacacaaagtaggtaccgtcacacacacacacacaagcacacacatataactaaaaatgaccactatgtaaagtgtaaacatacattaaaaactattttgtaaaattattatttagtagttttgatacaaattgacgaatgttattgtgggagctgccaccttgagagattgcttgtatagccacattcctccacttgttagcattgtgtgtgaagtgtgaggttgtgtccccttccataacttgccttatgcaattctcaacctcattcctccccacaatcccattctcatcaaccttcactctcaccccaaccttccacacatcctcaatcagcttagcatcagtgggctgatcagtccactggggcattcccaccattggcactcccaagctcagtgcctcaacagttgagttccagccacagtgagtgaaaaaacaccccacagccccatgtgataggatctccatttggggtacccaattcagtatgagacctctctcacctatttcctcttccaagttaggaggaagctttgcccgttcctctgaggacctaagaacccacaagaagttgaagtgtgtggcattgagacccaatgccagctcctccatttgggtggcacttaagcttgccatgcttccaaaggccacgtatacaactgactttggtggcttagtgttgagccattgtatgatgggagcagaggagtctggctcaaacagatcgtatccatattcattgtcgtcttggaagctcttgtctaggtagaacagtggaactgttggccctattgttagcactggacaaacctttgacatacaatccaccacctgttcattcattacacacatgacacatatcattatttattaaacctacgtacgtgtaagagaattacagt

SEQ ID NO: 243421 - DNA, 3283 bp, Cannabis indica
ttttactatatgaagaaattttagaaatgttgtagtgagcttagatttcttgtaagtgaacatgggagagattagggattttaagctgagaatttgagatttgttatattttgtaacttctactactgattgataacattttttcgtgttttgtttctgtgatttgctttcacaaaggttcgatagtgttgtaatttcaccatgtacataaagcaggtaagggtatctggtgcctggaaggattataatttcattttcatttaatttttcagattttcatggtaatatttgtgttaatttggttgtaggtgataattgaaggatttaagagctacaaggaacaagttgctactgacccttttagtccgaaggtcaattgtgttggtaatgttgtttttacgtttgtattataattttatactaaagttgtaatcaagcatctagttcctgttcatttttctcagtacataacttgaaactttgattctttttcctaagaaagccaggatttggcatccgtcaaattttcttaagctcaagctcttgaattttagaaaggaattttctgcaacttcagtgccattttatatatatatcttactatttatggaggaccattcatgtttctgcatctgcaatatattttattgattttggtgataatataaaaacttgggattcatcgtcctttagaaatttagtgtgcaatctttttattttgatgtcattactatttatcttatgagtaaggatatgtgcacacataaagtacacatgaacttattgataattgttttagaagagaagaataaccaataaagaataaaagagatgtgaaataagggttttattcaattgcaaagtaaaagtaaaaaaaataacaactaataagaaagctttatataggcaactaacataaaaagctaaaacgaaaaaaaactaaaataactctaagtaactatttaatacttatcacacacttatgtatgtagcaatttttcttttatcaattgtattgttttatgatgaaagtaaattgccacataagtgtgtgttaagtttgtgtgtaatttatgtatgcataattgcatatatcattactgttatcttattttgctcttagtgtaactagtcttgttatggctactcttttctaatatcatgtgaacaatttaatttacagttggtgctaatggctctggcaagactaactttttccatggtatggtttacattctcatctcactcatactttacttttagtggttttgatattgttttttctaataagtggacatcatctttatctgatctgtatgaattttcaaataaattatttgcagcgatccgttttgtactaagtgacctctaccagaacctccgcagtgaagatagggttgcactacttcatgtatgtgttattccctggcttgtattttccatgccttttggtgcaactgactttttaattttaacgtcttttttcgtgtatcattgaacaggaaggtgcaggccatcaagttactactgcatttgttgagatcttgtttgacaattcggacaatcgtattccggtactatcctaatttaaaatctgaatgggaaggatagaggattaaattgagaaacatgagaatgcacattttattatctaatgtgaacatttctaacacaactggcaatttgggtagtctccccagcccttcactttatttgaaattttctagagagagatataataagtaaatcataggattttcttcattttatttttctacatatttgtattctcatgtttattatgcatttcgcatgagaaataactaatataggtgcttccttagagagttgacctcagtccggaatcattattcatctattaggccatatctccatgtttcaggttgataaagaggaagtgcgcttgcgtagaacaattaatcaaaagaaggatgaatatttcttggatggaaagcacatcacgtaagttatttacatctagcaatttgctgtgttctctacatacttttttgttggaaactttgaatgatgacagataatgattttcaggaaaacagaggttatgaatttactggaaagtgctgggttttctcgatccaatccttactatgttgtgcaacaaggaaaggtatgactcttctagtagtctgaagtatgaattctacttgaaaatcttcatgcaagcattttagattaatgtattgcttccctttaacagatagcttcattaactttgatgaaagactctgagaggcttgatttactcaaagaaattggtggcactcgagtgtacgaggaaagacgtcgggaaagtttaaaaatcatgcaggaaactggcgagtcactgttaagctgcttgtgttttagtacattactagtgttcttttaccaaactgtggttatttatccttgcaatttttttttttttggttaaacaggtaataaaaggaagcagataattcaggttgttcagtacttagatgagagattaagggaattagatgaggagaaagaggaattaaggaaatatcagcaacttgacaagcagcgtaaatctctggaatacactatttatgacaaggaacttcatgatgctcggcagaagttggcagaggtaaatgatcacttgtttaattgtttagatttagaggctgttatttttcgcttggactgtgcattttgttcatttatattatcgttgttcctgaattttttattgtccttgtttgtttgtgaatatgtttcaagaacaacccaccatatgagctctagcaaaactagtttttacaggactatcccaaccttaagcacaaatgtgtgtgatacgtttgaatttcatctttacacatttatttattttgtcagaaaacaacattattgtttgtttatttttgaaaaaagaaacataaattgaattgataagcaataatgcaagagaagagttacattgaaatatttaaagaaaggactacatgccttttctgttgttgggaaaaaaataaacatttaattcttttgctgaagaacatggccattatatgaaaacaaacataaggttataatacaatgttaagatatgttgagattataaccttgtaaaagataaccaaatattgatctcctccttgaatgctctcttctctctcctccctctgagagacgtctccatgcattccgggggttcccatggtccttctgaccatggatggcaccaaaaccctactggttttgggaagaaaaaaggtcattaccccactggttt

SEQ ID NO: 243422 - DNA, 9719 bp, Cannabis indica
tggtggatccacgtcacttagactcacattcacctcaccaaacgatctaaatatctcttccatcgtgaatggtatactgcaaaaattcagatcattaatacattttataaagatcctcattcatgattttgtcactttgtaaaagtttcacaattgttttcacatgataatgtgagacttttgttcaattctaatcagcaaaatttcacatccccaaatattgacgctatttattagtcaaaagccaaaaattaaatattggcactatttaacactatgatttctgaatgtagtagtccttcctagcatgtgactggactaatttttttttaccaagattaaaaaacacaagatattcagtattacaaaaagcaccaacaaattttcagttaaaggttggattcttattttaaaagttttgttttgccagataattttctttttaatcacaagttgtgttgtgagttcacgctaaaaaattttgatgtttttgatctgctatttatgataatatgatgacctatattcttaaactaccacaagggagtgtcttactagtatagttaaacagtaatattatataatacctggaatcaacatccaataagaacgaattattgggcatgctaattgaatcttctgccattagcactctcatctttccaatggcctgattgaatgagaaaaggtcatatacaaggacataattagtatgaaatttaatgcataaattttgcagaatataaagtacctctgaagataatccttgagctccatatttatcgtcccagaacattgtgccaattctatatatttgtgggacgcttagtatctgattagaccataattattgagagaaaaaattattaatggtaagcctaattgagacattaaagatcctcatgagaaatagaattaactaatattgtgtaaataccgggcatagttcatttgtaatttcatccaaagacttttgagttttctggtgtaaaacctgcattgatcatggaagaagaatacaattataactcaagcaaaaactggaaaatgtgaaccgtctagaaaataatatctaattatttgccactaattacatggaaactattagtcaacaagaaagctaagtaaacatttgaattattggatgatgaaattttattgagtgttcatgctgcataattcccgaaacttttttatgtaattatgaagctattcaaaggaatcattaagaaaatttaagaggaaaaagaaaaaggaaaatggcttatttggtagaaagaacctaccaaaaatcctacagcttgtcttatgtgttggagttcttcccaggaggatcctgttaactgcagacataaaaatcacatgttatgacaataaagttaagtatgtattgattacatttgtcaaagtaaagataggccaaagcacttgaagctacctcattagttgctttaagacaccaatgctccagttcggtgagacctgccttcaaatactcgccattgctaaaagagcagcactctcgtcgcagcaacaagctacatgggaagagagaaacagattacaaaaagagtaagtagagagtatccagggatatttattgactaatttcatgtaaaatttctttcaaattctattttttgctgacctgttgaagagctgtacattgatgaacgagaatacttgactgaagatttttcttgtgatcatgttaggaacctgctcaaggttaatgcacggcaaaattttaacgtgtaacatgataattttcttagttaacaatgattcttaaaagttaagctacattttacttacatggttctcagacaaaatagccaatgtttggtctaattcattgacaatgctttgccagtgtacatttgatgcttgctgttttgctactatgtttgaatgaatatttctagatgaccccctaattgttcttgctcttatagatcttggtgcctgcataattaatggttaaacttgtaagtatatacagatgcaaaatcatgagctaaatgaatattttattcagttagtatatgtgtgtatatagaatgctcacctgaatgcacaagtgcaagaatgagctaatctccttcttcaaacgatcacggatcattccatagattttctcaacacatgcagttagatgttgcttaaatagcaaggcagggtacttggcttctactttaggctgctcaccgagctttcccagtattccgctgtagccatttgaaacacccatgcccattgaagatgaatggaaaccctaaaattttatgtagttagcagtgatgttaaaacttctgtatagtttccatttttatgttaccaaagactgcaagcgtgtgtagatttagacttacttttgccattctaccaaataatgtagaaggggaagaccgactacgatgagaagcaccattaggattattgctagccttgagtgtagtttgcagaaggaacaagagggtagaagttgtggaaagccaatatgcaagttcattgatgttgtcttggttcttgaatagcacaatacaagttatcacaatttagaccattcagttcattatgtgatattgacatcagaagcagaaattaaatcataaaattttgtttgacatatattacctctatttctgatcgaattgcatgaataattctatcaaatatggttgtcttctctgcttcaaaagatctccattgaagtagtgctttgtacacaacacaggcagcgaccggcctgttcttgtcaaattgcttatcttctgtgagacacttcacaagcatatcttgactttcctgtttacagaatttctagattagtttcttttactgataagacatgcagaagacaactaatctgtttgcataatatgcctggaattttagtttcagttacacacctgttgtcggtcagtgagagatctttgtttagttagctgtgagaaagcaggaacatgttcctgaaacagcaatttttacttcgtgtcaggttactgatgtcagatatgtatggttagtaatatttgccaaaaaatttaatataaaccttttcgttttggaatttctcctctgtgtgatgcccattatcatgaacctgcaccatcacagaatgtcattagcaaggaaaacctaagtatatctcaacattcaaaattttgcagctttaccttgattggtgtttgtggcatttctgaaacaattttttgttccacaatgactacagccttgttccgaagattttcgttctctgattccaattctgcaaccttactcttgaggctggaaaaagtagatgattcagaattaagcaatagagggagtaaaattttctgtacatgtcagtgtaacaaatttctgaaacaaaaatataaagcttaagactgaatctatatttctaaaggaaattcccccacataagatagtctgtgctacttatgtagaatcttactcttttaactcttctgacaggtcttcgttggttgaagcaacaagagcctgttggcgcagcacctgattttccgattcaatgttggataagtttgattcaagcctgatgagtaacaaaagttataagttagtcaaccataatgtcttgtagaaaatgttggcaaaatactctttctagagtacatgcctttcaatagtctcttgcagttgccttgcattcagttgtgcttcttctgcctctttaagcctttcttcactttctttctccacttgagaaaacttttcctcaaaatcctcaaatttcttctttatttcactcagctcatcctatatgtattcaaaagtaaaattagacatgtgccaccacatcacattgtgcataacaaagctgtttcacaaatacgtgtgtgtatgtgtatgtctgtgtgttcatttttgtcaacattttggtaactaagtaggaattttcagtgtaaagtgactttttttgttatttactacctctagttcttgattttgttttctcagcaaatctagtttagtatcatccactactggcacctcctttattactggcggagcttgttcgattgctaattttgccgcttctttctcatgaataattgcagtatgtgcttcttctaacttttcttgcatttcatgtaatgtgctttgtaacttagcaatttcttgccccttagcttcttcaagatcaatctgtgaaacaaaggtatgtggagctatattattataatagatttgtcattctctagccattattttcattaaattttggggtaattatgaaatcattgacaaagaataaataagacaattcatattgaaggtatgtttttgtatgctctacagccagggatgtaggcaatcaattaattagcgtgaaacatttaacctgactgagcctaacaacttggaattcggattggtaactgtttcctgtattcttcagttaaagggttattaggtagagagagtatattaccctcaagtgcttttcaaattctagtctccatgaaagctcttcaacacgcttctccaacttgtccttagcttccttgagggcacccgtttctcttgcagcctgcaatggagaatatttttcaatctgttgcagtgcattcttttttctctattgagctacattacatataatatttcgataacagaaattgagtgagtaattactaaatattatgactccggaagaagccaatcttaccattttgagctttctaagttcctttctcgccacctttgatctccatagacattgaagtgcaagagtggcgatcttttgatgtttataagtagaaagagcatgatgacttctccaccatgtctgtaaagaaggagcagttgtaattatcagtttaaagctattatgttatagtaaagagtgaagacccttataattctatatggcattacttttataacaaagatctcaaattctcttttattttgtagtcgttattgaatgataatatcataatccataaactttttaagctcttagcctgaaaattattacctgaattatagttgcagccttggttcttctcctatgcctgaaatcatttctagccgccattgctcgtaatccagtctggataacaattgcagacacctgtagttttgtgtagaatgttcttgccatatgggtacgttgatgtttctgtatgcggattgaagcagcttcccttctcatttgttcatactgttttcgtgcaagttgtgctgtaaacagaggaaaataatacatcttagacaataacttcgagaattggcaatatctgtagtaaagttagctgttccattagtctctcctggttatattggtatgaaatgaataactctattatgtccaaggaaatcttttaaagtacaaattggattgtctttgatgatatggttgcatagaagtgctactatacaaggtaacaaatctctagatgtttacaggtatgttcttaaccgcttgttaacttcctactcactattgatgctaaaaaagtttcctgtgaaagctgcatggtatatttcttcaaatcttcagacgaatatgagagaatgatatgtaaatatgagtactcacctctccaatatttctgcacatttattgtagatcttttcagggaaataaactcctttctggtaagatatgttcggatttgtctttgtattcgtcttgctgcattagccaaaatttcagttctccttgcatctagttcagccatctgcccagctcttaaaaatacctttgttttcccaatctaccatgcaacatgaaaatcattacaacaccagcaaaataaaaccgatataaaatgaataaataaaagaaatatggaaatttgctgcttatttccatatcatgaaattcgatgagtaaacttacctgatatccctttaatcccattctgtcacagattgatatacatgctgatttctcatccgatctgcagagagtaaaacagcgagttagcatgtgtctcttaatatgcataaggaaagatggatcattctaaataatcataagtaatgttacccgtctaggacatctggagacagcattccaaaacgatcaagaaactcatcgaagcttcgttttgttggatacccagcacaactaatcctaatagcctctagtacaccctgccagagtagagtatccatcgaagtaacatttttcaatttatcaccttctataatgattttgatatttcaaatttcaaatgatcagtaagaatattagactttcacttacaccacatctcaactggtttaagacattgtcgttctcgaaaattcctggcttcaaaactgtgttgggtttaacacatctaatgtaatgtggttctgttgtgttcaacgtttccattaaagattgtagttgttgctgaaggtaaaggttgattcaggaaccatgtctaatgaattttaaagacaagaacattatgcctatatggaaatagaattaccttgaagcgggtaccaatagaagagaactttgattgttttgaactctcttcagggagtggagggaacagatttgcaacaaatgagcaccttgaggcatctaaaagagcttgatgttctgctactacatagtccttatttttatcaagaaaatgatctgcttggtaagtgacctgagtagagaaaagaagagaaagattagcccaacaaacttcagcatttttagctgcctttcagtaacagaatttgtcttttctcacatctccagcataatggttaatcgtgaagtctgtccgagcaagctttggcttactgaaacgcttgtgtgctttataagtctgatacatcttctgagcaaacgtttcatgtgtcgattttggaaacatactgcatcagaggctaacttgttaatgtccagacattatccgaagtggtgtctttttcctttcacatatttatgatttaaagtttatcttcattgtccaacatagctatattattatacaaatgggtttgcaaagttcaaatttcttatcaaatcgttcccaatatagttcttaaacatatcaaatcattgttggttgatatttaatattccagtaacaaatgctaatgaaagcgtgtaaacaggtgaacataccaggcctcatcaagaagggcaattatgccaccaggtttctgcaagcaagatgcaccattatattccaaaattgtccataacattcattgtacaatataaaattagcttttgagaaataaataccttttcaataagatctaaaacatcttggttatctacaaactctacatagctccagtttatttcctcttttgtgtactcttcttgctccatcttgaatacgtgctgttaaaagagaaaaaaacaacacgttaataagaaaatttcagcagaacaaggtacgctaaagttatatttgtatgcattgtcacctgattaaaatgttgttgcaacttttcattggtgaagttgatacacagctgctcgaaactaagaattaccaatatcaccttagatatccccatttggaattaaaatatttctaaagcatataattgctgacattatatacctgttgaccttgaagctttcaaagccatatatatcaagaactcctattaagcttgctgcatttgaatcttgacctattgaattgtttatcttgtccacaatcctgtcataaggaatccatttattctcattaggtagctgtattcggattgtctagtttatatcatatcatcaaaaccagataactgttggttgggacaagtttggctgagttacacttgtctaattcacttgcttgagcacttaatgctgtgttccacataatggataactaatacaagtagtcctaaagataagtgaatctgtatagcttaccaatcaaacagtcgagagtatactgtctttgccaaggcatcacgactcagcgcagctgattcaggatccaacggttttgtaatgttaccgtctggagtcactatgacacgcttgcaaagggagtcttctagggacttcttgttactcctgaaaatataaaaaacaagagacaaaacagtggcattatcagaaacaagtagatcaactttcgttggtgtgaaaaactctgaccaagatttctaacatgagtagctctgctgctgtttcaagatggtactgtgatttttcatcttttaatttggaagaatcaacttcattccctttgataaagactatgttcccgagatggaggattgcagccaccactcgaaatatggcatcctacagaagagaagagaagttctcaatgttgattagtgtttaatctaaaatgccaacaatagtataatattttttgctggtgttgaggcagaaaatggaaaacctgttcatcctggctgatgcctacgatatccatggcatttctggtttccaagtactcccttgcatcatcgacatttgctacttggtaacaattagattgatttaggtagtgaaattgtcttggatcacctaatttgtacttcttgacatcctgttgcactaaccatgttagttatctatacataataagtaatttagtggctaaatggtttaagtgaaaaaggaaatcacctcaggtggtgctgcacagagcatgtagaaacaatggtagtttctctctgggtcggagacttgacatacacgtgacctttcaagaagatatgtacgaatagcagctccggagatcttcccatgtttgtcaaattgtatctcaacaaattttccaaaacgactggtatgccgttgacacaaattttcgtcagtttagccatgtcaaataaatcttctaagaaaggtaacaaacaatgttgagcagccacgattacttacctcgagttattgtttttcactgttttggcattcccaaatgcctcgagtactggattggactgaagaagttgaaatatttgttacttaccactaaacaagccaagtcaggtaataagcaatggaagtagtcaaaactcacctctaaaacctgctgttctacagtccttccttcagtacctgaccttccccccatgaaggcaagatatctcatgagcatttttgttgtttctgttttaccagctccactttctccactcactaatatggactgactcccatgttcatttctcatggccctgttacatgtcactaacaaatcagtttgtctatcgaagaacagaaagccaaaatcgaagcgagcaacagtggccttttaggagctatcacagatatttatggtgggattgtgtacctgtagcaagtatctgcaacagcgaaaagatgtggacttagctccccaaaggcagctcccttgtactgctccatcatgtggacatcatataaatgtggcagtcttcgaaagggattcacagctattagaatgtttccagtataagtctgtttatgcaatcaacaccaatttcagataactagttcgaaatcgcatctagattctcttttcatagataatttgttagaatcaactcacatatatttcattgagtgaaaatcgacaagcaagattgtataggactcccggttcatggaggtaagccaacttggtcatgtcatcaacgcctgctggcggtgcttctgtgtctttcgggtatatactgcagatgtctgcaacaatctgtggttgaagaaaaatgcaaatcatcaattcatagtactattgtgcaaggggagacaaagtgaccaagtgttgacaacttaatatgca

SEQ ID NO: 243423 - DNA, 4400 bp, Cannabis indica
tcttatgctagagggatgtgaaggttactgagaatgtgtaacagttttgagaaaattttatgttacctgcagagaataaaatagggaaaagaaatgatttggcaggttttttgaactctttttttttaacatattttcatttctttatttgtcacaggtactttggatatctgatgatgggattccggatctaggaggcgttagtgaagaagatacttgttttgctgatgaggttatttcctaacttggttagaaatatttaggaatgcgattgtcattttaaagtgctttgtgatcattagtcaaaaaagtatctttgtggtcactgggtggacgacatgtgacctttgtctcttttttttactgttcaagctcactccttcctctctgacacctaaggacatagatctatctttatattggatttttatattcttgtgtgcgtgggtttgcgcgtttgtgtttttcctttcactaggcgtaattgatcttctgttgaacttcacattgtatgtgctaaattgcacgttccttctgtaaatctaatcaggtccatcaacctgttcttacataccctggagcatatagaaaagtcaccgtggagttaaaggtgaaaatacactaaccatttctttcccatttcttggttagatcttggatgattttgctgattatttgtcaatttctttgcgaagattcatcatctagctgtagatgctcttctcaaaagcaaccaaataaatgaaatggaaggaggttctttattggggttcgaatcagatatgaattccggagcacataattcaaatgatcacagtggctttgatgagggtacctcatgtgctcctgcatttcgtgttttaaaacagttgattcaaaggtgccttacggatgcggttacatcgggaaacgtgtttgcagatgcaatattacagcatctataccggtggctatgcaggtagctacaaatagttatttttcttttttgcctcctatggttataaactatatgtttctggattcttactcattcctttaatattgcagtcctcattccaaacttcatgatccggctcttcaccgtctacttcataaggtaaataaatgcttgtttttttgcttctcctcatataggtctctccataagtgtccatatgacactgaatgagatccaggatttaaggaagtagaatgagtttaatcttgccgagtcttgttgaatacatgttttaggaagaaatcacagcttcaacactgttgttaattaagagccccctagaattttaaatctgtataaagtaggacctgatgggggtcaactcctattctttctttgggaacatacatcatctttgatttatgataggatgggactaataaattttgtttatttgctttcatttattgaatttataggtcatgaaaaaggtatttgctctattattggccgagtttcggaaattgggtgctagtatcgtatttgcaaatttttccaagattatcatagacaccggcaaacctgatatctctgctgccaaagcttactgtgatagcttacttaagaccctgcaaactaggtttgtcttactcataaattattaatgtagattataaatttccgtcaatcttggttgtaattttttttcttccttcttcacagagacctatttgagtggattgaacttgaaccattgcagttctggcattccttgctttttatggatcaggtctgcacttctccttgtcaacaattattaatgttctagtataaccatttgattttttcgttttttttcgatactgtgttcttcctatgattatgaggtcctagggtataccactcttctggtaaaatcaacagttttgtttgcttttgttgtgatagcataattatggtggaatccctgcaaaagctgatgaaaacatgcatgaagagtctgaagttgatattgtgtcaagctggaatattgctgaaaatttaccaaaaaaaattcaggtaatttgtcaaatttttttataaacttgcaattgctgtaatgagtaacattttaatctctgctcagtggttggatgagtgtgcatgtacagggtttggtgattagtgaagattcaatttattatggcccgaaatctgacaaaaataatctcttgcaggattattttatttttcattgtttctcaataccttatatcccttggacttatgcaaaaaaaacaagctgcaattagagcatctgcacaagatggcagctcaagcacaccatcaattactattgcagcagctgagaattttgagtctcatctaacggaatatcttaaaggccaggttatttttaaggctcaattcttgttctctctttctcttgtcccttgtgtgttgcatttagttcgtgattggattttctaaactttgttcatgtgttacagatcagcacttacttcactgagaaacttttgggaatcgtgcgagataccgttcttcatatgaaagaactaagtaaatcagaaaaagaagcatctgtatctgcagggatgccacaactctctagtaatgcccacagaggggatgcagcactggaatttattaagcatgtttgtgcagttctggctcttgatcagagtgttcagcacaatgttctggtattttattccgttctttctttctttctactcaagtaattcattttctgtgtgtggtatgcttattaaagtctcaatatgaaatgctccgtacctttgaatcatgttacgaacaacattgaatgaaatgctccccagtttccctgatagtccccccttctaggctcgtatagtcttgtgacgaaaacattgtggtgctgtttttttttttttttttcacagtttggttctgtatagttactgtttatattatctgatgtatctttgaactgactgctatttattctccccaattttacagataatgagaaagaatctgctaaaatatgtgcgagttagggagtttgctcccgaagctgaattttgtgatgtcttttcgtccttcatcttgccaaatgtcatttgcaggtacaaacataaacaatttttgtattcttgagctgtcttaatgagactagttattactagttaggatctaaattttcaaaagcctaaactgatttactatttcattcttgaacagctactgcaatgactgtagagacctggatttgtgtcgagacacggccctcctggctcaggagtggcgatgtgctgtgccacaatgcgggcagccctacaaccgtgaggtaatggaaaattccctgcttcagatcgtacgacagagagaacgcctctaccacgtgcaggatctcgtgtgccaaaggtgtagacaggtgaaggcagcacatttagcagagcaatgtgggtgtgccgggtcatacagatgcaaggaagatgtaaccgagttcaacagaaaaatgcaaatattcttaaacattgccattcgccagaaatttcaacttctccaagaatgcacatcatggatattgggaatccatgatgtacaagattagtcacgtttcattcagagctctgcttgactagtcattgcaagaggtagtttctgccggccttcccgactcgcaccaaagcaatataacaggtgttgtcggtattggcagtggctggcagacatggctaacaaacaagtaagaagaaggtcaagtgggtcttgaccaaatcttcagatgcattattggcttggtttgggttgttgattaagaattaatggtccacaacctaatcaggaagagcaacttcataatcatatgtgtgtgtatatatatacatatacgtgtatggccatgtcatgttcttcataccaaccaagaagagtattcttcttgttcatattctttcatgtttctctttcctttgtatatataggttgtagtattgttgtattatatgccaaagctgtacaagttcaacatcattatcctattaaatcaagtttatatacatacacagatatctacccatatttgcttcttaatctatctatttgaataatgtacaattgcattcttgctcgtatatatttttttggatagggaaattcgatcaatattgttttagcaacttgaagattattataaattttacttaatttatgaatagatgagctaacaatttcattccctaagaaaagttgcaacaatgcctagatcaatatataatttagtacggttgacatatacaagtttgggttagtcgaccgtatacaatattcatatatgagtcatcttatacaactttgagttcattgtgatgctttgctaataaggaaatcaaatttaaatttaaagtaacagatacgttgtaatctagtaattactttttgttttttgttcgtattcttaaattgaaatgaagtt

SEQ ID NO: 243424 - DNA, 1947 bp, Cannabis indica
ttattgtcattgttcttatacctaaaattggatatgctggagctacattgtaaaatgctttgttcactgggattatcttgtgtttgctgaggaagagcccacatgatgtgtgaagcttttttgattggtgatacattttctatctatttgtagctgtggtcttatttacatcttttaaagcattaactgccaccccaacactcattacttatagccctgttatccttgcgcaaacttgtcattaatgctccctagttttaattatatatttatataagttgcttgtaatcatgcaggtacagtcgtatttgtatattcttaatgagcccaaactgccatcagtgtttcttcaggtatatttgtgattttgttctactttttcctcttgtcaacaaaatgagaagcctgaaatagttcgacaaagtataataaaagattgtggttttcacgtggtaggtcatttgttgggtattgggggaatatggaactgctgatgggaagtatgatgctgcgtatatcacgggaaaattatgtgacatcgcagaggcatattccggtgatgaaactgtgaaggtatccttaaatctcattctcctgtttatgttttgctatataaatattgtttaattgggaattggaatttaaagacatgatttgtgcttgtttcactcacatttctatgtttcttttccttttcaattaccaattattaccgtgtgtttgctaattggataagaaagaaaaagtaccattataaatggacattcatgtttttgtttttggatagctgctcactgcagtgacgttattacaatgagctgatcagcaatcttcaaattgtttgtaagcacgttttgcaggatgagctggttagatctttctgactttctcaaacttgcttgctaactaatcattagtgggtaaaccggcagattgtgatcttgatcggaaacccactaacctgctggtgtttagattgttatattataggtcattaatggggcatatagttacataggttgcctttatacatggtgttaaaatgttatgggcattttcattacaaattacaaccccattgcacttaacttcatccttgcaatcaaagtatcaacattttcttttccgtagagcttcattattattatattaattttgtgataattgcaaatatcctcgctcagactctcggagggattcatagaaaaatattgcatatgtttccatccatttcatattcttatgcagatgtgtcttctttgtgtgtacaacatgtgtgtctacacatgcattgcctgtgctggtatttttatctgtgtatgtgtccttgtgtgtatatgtgaagttgtgcgtgtttactttttttttgtgcaaataaaaactgattactaatattggaaatcttgttttcttttaggcttatgctatcacagcaatcatgaaagtatatgcttttgaaatagcagctgggagagaagtggttatgctacctgaggttagtagtattaacaattccacaatcctcttgtttttagctttatttgcttgaagagtttaaagggtagaattttttttattatgatttggataaggagctagtaaaagtgtctgtgttataataatgtaataccttgctaggtctgggatttgacaccttatgagactaataataccttcaagtactttcttttcttcttattttaaatttccatcattccaatccaaaaattgtagggtacagcacacagaaggacaatttatttatttaatttttaagagttaagcggggtgtattgttataatcccacacctactaagggtgcatttgtttttttttcttttaagatctagacatttgaatttgaatgcacatctgaataataagatatcattatctaaatctgaatactgaaatatttagactatttttttaacatctgaattatt

SEQ ID NO: 243425 - DNA, 7397 bp, Cannabis indica
ttttgttaattttttttttttgagggggtagtttttgtaaattgtatttattgttattattattgaaaatcttgcagagttcgcatgcactatggacatccggatgtattcgaccgtgtatttcacataactcgaggtggcattagcaaggcatctcgtgttatcaacattagtgaagatatctttgctggtgggtgtgaagttggcgattgctttttatgtgtgaccctatacttgattcgtagacataactgatttaattttcctgttaatatctaatttttgatagatgaaaatgaaacactgcagggtttaactcaacattaaggcaaggaaacatcacacatcatgagtacattcaggtttaatataatattttcttctgcctgtctcccgccaatagattgcaattccggtttactgatactttgctatattcaggttggcaaaggaagggatgttggtctgaatcagatttccctgtttgaaggaaaagttgctggtggaaatggggagcaagttcttagtagagatgtatacagactcggacaactttttgatttctttagaatgtgttctttttcttcacaactgtcggtttctatgtttgttctatggtgcgctttctctactggtttctattcgtcaatttgaataagttgtctctgctttctagttgctgtaatctttttgtggtgatttctacttgatgcagatgacagtgctcacagtgtacatattcttgtatggaagggtttacctggtaacttaaatgtccccttctgctttgatgtccatactatttaaattgattctgtagctttggcttactaaagatttaataatgtggtggttgtgctggtgttcatgaaaacaattgttagagttcattcacactcataaaacatatcaatgttcagatctatacacaaatatgttattactagaatttatatctaaataaacttttgttgatttaaagagaataataacataaatagaggaagagtaccataatatattttgtaaagattatttttggataatgacttaggatttctctagtttttactcaggggagaagatggaaactagagtggttcttattttttcttatggaagattttttttggccaatacttttaggctttctctggacttgatgagcaaattgcaaagcaagcaaaaagactgggcagtacagcactagatgctactttaaatgctcagttcttggtccagattggaatttttacagcagttccgatgattatgggttttataattgaactgggactactgaaggttagtccaagtcatatcaagatcatgtcgttattaacttttcaaccattatagtgaggctgatttcttcgcgtaaatggttgttgcccattctcttgtattttaaaaccataagtagtttgttaaagaaaataaaattatgcaaaacgttttctgtaaatccgcgaagattataatatttgattatcaaaagatccaagaccatatacttttctatcagggtggggcattcaaatattattatatctaaacatttgaggtgaatttggtcattaatcatgctacatctgcaattgcatctgcatcaagaccttattctatatatatatatatatatatattatatatataattatatattttccccctctgttggatgttttctattctaattatttgtgcttttcttgacataattgcaggcagttttcagctttataacaatgcagcttcagctatgttctgtgttcttcactttctcattaggaactagaactcactattttggacgtacgattctccatggaggtgcaaaagtaagtatttatttgatactcttgattttctggttaatgaatttttttttttgtacatggaaacaaaatgattactcacattttttatattatcaacagtaccgggctactggtagaggttttgttgtctaccacatcaagtttgcagagaattacaggctctactcaagaagtcattttgtcaaggcgtgagtgatcattactttgcttatagaagctctctctctcccctttatatataaataaataaacgataagtaaattcttagaaactaatcttcacaggtttgaagtggctctgcttctcatagtttacattgcatatgggtatactgccggcggggctgtttcatttgaattgttaactatgagtagttggtttctggtcttctcctggctctctgcaccctttatcttcaatccttttgcttttaattggcgaaggtaaataatttactatatttgcttacatatgatctctttatgttattatttttatgattttctagctgtgcccttatactttctatgcatgacaaaacccttgattaacagagcagtggaggattttgatgattggaccagttggcttctctgtaaaggcggtgtaggagtgaaaggagatgatagctgggaatcttggtgggaggaagagctggtaccatactttgtcattacaatttgcatttttttttttatttatttctgtttttctgtttccagccatactgagatccagaaatttttcttctaaaataaaaaatttataatatatttgacaaaaggaaagcaaaaaagtgattctttgagatagggatcagtgaaacaatggagaaggagattgggatcaagttgaagaagagtaccaagatgggtagtacctttgagatagcgaaggacacgcttggctgcatgatgatgaaccgtggtaggagcatgaagaaattgacacagtctgttgacggtgagaactatatcgagacaagtgagagtgcaacattgtaaagccccaactaggctttggtattcaaaagtattattaggaggatctccatcgtaaatagacagtggagtgagagacataggcgtgttgacaggtttggagtccaaaagattcgtcttagtgagcaaatcacaaatatatttggtttgggaaagatggagacccgaagaggaccaattaacttggataccgagaaaaaagtgtaaaggaccaagatctttaattgaaaactttgtatttaggtaggagaacaaggaatcaatggtgatagaggaagagcccgtgacgatgatatcgtccacatatatgagtacaataatgacaacagtagaagatctatagatgaagagagacgtatctccgttgaaatcaataaaaccccaatccaagagagaagtactcaacttaagaaaccaagcacgaagtgattacttgagaccataaagggacttagataacttacaaacatgatgaggttagtccgggtcaacaaagccctcgggttgttccatgtaaactgtttcagtgagatcgccttaaagaaaagcattttggatgtaaagttgcttaatagtccagtcgtaggaaaccaccaaagagagaaccaagcagattgggttgggtttaatcactagactaaagtctcacggtagtcaaggcaagcccttagccacaaggcgtgccttgtagcattccacagtatggcattgagtttaatacaatagacccatttacagcgaatcaccttacaatgaggaggaggtttaacaagaatccaagtgcgttgtttagataaggtagtgatctcgatatttatggcattattccacttcaaatcggcgctagcttctcaaaaattggatggttcaataggaacacctacagccacactataaaataaatgcggcttatacccaatttagatcttgtaatcatgggatacaacttagaatgagcagtggtagatggatgtggactgtccaagtcaaccataaatgggataataggaggtgaggagaaagtggaggaagaactagaagaagttgtagtaggtgttagggtagaggactaacagggaaagagtgaaactgagaaatagatggagtgtgtataggagtgagaataggaccaggggagggataaggattggaagtaggagagatatttggacaagggaagggaggtgggacagtcaaatgaggagaaggaggaggtatagagaatggtaataaagtgatgacatattgaggtttagtaagtgggggagagagaatagaaggagtatcgaaagggaacaggactcattgaaaaccatataaggtgtaagaaagatgcggccagaagatggatgaagacagagataacccttgtgtttgctgttgtaaccaaggaatatacaaggggaagagcaaaactcaagtttgtgacggttgtatggaagaaggaataaaaaatattggtagccaaacattcgaagaagagagtagttaggaagcttttggtatagtagttgataggggctagaatatcaaaggatacaggtaggaagtcgattgattaaataaattgcggtagagaaagcataaggccaaaagtagagagacatatgagcatgtgctaaaagagtgagaccacttttgacgacatgacagtttttgtgctcagcacaacctttttgttggggcatgtgagggcaagagagatcatgatgaatgccttgttgggtataaaacttggaaagggtgtgatattcaccgtcccaatcagtgcggacagtttgtattgggctatgaaattgagtggaaactaaaattttaaaagtgagaaaagtttggaaagcttcatcttttctggtaagtaagtagaaccaagaaaaatgagtaaaatcatcaataaacaatagaaactatttaacgccagtgatagctgtaacaggggtcacaccccaaatgtcagaatgtattaattcaaaaggctttgaagcttaagatacagagttgggaaaaacaagtctattagatttgcctaattaatgagtagtacaaaaagttaggctatctcttttcgaaaaggaaaaattacaaacagataaaatacgagaaacaacttctagagatgaatgtcccaagcgagagtgccaaacatcgacagaggacgaagacaagatcagttgtggcatggatgagcggaaagttggcaaagatggtgagacccgataaatgccttggtcaagtaggcctttgaggaggatttggtggttgtcttggtgtttggcaaagaaataagtaggatgaaattcaacataggcattattaacatgacatagttgagacacacttacaagatttttagacagagtagggagtgataaacctggcaaagtttgagaacatgggaagtggaagatgataaaaatgcagagcccacatgagagatagaagccaacataccatcgccaattgtaatttgattagaaccatgatatggagaggctaattccaagagatttaagtctgaagtaaaatgatgagaagcagtcgagtccatatatcaagtggggttagtaaccgtattggaggatgaaggagttggtagtaggggagggttatgcaatggttgttgttcggtgaaataggcatcgaatggacgagatggaggttcttgttaatactgtatgtttttgcagtaatagcagaaagcaacaatatgacccagtttgaaacaaattttgaatttgggtggacgaggggttgatgggagcaaaggggtagaggatctcgagggttaagggtatggttggcgagggtgatggaaggatggatgagtggggtgggagggagcattagtatttaggttggggttggaataatggttgttggggagtttgggagaaaattgagaatttgggaatggaaatttggggcgctgcttagggaaaggtaagttggcaaggttggcttgaagggagtttatggaggtgattgtcatatgtctttccaggcaagctttgtaactcaaaagaacagcatgaatttcctcaactgttggtttaatgggacgagctaaaatctgtgtgacaaattcattatactctagacccaaacaatttagcaaatgcactaaatggtcttggtgtgaaatcgattctccaatagaggcaagagtattgcgtaaggatttgagttttggatataagcaaatgttgtgagaccttctttttttaggttttgcaacgttgttttgaaatcggagctcccaacaaaagaggcgatagtgtaagtgcattccaaagaaacctaaatctgttgcagtggagaagttcacaatctgtcccagcataaactcagagcgagaagcataaagccaactcatgagaagtttgttgtaccgatgccatgttgtgaaatctacgttgatttaggaggagtttgaattgatgaattaaggagggcaggtcgcggtaccatcgatgtatcctttaagctcatttgcaataatgttttgcatttgtattctccaaacgagataattagattcatctagcttgacagatattgtttgattgagaggggtatggttgaaggtaataaaagagatgaaagatacagatgaggggaagaagaaggtgttgcagcggctgtggtattagggttttcttggtttataatagtagggtttacattagagttttacatgtttgcttcatctttttgtggggtaaaaccggtactgggaattgatacgatggggagcttatcactgctctgataccatgacagaaggaaagcaaaaaaaaagtgatgctttttgttggaacattgatgaatattataacaaaatatagaagtattctagtgtgtgtgaagtgaaaagagtcccacatgggatatgaacccttatttacaagagtatatagagtgcaactttggcatttggggttgggccccaaagggttcccagttttgtgagaatgggtgaggactcacacactttacccaccacgagcgcgccgtccatccgatccgagccgggttgggttggtgtggtgtggtgtgacagtctattatttttacagaaaaattatttaatagaataattattttttattttttactttaattgagaaacgtgtttaattgaaactgattacttagtcgtatcagttaatgggacacgttcaaccaactacatcccacgattcagaaaatgttcttcttcccgttatgttttttcaatctattcgtctatataatgtgattgaactgatgggaagaatacatatttttcatatcggaaaaaaatacagttttcataaaaattaaattccatctacgatataaaaaatctttgggtgtattcgacggtgcagtggggtttcgatacagtatgactaggctatttgatcttggggacggccgacatattctgactgcttccacactcctgggcagtgccataaacatcttaaagagagcgacctagttcgcgactcaacccagaattttcatttggtaatattgttcatcttttatttttgctagcagtttactcaa

SEQ ID NO: 243426 - DNA, 3245 bp, Cannabis indica
agttttttttttttttgagtttttttgaaatgaggaggatagtttgggtatgtgtaagaatttttttttttttacatgaaattgtaattttattaatttagcattctgaatacaaaataatttgaagatcagaagaaataaaagatcccataatgctacgatcaaggatcgtgcgtgcctagcaacaaagtggacaacacgatttactaatcgtctaataaaccgtaaatgaacatcggaaagagaggataaaatattaaatggtatagaatattttgggggtattttttagtaaggtaaatgaaatttccttaaatattttttagtaagggggtatttttttaatttttgtatgattaagtcattatccacataatacaatttgataggaaaactatttatttattaattattatatttagacccaaaaaggaaaacaaagaatgacctttgcttcctctctctccctcgtcttccatccaattcttccttacagttgaagaagagagttcaccgcgttaagctcctccgtcattaccgaattccttcttgatctgactcactctcaactcggtccgatcctacccactcactcaatggggcggtctccgactcatctaaccaccacatttcttccccttctattcctttctctcctttttcgactcgctcgcatctcctccgccattcccgccactccgcgcctcctccgtccacctcacgcgcaagcacgtaccgccttcctcttacctctgcatcatcattcttcttctgattcttcccagaaatccccttcctcctcctcttcgctgccgtcgtcgtcgtctccttcctcctatccacatcgccacctacagagatccggtcccaataacaggtccaatgctcgcatgagcctccacgatgacctcctccttaatgggtatttctccttttacgtaattttttcatgttaaggaaataattaaaaaaaaactaaatttgacaatgaaaaatgttgttttgagattcttaaaggtactacaccactcggctttggatcggaacgccacctcagaaattcgctctcattgtcgatacgggaagctctgttacgtacgtaccctgttccacttgcgatcagtgtggaaaacaccaggtgaaattttcaaattttggttctcttcctttcatccttatgatttgtgaaaatgtcaaattattgtttgattttggcaggaccccagattcgatccggagctttcgagcacttatcaagcggtgaagtgcaatattgactgtaattgtgacaatgatcaaacacaatgcatttatgagaggcaatacgcggagatgagtacaagcagtggtgttcttggtgaggatatattatcttttgggaacttgagtgcgcttactccacaaagagctgtttttggctgtgaaaacttggaaactggcgacctttacagtcaacatgctgatggtataatggggttgggccggggtgaccttagtgttgtggaccaacttgtggatagaggtgtgattagtgactcattctcattgtgttatggtggaatggatattggtggaggttccatggttcttggtggtatcactccacctccggacatggtttttgctgattctgatgctgcaagaaggtatgtattttacaaatgattttgttcatgtagatgaaaaaaaacagcaattttttttctctataatgaatagtaataccattgaaacatgtcacgcatttactctagtttcgggatggcaacagtccatattacaacatagatttgaaggagattcatgttgggggaaagcaattgcccataaatccaggggtgtttgatggaaaacatgggacgatccttgatagtggcaccacgtatgcttacctacctgatgcagcatttataccatttaaagatgctgtaagtttcttcctcttcctctgttttcttttggggtagtttttcatttattttttctttctaagttgcctttgtatgtagtataacataataaggcatttaagggattgatcatgaggggtaggacatatgattgaaagttttaggcctaacaatattactatagtttagcttcccaaagattataagccataacataccatgcctcttcttctcttaaatctcttgggatgctttgtcaaaggtgtatttccaccaattactacaattttctctatagtttatcctgctcaaatcttaaatcctgaatttatgattttaaatagggctttgtttggagttctgtaataaagctgtagttgatgaaattttgattgatagaggaaactctgctggttttatgcatgtgtaagttgtaactctgcttgttttcaaaactcgtttatagaccaaatagaggctagctttgtcttggtagtagtagttccattggtatcattgacaacttttcaatttgagcatcaaacttgcattttaattgttttccttttcttttccctttccggggatcaaactcgcaagttaattgttcttttctcactttgactggattcaggttataaaggagctgcaatctctcaagcagatccatggtcctgacccaaattataatgatatatgtttttccggtgctggaaggtatcatcaaaatgatacaataggacttctatcaattgtaaaaatagttctatgttgtaattaacagctttaatatactcttttttacagtgatatctcccaacttacaaaaaaatttcctgcggttggtatggtatttagcaatggacaaaaactgtcactgtctcctgaaaattatttgttccaggtaattgatggactctttctgttatcgttttttaatttactgcaagaggcttaataggaagtttctgaaaacaactctgtgcgacttgtggtggtatttatgagaattaagtgcattgcttatgaatcggtcattacttaattaatattcatagatatattatcttttgtaatttttttttgttggttatttgttatatagcattcaaaggtgcgtggtgcatattgcttgggtgtttttccaaatggaagagatccaaccactcttattgggggtaagttgttctttccaaagatgccgtctgattttttcttactgtaatatacttctgccaattgaattattactacaaattttttcttctctttcgatacttttctaaatgccaaagtccatatatttacttctttagcaacactattggttatctt

SEQ ID NO: 243427 - DNA, 4883 bp, Cannabis indica
atatatatatatatttagtgtatattttctcatgagtattgttataatattaatgcttgtttaaattcagggatgtttttcaatgcactgtgctgataagcttttggcgagttcgtcatgcatggcataaaaacttaatgcagaaatgtacggaaaatgatattcgggttgagatatggagacgacttgggcagatagtggatgttatctgccaaggacaaggaaccatgggcttgttcgaggatttgatggaagattttgttgatgaggcagattttatggattatttaagggcaacttggtatcctagattaggttcgtattaattatttcaagtagactatctattctgttaatataattgtttttttgcaaatagtttagtgattttattttatttagtgaaagataaaacttactccgagttcacatagtgtgctagattataattccacagaagttactaatgtgagagctttcttttctacacagggaagtggatcattgcactacaaactcttcctgtctctagccaagagaccactgcagcgatagagttttaccacaaccaattgaaggttaggttgttgaatgagaagaattctgctgtttatcaaagaacggattggttggtcgataaattgaatacgaaagtgcattcctatttttggcttgatgagtactctgggaaggatgcgtttgcccgatacaggaaagaggagtgggtgagtgggttaacatattggcgtaaagctttgaagatttcagattctgatgttgttctggaaggtcgaagtgctaaagttactgatcagcttgatcgggatagggttcatgttgtatggaatcctggctcacagtttggtatctgtgattgccgttgggctgaaataggcaacatgtgtgagcatatgctaaaagtgattgatatctgccgccgaaaaaagtctgctgtgccatccatcagcatgctgcagtatcataaagttctaaagaatatgctacactgcccacccaatgattctctattcgggatcatgctgtttcattagcagtctttgtacagaagcagattgatgcacttgttactgaaagcagcaatattagtgaggttcagccaatttctttggatgaaggtcaagagtttgtaaatgagagaagtgatgacatattggcttacaaggagaatcgttctttggacagacatgaggccattgacaggattacaagagatgcaggtgctgacttgaatgatctcagtgaaaatggtacgtgcggtgagagttttggagaagatactatgcatggtgaaaatattggtgaagaaagtacatgtgctgagatggatattgacccatcttacatttgtatttctccacccggtttacactctgtcgatgacgttgtttctaatggtatcgattttgagaacacggtgaaactattgtctaacccagaaactgaacagctttcttctgaagatgctgctgttactatcggttctacagatcatgtattcgagagaggcagtcaagaaagtgcgatggatatggagtcaattgccatggatatgccttcatcaaccatggagtttgtagagcaatgcacggtagagcatcagaatgacgtcaagcccaatgttacttctaactctaaggatgctgattccctatctttaagagcttgttcatcaattataactatgcctgttgcatcacaaggggatggaattggtccaacttttgatgtacataaagtggataagatattgaaagcatgagtgagttaaagtactgatcatctgacagacttctttgaagctagatgaaagtaaagaaaacatcgcttcttatgtttatcatgattgactgcatttagtagtttgatggttatacacatcgagtattgttaaaacggatgtcaatatatctcagctaccatgaggacgaatgatctttaatggttgtgtagataatggaactagtttctgctagtgcagtgctgaatggatcaatgctgaagcaaattctatactgaagagactctggtaaagaggtgatgccaatggaagtaatgttttggtgctgttgagaaaaatgaataaaatggtgggggtgcttaagtttatccaagaattttcattgatgtattaggcactgctcctaagaaaatgaaacaataagataattcacgactcttagaaatttcgaggttgaagaaaatatcagatgatactagagttactcattgtataacaaacatctgtaagtagacactttcttcctgtgcacatactctttagtaggttcaaactctcatattttagtttactcttaggatttatagttataacagcctaaaacaattttgctaatttcaagaaaagtattgagattggaagtggaaattttctgtttgttatttttctatggctttggatacattggtctcttttgcagctgtacttactgagttgaacaaactatgattcttttgtatatagatgccgtcaatcaatagtgtaggtttgaatcaataattaatatgttgacatgttaagttttatgataagtaccattatgtgaatgtaagaaatgctgaccataataacgtttagaagctgtcacgtaaaatagcggtttttctatgatttgtttaaacctattcttacatttttggatcaagttataaatgaattcggatcaaccgatccctttggtaactttaattataaaatcttgaagtttgcttgtccttattcaaattcaagtaacattgcattagcaaataatagttcattacagatttcttgtatttctatggtttgcgcttgagaagaacgaaggactcgagcgcttgcttgtgggtcaagtccataaacacagctgtttctgtgactttgttcttgaacttgtcaaacataaggttgactacctcagttccaaagtgatcgttgaaatggctttccataacagctcggtagtgtaaggtgagcttttcaggaaagtctgcctcgtaaaacgattcccttggacgacatagttgttccattctctcaatactgaaattctcatttctcttaatcaaaccctctaacagttgtggggttggcagatatattggcaagttaaacgtgtttactttcttcttgcttgtaataccctacatgtatatttataataataagaataaaaaaaaagttggtgaaatatcacaatctagtgacaataaagcttttaatctcgaatccatgtctactacaattgacaggactatattgaactgtgagagatatagtagatagtgtatataccttagcagccatgtctaagagaacagatcccaaaatctcaaagaaagtaggcgtaaggcacttagaaccagttggcacagtaacgatagagaaagctacaagtccacccgggacaacctccaattctctggctttgagaaaagcctcaatatctctagtgaattgggcttcataagcatccgctactatctttggtgaactcatacagtagatcttacccttgttgtatgccggagacctttcatctcctacgccgtccggaaccttggagagccaatggagagagtaggatgaatatgcaaaatgaaggcttgattttgggaacaggcggctgtagaaggtgcctggaactccagctacatagtaggaaggcttgttcatcggtatagacctgaaaagagcgttgaagtctctagaggttggaccatttatcaagacttggaactcgaggttatgggagagatgttcatattgatcaacagtattagattggagtttgagtttgtgtttgacagtgtctatgacattttgaacagcggcgaatgtgtctatttcgacagggcatcccaaatcagctatggtgaatgtctttggagtagtttgtgaagctatgagtttgtctacgtctaacttgtctagaattccttccttgatgaacaaattctgcgcgtctactccatttttttgctatacatcatcgaagttagagtctttataatttaaaataaccttatttttcacctattaattaaatccacaaataaaataaattcatgcatttgcagttcataaataatacaaggctataaagagtgtacataatataaattgagaaaattgtgatgactagggacctgtaacgtggaattactctgaaagttgttctcatcttctcctccaccgttgatcataaacacttgttcaccgcttgccatctctctctctctctcttactaatttggtacgtactcttttaaagttgcctcttgcctctgtttgacaaggatatatatatttatataggtacatgattttgtcttatgactgtatttttacggaatgtatttcgtgatgtacggtagccgttagatgaaggagttatttgatctgagggttgagattgatttaggagtaattagggttaaaaaataataacttagcctgacacttatctaatgtaccctaaaactcatttaatgtactacagaatacatttcgttttcgtgaaagtgaacaaaatcttttccatatataataatactagtaaacgtacacagtacacatccaagcctacttccactcatactgtctttacaatgcaataattgactgagggaccatataatatatatatatcttatatatgtatatataatacagatccactactattgttggtaacgtcgtcgttgtgcaagcagattttaatataaaaaaagaaatattaattctcatttagtgtcataaaaagtaagatggaagatatatgtgtttgttggtaagatatccaataattctccttaaacaatattgatgtctataaatgctgttgtcgttttgcgtatctttg

SEQ ID NO: 243428 - DNA, 2842 bp, Cannabis indica
taaataagtaataattaagttaagtacatctgaaatgattgttatgtcttgtgtttgtagcaaattaaattaattatatcattaataaatattcactgtgtattaattttgattaattaataaattctttgtatttataattgttgactaaattttcgtttttggtcgaaaatgttgacttcgaaataccaaaaaaaaaaaaaaagttgtatgtgagtgggcataggtagcttcctcagactgagtcgacaactctgatcaaaagtactagattttgatacctctgccaaagttactgtttttttttctttctttctttcttcttctttttacagattagagaggagagtagtagagctcttccagctccaacaatggcggctgttgaagaggaaaagacccttcaagacgagctctcacttccaatcctcttagctgaccgagtcatcaaattggctcaagaagccgagtcatctaagcaagactgttccgaactcgctaagcaggtcgaccggctttcccagttgctccgctcagccgtgcgactcgcttcgacgactcagtccgtttacgatcgacccgttaggcgaatcgttgcggaggtgaataagaatcttgaccgagccctaaacttggtccgtaagtgcaagcacagtggaatcctccgtcaagtctttgctataaccaccactgctgatttccgtaaagttttgaaccttcttgagtcttcgatcggagatatgaaatgggttatctccattttcgacgctgatggtgctaacctttctcttcctccgattgctagtaacgacccaattctttcgtgggtttggtcctcaatcgcaaccgttcaaatgggtcagctcaaggcccgagtcgacgcagctaacgagctcgcgtccctcgcacgcgacaacgatcggaacaagaagatcattgttgacgaagggggagttacgccattgttaaagcttctcaaagagagttcttcaccggacgctcaaattgccgccgccaatgcgcttattaaccttgctacagactcggaaagggtcagatttattgccgatgctcttggaattccatttatcgttcaggttcttggggactcgccgatgaaagttcaggtcttgctggtgaaattagtggcccagatggccgagctcgatgctgatgctcaagaggagtttgccagagagaacgtaactcggccgcttgtgtctttactcgccatggatacggttcttgaggagccgaagattaattccggtaaaactagtattctttccattgttcaaataaataaagaattgactggaaaacctggaagttttcagacccattcgagtctgacttcgaatccctctttttcttctcaccattctgatggtagtatccgtggtgggtattacaagaaggagaaagatgtcgagtcccctgagctaaagcataagctcaaggttggctgtgctgaggctctttggaaactttgtagagaaagtttgattaatagtcgtaaagttactgagaccaaagggatgatttgcttagctaagattatagagaaggaagagaatgatttgcagattaattgtttattgacagttaaggagattgtatctgtagctgagtcttgtcctgaccttagaagagctgcttttaagaccaattctccagctgccaaagctgttgttgatcagcttctaaatgttattcaagagggtactccggcattgcaaattcctgccattaactcaattgggtgtttggctagaactttttcggctagggaaacccgaattgttggccctttggttgcatgccttggtgctgcaaatgttgatgtagctacagaggctgctactgctttggctaagtttgtctctccggataatttcaattgtgtggagcattctaaggccatcattgaatttgagggtgtccctcctttaatgagactgctaaagtttgatggcaagcctcaacttcagggtacaaagttactatgttacctttcggtacatgttggtaacagcaaggctcttgagcaagcccgcgcattgaatgccctcgagggagctcgttctgctgctgctcaacatcctgatttgagggaggtgtatcctaaagcaattcaccatcttgctctttatcaggctggagctcatccccaccggcaagcatacactccatgagtgtgaagaattttggtcatgtgagtgaattgcagaatgtgtaatacatatttatgaattgacaaatatttgaaaaaaaatatatatattttgatgattacagtagatgtttgatgataggacgcaataataatccaagatggttacctggggtattgattgatcaaccaatttatttgtatcaaccagtttttctgaaaactggataagatgtttggatatctgtatacagaaaattgtaaataagtagtggaaaccaagtcctttctactttctcttctcagctctaataccgtgtttcttctcttgtatcaatagcatgttttgcccttagtgtccgtactaaatttacttactgtcagttgtaggctctctccattaactatgatcttgtaaagtagctgataattttcgaaaattgaactttacataggctccttgtgattgtgacagtgttttgagtatattggtattgttaaaatggtcgacaagtagcttaacttcttctattcaagtcttgacactcgtttatgttgctgaaacttacattgtatgcacaaaaatgacttaagcatgtaaggcatgttcctgttacactcatcaacattgtcctttatctacattcctgcagcttgttcaaaaacaat

SEQ ID NO: 243429 - DNA, 4259 bp, Cannabis indica
tttttcggttgaaaatgccgctgagattaggcaagagggctttcttcgaaacagatgttttcgctttctccattttttttgtctcgatgactttggttggaatgttcggtttttggactctgtagtggtgtggggatgatgatgattctgttgacaacatctctgtttcagctaatatgcgagaagcagcttcggctgccttcttttgctcgcgttctctccaccttcttaattctccctcgactgctttcttggctgcttcggccatctgtgccttcttcaaggcatcctcagttgcagccttcatattctcaatctctttctgggttgtttctaactttttcagtgcctcgttttcactagctctcactgcttccacctgagccaatgcagcagccactttcatgtcagctaatttatccgactcctcaactttccggctcaaagactcgaactcttcccttgagattgtgatattggcaccagactcagaggtcgaggctcgtgcagcattagtttgatcggataaagctttaatctgatcaagtgctctttcttcagcagctttcgcttcttcagcttcttccaaagcaattctcagattttcttcggcttcttttacaataactttggtggcttcggcttctttcctcaattcctcggctttattcttcatttcttctgcttcccgttgtgcattttgagtttccattgttaactgatccaacgtcgatatcaaatcatcacaagagcctcttgctttggactcttcagcaaggcaagcttcaagctcggtcttatatttccgaagtttaacatgtaaattaccagctatggattctgtttcggcctctttctccttcagttcagagtgctctttcttaacattctctagttccgccttcaaagactcaactaagcttcgaagcgagctttcctcttctgcaactttctgtagagacccttttgcaccatccaactccaaagtgacagttctcacagaatccaaatcagaagctttggcattctccatttgcttttcaaccgatccaatttcattcaacgtttcagcaagctgtgcttcaagacttctagaaagttcaggatcgaactcttttttcaaggcacttaatttcttagccgactcctctagtgtcgctttatgcaactgccttcgttcatccttttccgaaaatatcttagcatgctcctgctgagcttgcaaggaagcaagcttaacttgcccaattgactcttgcacaaccgaaatttccttcgcaagctcaccaactcgttcaacatttgctttggcagcatctttggcctccgattcttgtttaaaggcagcaactttagcatccaacgacacatcacaatcctgacgaagtttccttaactcttgttttgcagcatcgagttcagtaattactgtcatgtactgagttcttgttgcttctaagtcttctttccagacaccatcttttcccgaaacactctcactgtttgcttctccaagttgtttcgcctgattcttagcagcttcagttgccttaattgcagattccttagattcaatcagcgatttcagcttctgagtcagatcatcaactgttaccttagccttttcgagctcagcaagtgcctgtgatttagtagtttcggcactctttagctgttccttcaacttgttcaattctttctgggtcaggtgaagccttgtctccttggccaataccctctgcatcgaaatcgataaaaatttcaatcagacacacaatatagaaactcacattccaaaagtaaatatataagaagtatttaggaaagcaaatattttttcagcacctaaaatctataaataatcaaagtaagagtaaaatcaaagatttcttctaactaaaggaaaaaagacaacaaaataacttgaaaattaaggaacaatagacaccccaactatgatctaaacatattttctcgacggcaatagaatcatctttctcgggaattagcttatttcaagaaacaaacaaaacaaaactgtcacagcttaaaagaatcgaaagtacctcagcagagtaaggctttgtcttcttaatggcaggtttctcgccagagaacgcaccttcaccgaataatgtgactgcatctttcacagattggaaaggcgccctagtgtctatctcgcccacctcagccttattgggagagtcagtagcatttgatcggtctttcgctaccatactggtttctttcttatacacttaatatctctttccaactgttgaaaagtacaaaggaaaattgaaaataaacacaaaagcgagaaaacaaaaaacaacacgaacaaaacaacgacacacacattaaaactcccaatgcctcgaactcaaacaaacaaaatcaataacagcttttcatcgaataaatcatacgaaaaccgtgtactatacattatgctataattctaaacttcttgagcatacatgtaagaaaattgttacaaaaccttataccttactaattcaaaagttttaacataatttgataccaaatgatgcttaattaaactaatcatgtcagcaaatctatatatgacaatgtatatattgcagattaagagtgaatctcttataattcataatgtgacaatatagagttttcataaattcatataaaattcaagtcattaactttttgtaaaacaactacacaataatacattaaaataacaataagatataaacacccaccaaccaaagaaatgggaaagtaaattataagagaaaaaaaaaacactaaaaatccaatattaattccttttcaatatgctaacttctgtcaaaatcaaccattatcaagagaaagaacatacaatcccaacaacctaaaattaaacaaacaaaacatgaaaattaatgtttaccagccaaacaaaacacaacccaactctgagtatatatatgtatatctatatatatcatacctatgttattttgattcttgaagcaaatgaacccaattatatctcaatcactcttccaacactgaaaaaagaagccaacttttcagttggtgataaaagaaacatctttagtctcatcaaaaaaagctaatatacaataaaagaacaatatatttcaacttgaatagtacaattaatcaaacccagaaaccctaataatcaaaccacataaagaaagaaagaaacttaccacaaaccctagaatcaccagagctgaaaaaggcagagaccattaaaacaagtcacatgcaaaaaaaaactaaaatgatctttcatggatcatcatcatgtgctttaaaagtcaaaaccctcacaaacacgtcttccacccaaagaagacccaaaaaaaaaaaaaacccaccaagaaaaacaccctctaatctccacaaaactcccacaagacccgaaaatcttgcagacccagatataaaaaaggggtcttttttctcaaaactcaaacaaaagattcaaagctatcataaaaatccaaactttcctattaaggagctacttcaaagatcatacacagccaaaagagaggtttttttttacagtgtttgaaagaggagagagaaagtttgaaaattcgaaagttgtttgagacaaattttatatcatcagcaaacgatgttgtttgaaagagagagaaagagattatgatcaagtgttgttactttcaccgtaagctctattgaatatgcattcaaaggttgtacctttattacttaaaggtacaaatacaatttcaaaggtgtcacttttatgaagtatgaggaattgggtccagagaattgaagccagattgtgatgccacgtcagcaaatggtaccgtccaatgcgttagtattgactagtgagcaatgaccatgacccccctaaacaaaataaacaaaacaaaagtaaaagagaaaagagagatataggttttgcctttgtatattactattaatatattattataggctttctttggcttctagtttgtgcatctcactatcctcttgcacctttttattatgtctaggtggctatatctattatagtttgtatattttacaagaagagaaatgtataagtggtgtcttgtatatttttatatgttaatgtggcgctcataatatggctagatgggcgtttgctcatcaggtgtttgggattatcacggtgtcctccttacttgataatatattttgtaacgaccgagaggtctaacttttgaatttatgatataaacgct

SEQ ID NO: 243430 - DNA, 3395 bp, Cannabis indica
attttacttctatttttgtgattgaagaataaaataacaaaaattttactgaaacaccacctattataattttttttggtaatccacataaaccctacaaattcagcataaatagtctaccaactggctgtttgtactttgtacaacaagggcattgattaattcatatttagttatgaaagaaaaagaatctatccacttatttagacttattcaccatatagtccattccctcctattgtagtatgttcacatgtttgatattgatttttgtaataaatgccaaccaaacaatgtacaatgccattaagtgctacaaactgactcaacaatatacactcaacttatttaatgacctaaacttgtaccttttttactgtaaacaaacaagattttcactagacataaatgaatcaattaatcatataccagaagtaatagtcttatgattgtaaggtaaaatcaaatcaatataaaataagtttagaaaaaatgaaatgtgtgtgtgtgtgagacagagagagccataaacaaaagtaagtataaagaagtataacaccaaatttaataaacagaaggtggataatggattagctaccaaggctttttttgcattataggaactgagaaatccgttacagattacaatgattccacagaagctcatggcattgagagagatttcgactgttctaacaacattaaccataaccagtgtatacaccagaaacccaatattcacaaaatttgcagaggcttttttgccataaaaatgattgctacccccttcccctcgaaccgaaccgacagggtaataatacatcctctaatctacccaaagaaggaaaaagaagaagaaaaaataataaaagcggtctcccaactgcataagggcagagagaccggagaaaagtgaataaggtagaaccaaaggagagatgagaccctgtacacatacctctatatcagtctctatcttcccaagctctagagtggtaatttacatgattttcaaatcaaaaagaaaatgcccttgtcaatatagcctcggatgtcccagttaagtttttaacgaaacctgcaaataataatcagcttctccatccatcaatgcccttgcggaataactcgcttcatctgcatataagcctcgcataaaatcagcttctttctatataccaagaaaattcactaatgctaagcttgaaatcaacaaaggtaatgcactaacaagtccgcacgcatattagcttagtcttgcggaaagaattggtaaggtaaaccgaaaaatacctgtacacagctgtaccaaggacaaataggcccaaccttgttaggaccgaatgctgtcaaaactgctcagttcatatggttgtttcattctggtttagacttagcaggcctcaaatataagcttccctgcccttgcaggtgctgtatttgctgctgaggttgctgctgctgctgctgttgcagtggcagttggttctgagaagacttttgttctgttgttgttgttgttgttcttgtttcatatattgctgagaggcagttgacagtgttggagactgttgtactggttgcgatggaggctgctgctgggactgctgccactgactcccaacattatgtccatgagaagataagctgccagacaactgtcttggacctaacccttgactagtaggtggtgttggctcatttccaagtgaatgtgaaacagatgggctcccagtggaacctgcttgaacggttgaatttggatgattagaatcaaatgcaggttctgaggacttccattgagtaccaatggcagaagacacaggcactgcagcagttgagtccggacatgattgaggttttgccacgcttgcacccacctgagaactattattcacaggcttctgatcagcttgagcttgatcattttgggacttgcttggcagttcaggatttacttgacgattttgttggataattctatggacattcggttgagtttgattgacttgcttttgatgagggtgtggctgtgactgtgactgcagctgctggtgattgggacccataactgccactggaacttgttgggaagttgataatgcatggcctgatgaaacaggtggaacttggccttgggtgctattatctgaatgagaaggcatttgatggagctgcttcgtggaaggaagagtcgagctaacaaggagcttctgatgatttgaacattgaggaaccattgtctttggtggttgcattgcattgagtccagacccagaatatacactttgtccttgcattatctgtgtcatttgctctcctttctctagagattggcttcctgggggaatagaaaggccattcaaatgagaaggatccacagagtgattctgaaccaaacctcttcctactcccttcaaaagttttgcttgctgttgtgattgtacatgttgccgttgctgggggtggtgcctaccagcttgttgaagatgctgctgttgctgttgttgctgacgctgccgttgctttcccatttgattagtcaagccactagcaccaggattccggctaagcccgtgaggggggaggtgatgtttctgctgatgttgtgctggtatggttgtcattggggaagatggtgttaaaggggacatcgacactggttgtgatggagtttgtgcttgaatttgggaactgttttgaagagttgacgaaaccggatggtgggcctgtgactggacatgtgacatcagaggatttgatgcagcaaactgttgttgctgctgatgttgctgttgttgatgcatataccgctgttgctgcatatgtctttctttagcaagacggattgcataggcttgctgctgtgaacccgctgtatgattaggagggtgatgtgggttactgctatgtccatgagactgttgtggcaaaacctgatgttgctgttggggatggccaggatatgatggaactgttggtggatttgtctgattagcaaaggcaggattcaaaccattgaaggcagcaataccttggccattcccttgtgccgcctgcatttgaagctctggaaccaacatttgcctttgatgctctgcattgtgaccaggctgtaataaaacggttgtatagtcaaataaagagttacagtcaacaaaatagactttatacaagaaagcaaaccacgtgtaagtgactcgtagaacttaaagcgaaacatcaatgcgcaattagtttgcatgaaacaacaaacacggacatgtagcgtatgttaatccatacataagactaatacatcttttcattgtccccgctttactaaacctagcatgttctcttctcttacaaaaggaaacagctgtgatcaaagtatacattggtcaactcaccct

SEQ ID NO: 243431 - DNA, 5558 bp, Cannabis indica
attggtcatatattttttatttcataactattattaaaaatatatatatataaattaaaagcttagtacatttaactgtcgctattatacttaaagacaccaatactatctgacaccactaaatatattatattattataaatataatttaatattaaatctcatttattataatttaatatctactatatgttggaaaattcttatggtttcgaaattgttgcgagagatagtcttggtaagcttattgaagcaaaaacctattacaaagaaggattatatgttgctgaagtagtgaaggctatgggaataaaagagactcttagttggatcaagagtcagacatggcagatggtagagattgaaacggatagcttggtcaccattcaagggattcgacataatcaaccaatgtactctgtcttcagtttgatcatcaacgactgtaatcatctgttttcttctttacataattttaatttacgttttatcaaacgatcagcaaatcgagttgcacatgttattgctaaacactctcgatttctttttgattgtagcatttttgagcataatatctgggctgatttataagtttttttgtactctgaatgctaaaatttaatgaagttttatttcaaataaaaaaaaaaaaagatattggacactactatatgtacctaatatcaatgttataccattgaaagcaagtcattgcgttacacaatgacttgagagatactgttttttctacattttattgaatttttctcataaaataattatttttgaaaaaaaaaaaacataattttgctaacttttgctataaaacccataaaaatgaagattccagaaaaaaaaaacattttggtaaacatttcacttgtctataaggcccatgggcctaatgggctacaatttgggcttgcttaacagagcttcagaagtggcgttgtacacgagagaagctgttgtattggtaaaggcggtctctaacattcttcaaaaaccaagaagaagaagaagaagaatattgcgaattcccatggtttgaggcatgtacggctccatattcacgtcctctacttcattctcagtcgctgtcacacacacgatcgctgatcaacctagattccgttgcatcggtatttttcttcttctttaatttactcttcttttaattgcttttcttttttttttccctacaaaataccgattaactagtatggattatggattatctataggaaagatattttttttttttttatgataccctttcatttatttatttatttgtttctctcatttcatttggttgatgggaaaaactgtcatggaaaatgaaatgatttgttttttattattacgtttttatttttatgctggttgggtttgagtttattgattaaattaatatagtgattgtcaaatattgcctataatatctttgtcaaataatagtgcctttaattatataggaaaaggaagtatgctgtctctcccgcgccaagaacataaaattaaaatataataataatctcctatgagtgttactagatggagcacacacatttcatgatttgttagaacaaaaaaaaatggactttggtgtcaatttaagtttttctaatctattgattggtgtatggaacagttgtttatgcaagggggttgattttcaacgttaaagctatcatcttttgattgggtttacgtttaaagatttaacttaagtgatccttacccgtttggctgaaaattaatggaaaggaaaattaatgtagacaggcttagcaatttaccatgggatgtattagacagcattcttgtacgcattcccttgaaagaagctgtgaggactagtgttttgtctacaaagtggaggctcaaatggactggcctctctcaatatctcattgatgatagaatcttccccaccggtttagtgttggacccggtagccagaggggatcaagttgcgggaatcttgcatcaagttcaagtgaatcacaatggcccaattgagaagtttaagttctctgcttattgtcgtttggaccattcagttttacttcagtggatcattttcttaggtgggagaggtgtaaatgagtttcttttggagaggtttgattctcccatgccttttgagtttccttttgatcagttctcttgtccaaagctgaggcatttgaaccttttttgttgcactatcaagctaccaattgttcatgcttttgaagggtttaaccaccttacaagccttcagctcactgaagttagcatcaacacagaaacgctagagtgcttgattcacaagtgctctgttcttgagaaattgacattgttggacttggagtttggtgatccaattttcttgaagattcaaaacacaaaacttagatatctgaagataatttcagcaattggagatataattcttcacgataatcctttcctagttagtgttgaaattcgcttgaggatcccgcctataccgaatattttggaacaggatagcaatttagtcaggatctttagttccttgcaggggattagaagacttgctctgtcgaatttctctgttttggtaaccaatccccatcattattatatttattattatttttatttggatttttgggaatttattttacattaaaattgtttcctgcatttcttgctagtttttttcaaatggaattatcccagaaaagcttccttgtccgcttcacaacctgacagttgttgaactgagtgaagtatcagttgatactttgaagcaagctatggtttgtctcagcctgatcaagagtgctccaaacttggaggaactattcatttcagtaagtttgttaactaaatttttgttaatatagagggcttcttgttaccatgttaatgagacttggctttactttcttaggttgctcgaccatttactaatggaaaatttgtgactgattttctgagtgataaatgtcggttcggcttgtatttcaaccggcttaaagtagtgaaggtcagaggtgtatgggaaatggatcatgcctggcactttgtcaagtttatacttgctaattcaccagtgcttgagactttgactatagtatccttaagagatggaaggtttacagaagaacaattagcgcaattggatcgagcctcagaacgtgtgaagattttaagcttaactgcatgcagttaagaccccttttagcattcctcaatttaagtaggaagtagctctgtgtggtgattttcatcatccctttgatgtaaatgctgtttgatatcttatttttttttccttttcttgagaaagctaagctataatacaggattttgagattggtttaagttgacgtatgtatgtacgtgtaattggtttgagtttaaatcctaataattatggggtttttcatgttagaagccaagtttttgttcttcccaaaatatgagcggcagcatattatgcattaatttctgcggaaaagaacagatgggaatatcgatgacattatatttcttaaatcaagagatgtcagtttcacaaactaatattctgtacagttgcaatacaagcatcaaaaaactttgtaactctaatatacaacaggtaaagaaataactctcaatattcatatatatattttttcacttaataacttcaactatagtttgtccctaagatatgctccgtttcgtttagaggaagaaaatggttatttcagaagaggaatcacctgggaccagaaagctccatggcttggactagtaatgaagaatcatctgtgagatcagaatatctatctgaggatgaaaattcatgaggttttcccttagttgcctcaactctttgagaagcttcccactttcgacgagcccatcaccttcaagcatccgaacaacttcagacatctttggtctgcggccaggcaggtattgggtacacaacagagccacttgaaccatttcctcaagctccaccctatcataatttgtcttaagatccttgtctactagcatttcgagtttcttttcttgatggatttttcttacctgtgatcagattatttcaatttcacataaatatacgtacatacatagtcatgagatttatagctaatcactaaaaaaaagtgaactaacccaatcaagaatagctcctttctgattagcagccttgccaaattctagtgctctctggcctgtgataagttcaaggagaagaatcccaaacccgaaaacatctgttttctctgaggattgtccagtggatagatactctggtgcaatgtgtcccacggtacccctcacagcggtagtgacatgtgagtcttgatgatccaaaagctttgccagtccaaaatctcctactacagcctcacaatcatcatcaagcagtatgtttgcagccttcacatccctgtgtattatcttgggatcacactgttcatgaagatataatagccctcttgctgctcctaaggaaattctcttccttgtgctccaatctagtactggtttacctgtttaatatcaacccaagttcagaaaactaatccaattttccatcattgtagcacatctacaaataaattacacaagtactataactacagtaacattttacttacctttgagacgagaagcaacactgccattcgacatatatggataaattagaagtctttctgtcggtgtaatgcaaaacccatatagtctgagaagattcctatgaactgctaaactgatcatctcaacttcagtctggaattgaatctctcctccaagtgcactgccatctttaagcctcttaacagctacaaaagtaccatcgtgaagagttcctttgtagacatgtccaaaaccacctttgcctagtatgttcttgctgctgaagttgtttgttgcaacctgaagttctctaaagtggaatctcttcaagtttcctagcgaaatttcttcatgatgccggtctgaaaagttcattatgtgtggcaataagtaaaggagtttaacaattggtttaagcattgtttcatgctagtgttcctaactgaagaattgtgttttcttttctttttctaaacttaattatcacaaacctttgacatcaaagaatttttgttgatttcgcctatgcctccaccataacacggctccaaatccaagtgcaatcagacaaaggcagcctaggcttaaaccgaaggcaagggctatcttgtgatttctaggcttgacagaaggaagagctgcttaaaaaacagagaaactaagtttagaagcagtgaaagatcaaccaaatttaattttgaatcgttacgagtttaaaaagcttaaaactactacaagtcacagtatgttaaactgaattaagctccttactatctgaactattcaggttcatggacattggcattaatgttgtcccatagcagcctgcttcagatccagttgggcagatgagaggattcccaacaatgctgaaaaataaataaatagataaattgtgttgaacttaggcatttgatttgaaaagagagagagagaga

SEQ ID NO: 243432 - DNA, 5491 bp, Cannabis indica
tgggtaggccctggaagtagggcggcagaggagaaacagttctttgacagccatcttgctcccttctaccgaattgaacaggtttcaatatttctttttataaagtcctacttttctatcgtttgcatggttttatttatttattggccttctttatttttcatgggaaaatatttgtcattattccatgtgtattgtatagttttgtttctagaaggttacttaaacaggcttaacatgttttactgtgttgcagttatgcaatgcaaagcaacaatatgagtgtaaattgacaatatcaaccccaatttgtgtttgctctttaaaaaagaaaaagaaaattcagatgccctataaaggattttgatgatttgtaatgatctatatattgttttgtacataactttcctgatattatcctactatttttatttcatttgttgtgattttagctcataatagcaaccattcctgatccgaatctgggaaagcaaccaagtattattacggaggataatattcagttactttttgaaatacagaagaaggtagtataaatgattgatgctactcttcaatcagtttttttttttgcttatttgagaggctatacattccttccatgcattccactagccattcacatagcacattttgacaggttgatggaattcgtgcaaattactccggttcagcggtatctctgactgacatttgcatgaagcccctaggccaggactgtgccactcaaagtattctgcaggttaaatgttgtgtagttcgaataagtggaattttgtaaggtagaataagtgtaggtcaatctaaaatattcccctctctgtctgtgtatagtattacaaaatggaccctgataactatgacatgtatggaggagtcgaacatgctgagtattgttttcaggtatgtatgccttcattttattttgttcaatgctttgttttggttgcatttgtgcttatttcttgtaatcacttttatgaagcaagattcaatatcatattatttctagcatttggttaattaacattctatggattagaatttcaaatatgaacttcttaaactagttatctgaagcgttcgattttttactttctgaaagttttttctctcctcttctgtgctcaatttttgtttagttattggttgatagcatgtcttagttaagtatttctctcccttgtatctgacttgtagctacataatttctattttaaaagatatattttataatgctaaattgaatattatccatttctacttcccgccttcagcattacactaccgccgacacatgtttgagtgcattcgaggctccacttgatccaagcactgcattaggagggtttcctggcaacaattattcagaggtaagggtatctatatgctgttcaggtatcttgctacttggcgaattgatttataactaatctttgaattttcaggcttctgcatttgttgtcacctaccctgttaataatgcggtcgacaaagtaggaggtgagaatgggaggtcacttgcctgggaaaaggcttttataaagttagcaaaggtatgaggactggtgatctgttttttacactctttatttatgcttgaatttcttgcttcaattctcttatgcatgaggcttgtatctcaccgtgtagagttcatgtgacactcaacgtagctagtgctgcttatttatttattttttatatttaagttttgctttgcactgaacctcctggacattttgtactggatgaaaattcattttgttgctatttattttctaatgctcctaaaagaatttctattgccttgcaatcccatggtttaaaaaactttagattcatattaatctgggatacattaacctagacttcaaattatcctgggttcaagaaaccgatttccttaataatgtagtgtaaagaattctctaatagcaaatgaacgtaagtaatatcttatctggattgggagttgatatgcattttaaaagcaatttgtcagttacttgagacaaactgaacagaaaagaaactggagttcctttttgggggtttatttatattttctttatttcttctctgttctaaacttaggtgaagtggcttaatttaaaatctcctggcttcttttaattgaagcggtatttgtaatacacgtgttatggaaaagaaggccttagttattgtgttcgctttgcttcatattttcttaaccgcattttgtgaggtccacgtttctatttcctagctttttgctgctttcttttgtttttacaagttgaatgaagagtgaagttgttctatcaatatattttgagattatattcattcatttattttttagaaacagaaaataaaaatattgtcaagtaagccttttataaccccatgtgaattcctttgaaatgattattgcaattttattgttgaaaataggaggaattgctgcctatggttcattctagcaatcttaccctttcattttcttctgagagttcaattgaggaggagttgaaacgagagagtaccgcagatgttataaccattgtggtaagtcttcactcttcagttacatttatttattttgaggggtgggtttggggttgttttggtgaaggtgggaggtaaggggggagaaatataagtttgtttgataatttattgccccaattgctaataattatttttttttgttgggaccaactgctaataaaattgatagaccttcttcatttaatcattcattgaatgagttttaaatataacaaataaaacagtcttacatgtcccaaatcatttcaggtaagctatcttgttatgtttgcttacatatcagtgaccttgggagatgctcctcgattatcttctttctacctctcatccaaggtattttacctttaacatcacttatttcctttatttcttgtgcatgtattttccaatgctagttttgtgtatgcaaacaattgcctttcaatttttgtcttgaattgatctttggttccaagaattgacctgtgtttcaatttaaaaatggtaacaatctttttaaaaaattctaactatcattttggaaaatatttgctcaaagagtcagaaaagataaatttgtcttaaagttttgggaaactattatctcaaaacatgctgtaagtgataaatttgctactatacaaacatgctggtgtatgtatttggaagtaacagtgtaattattaggttgtgtaattactaccaacatagtaattagtatacaaggtgagtctggatgtcaagtagtaattacatatgaatttttaagtttattaacgagttagtaattacataaaaataacgttggataataattaattgtctaaatatagtagcattttgtaattacaaagtataattacactcaattctcaaagacaagctgagaattagagagtacctctaattcactatgtaattatttcgttaaacaaacactcttaacctagttgaaaaaattagagaaattgaagcaataagtttatagacccttagattaaatgaatctaatggttgaaaataaataataaattagcaagataaataaaacctaaaaatggttgctgttgttatcttccctggttatatctcttgttcccatccttcatcaccgttgctgttgctgctgctttcccgtcgctgttgccatcgtccatgactgtcctttagcccatcgggatttctttgctgctagagtttcccttttttctgattatctgtatttatataattttagaaaactgcttcccctttttattctcctccatagtatttatttgttaccaagtttatatgtctttatcatagtattagttctgctgctgtagctgataacactaacaacttggttccagattttaaagtcttggtttgaatgcatgcatactgtaagggtatttatatgagcactagcatgtgactatgcatttaagcatcaatatcttactatttattaccctgttacgcaagtaaaaaccctgacaaaacaagggaacactatctggtggtcttgatcgggtcactaaacatatgtaacttgcagatgttcgtgttgaaacttggataacttgtgaggactgggttgaaacagacatatatttatgttcctaatgatgggtggattctctgatttaggactcattgccctgattttttactcacatattggggatttatgagacttttctcttcttttaattgcctttttttttccgggttttgctttacatggtgtagtcgtagttgttggtaaatttgggtatattacatagatgaatacatgcttgcagagttttactttaattatgctttcttccttacatagttactgcatttctacaaccttcagtcatttcaaattctaaagctttctaggagaatattatcttttatatattatggttgagtttttaataattggtttatgcttcattagatatatcactgatcttaatctactgttttccaggtgcttcttggtctttcaggagttgttctagtcatgctctcagtcctaggttctgtgggactttttagtgctcttggagtcaaatcaacattaattataatggaagtcattcctttccttgttctggctgtaagttatttataatttcttaatgagtctttgagtaaatagtctaatgtgactttttagtgctcttgcatgtaatctataatttaagttagtcagtcttatggctctagacatagaataagaatcatcagagctatatggctctagttggtctctacatccgcatattctttttatcccttcttctgcattgaccttaatatatcatgcgtgtttcaaattttatttttcaccttcatactttattttagatcttcccaggtctttggcttttgatgctttatactttgtaacttttttacaagcttaataaagtggctacaaaaccggataataaagcattgtcattcctttttaatttattttctcccctctaaaggctaccctgtgaaatagtgaagctttgtgctagtgtttttatcaaccttttcttccaccctctttctttacctgttcaacaagtattcatgttatataatctaatatgttcttccttttggctactgtaatcaggtaggtgtagataacatgtgtatattggtacatgctgtaaaacgtcaatccttggagttatctatagaacaacgaataagtaatgcacttgttgaagttggtccgtccataacactagctagtttatctgagattctagcatttgcagttggaagtttcatttctatgccagcttgccgagtcttttccatgtttgcaggtgtcttactgatttttcatttcatttctgtgtagtatctgttcttatcaatttaacatctgatatgtgggtcaatagtccacacgatgttaaatttttttcttgagagggaaagcccactccaa

SEQ ID NO: 243433 - DNA, 1692 bp, Cannabis indica
ctcagtatgagcaacaccttgatgagttttgtgtgtagaagagctccatcaacgacggtcccaatactccgaagtccggtttttctttggaggagatactgttcaccaccatcttcctcctctaatgcctcaaatagaaaactttttgttggaggttcatttccgttatttccacctcgtccttgatgattatgatcaatattatcttaaactgttaatggtgcttttgggtcttgcaggattatcatggtcagtcgacgagaagtccttatcagacgccttctcttcctttggagaggtcactgaaggtataaaagatttagtaatggagacaattgtttttctttttctttttattttatatgtatcaatgtgtttgacgaaaagcctgactggtgggtaagacctttttaagttgtttcaattatggggtatttgaaaccaagtgaactagttcatgctcaagtacttggattttcgccattgtaacttaaaagtaatttatgaaaaaattcgtctaatcccaattggggaagaaagtttccaaacgtttaattggggcagagggaaaaaaaaacaattgacctgtgtgtgaaatatatggttgaatataacatgttctctatattgtatatgtttctatttgtatttcagtgaagataatatacgacaaagactccggtaggtctagaggctttggatttgttcaatatttgaaggaagatgatgccttaagtgcaaaagatgccatggatggaaaggtaagcatgttctaatataattgtcatgtattgattgtttgaagaaaccatgctcatgatctatgttttgttccaggcattgctgggtcgacctttgaggataactgtggctgttgacaaagctcgtggcggacctgttgtagttcctcgcctttccaacatggctaatggcgctgggaatgatgcttgaattctcattacaggagggaaagatttctgaggtgtgataactagaatgtaatgatttcttatacataaaactaagatgatcaaaatgtattatatttggccaaattcctttatgttccaatttttacacacttatctctctatttttttcttttttggcaatactcgttttatttcattttgtttgtaaatttgaggttctagttaattttgattgttaaatgctaactagaactgccactacttacacttgacatgttagtttttattaagtctaattagttttaaaaattcaaatattataaaataaataaaatataaaaatataaaataaacaaattaatatcctaaatcgaaatatgatctttcttcctctcttcttgtgcaagtgactgctcagtctagtgatagcaagttgcaaagagatggtggaagacaacgattcgaggggaacgtaagggactgaggtttttggatcttgaggagaggtggttggtaggggtgtaggcggtgtgggttttgactatttttttgaaaccgaatcgcacgtggtttttataatttcttaaaccttaaccgcattgcaagagtttgaaactacaaaaatgttgtgcggtgcaatagtgtatagacgatttatactatcgtcaaataaacaaataatatatttaagtttcaatagcacaataaaaatacacatggtattaaaatttcaacaacggcataaataactattttgttt

SEQ ID NO: 243434 - DNA, 4629 bp, Cannabis indica
aaatttactataattatttaaaaactaaaaaattagagtattgtatcaaatatcatataatttaagaacaaaaactttcttagttaaataaataatgtaaaataatttctttttaaatttgctcaaattatttgtgctactaatatggtaatgagttatattaaaaaactcgtattattttatgaatgtgtgtatataatacgtaaatacatcaaattataataaaataaagcaatgaataattgagactttaaataagaaagttaagaagtaaaactagtttaatgaaattgtatattaaatatatacaaaaataattatattatatatgtatagtgtataatatagatattcggtcggttctcgaattaatcggtcggtttgccattgactctaaaactgaccgtgcaaattcggttttaactgaaggcagttttaaccgaaggcagttttttcagtttttagttttttcggtgtttgggcggtcggtgtactcggtttggtcagtttattggattttttgctcagccctagctgctgacctgattaggagatttacccagcagactaggggcaaatacaggaagtccagccgaatagaccaaagtacgggtaggaagaacatacaaccagatatgtatggccacccgggcagaatggacaatctggttccaatcccagtgatcataccactatctccccagcggatgagcaagtttttcctggtaattacctcgagaggaacgaccagaaaaactttcgacctagacctaaaagaaaccttttgaatgacaacccgaaagagaagtgatttggacagacatttcagccccatgtaataatcagtcgatcaatgcaaaatactttgttcagaaaaatagagataatctcgtagcttttgaggctcagggggtcaacaggtgacacatgccagtcaacatgcatgacaagtttatcatgggatataagtccaattagatcagcttaagagcctagtaaaagcctgtccaattctaaaaatcaccgagttggagcttgattggactaggggtttgctatttactgtgtgaatcaattctcttgacctcccgaccaagttcaaaatatcgacttggaagatgtacaatggaaaagatgatccattgtctcacatcaagtattttgagatacagatcgatctctaaggcatcaagggagatggccaatgccaaatttttccaactactctagcaaataccacacaacaatggtatttcaagttacctctgagaagatttgatttttgggaagcctttaccactacattctacgcccagttttcatcctccaaacaattgctttcacatctagaagacttggtcaaggtgaagcaatgactaggagaacctttgaaggactacattgagaggttcatgatggaagccatgaaggtaaaaaacttaataaagggaggatgactagctacgatcctaggcagaatagagcctttaagagcactttagaaggacattaaaatgaccactttaggttcaatgggggaactcttagaatggacagatggatttataaagctcaagaaagaagtcaagcaggtggagaatgtcgggcagagtaaggccgacctaagtcacgtaccctcctctactgttgccaatctgtaggtcaaattgacccgatttccagctgggagacacatggcatttccaagtcaaggatactcaaagcaaagtctagttcaaggcccgaccaagaccataggccaaaactactaatttagtacttgagtccatttaagtgacaaacagaaaacatatctggatgatgtactccttctaaatagaggaaccccgaacaacatcataaaagtgctttcaaaaaattattaaatgaaccttcgtccattgaaggtttaattttgaccaagttatgaatcataaccttctggtagagtctctcgatcaacctaaagaaaagagaaatcaagccaagtcacagtactaccagtgaatgcaaaggtatgatgataacgtaattgcattcctgtttaaaataccatttctatgtggtggcttcaagataaaattccagtttagaagtgcaaaaaagtcttaatgctatggtctagtcaccacattaaatcacctttgattaaacaaaacaccattcttaaatggtagtttctggacaaaatctccgctcagaagttttgaaaaattataatgcaaaagtccaatgatcacataattgcattccaatttaagttatcattcttaaattatagcttttgggagaaacccctactcagaagtttcaaaagattgaaatgcccaagtccggtgaccactttaaagcattctctatacttaacaaatgtaagttacacttaagtaaccacacatacaagaccaacaaatgaataacatgatttaaaatcgttcaaattacgttaactactaagtaatttgacttagtgattttcaaatcactaatttgtctaacatgggtacaaataggttcacccatatacagggccgagacagattaatgtgatataccctggatgcaagtctgctcagttacttgggggcacctacaccctgtatgacatagaccataggctagttttaggttcattttatgaagtatcttagaggtgtgtttcaattaactacattcattttgtgcagaatcacacttattttctacttatttcaggtttaaatggtaaaatttataatatgaattgaaaatgagaagagatgtgttaaataatatatatatgatgagtttgtcatggaatttgaagttctaagatataatggcttgaaagattctaagttttggatgctcaacatgctccgtttgtgatcaaaaaataagtttgaagcttcaagcctatttttgactatgatgcgttaactttcaggaataatattgtgaataaaaattctagatctctcttccgtattttcaaaacatcttcaatcgtcccattctgagaattattaaaagagttatggccaaaacattatcagtcatcgcactaggaagcttgttgtccaaaaaatgggtacttaggctacgacattgaaattcaatatcacggctcctagagcaaaagcagcgtatgtttgtgcaaatgtggggacatgggccgcgatattcaaaatccaatgtcaaggcccgctaagacaattaggcaataaaaagggtttttaaatcctaatttcgagaggaatgggggacttttgaatcaccagacttttggaggacgaaaatagagagaggaagcgaccttagaggttacaaccattgatcttcaaagattttttttcttctgtctttaatttcatgtttttatcaattgttcacaaagacagttagtagctaaacttttaattagggtgttaatggatattatttgagatttctctatggttttaatgtaattttagttcttccctaatttattatgagcatcttttcatttacgtttaatgtttataattatttgattaccaattatttgtttatggttttaatgcaaaatctaaaaaagtgaatgttgattatgctatagtggaatagacatagatttcaatattggatgaaagtacctatatgttttgtgtagcaattagaatttttatgcttaattcaaattacatatgtaatttaccacagaagtgtaggaattttacatataatttgaattctatatatcctaataagaatatagattgaagtagttaatctgttattacatgaaattgaaatagaaattaaaattatattaggccgtaggaaattgatacaattaaaattaattgccctaaacttctttgaacatcattatttacttatccttttattcatttcaatttcaaatattctttaaaaattattgtcaccatatagaactaagattttagtgtcgtgactggggactattttaactaatatcattgtattatatgagtttgtcttgcgagattcataaaaaattatacatcaagattatcttgtaagtttttttaacaatataatgagccattatatattgcttaggggagatttaatgcattggtagagagatattatcacaatttcttagtaagtgtcttattctgctcttttataatggattagatgatgagacaaaattttgggtggattatggagcaaggataactctagagtctttgttaagaagaagcaatgatgatataataaatctgttgaatgacatggtagattttgattaccaatggtattgggatccctcacttcatggttggagtcaccaataccctccttattcactaatactcatgttcatacatgacatgatcgagtctattcatagaaaaaaataattctcttccaacgaaccaccttatcctctatatggagctttcgcggtggttgtaacaattagtaggggtatctattatgttttagaagacattctaagagttagccaaagatctatgtttacgaaatcctaaaattagtctagttactttgttctctatctttatacttcttctctgtattatgcatgagttgcacaatagttgtgctcagcaagcacggagaagggtagtgacattgatccataagaagctc

SEQ ID NO: 243435 - DNA, 1704 bp, Cannabis indica
tttttttaataataaggtgtacttatcattttgtgggtgtaaataaaactcccctaattatttactttctctagttctgtagaacatatatttaatcaaacaaaatatgaccttatcttgatgatatattattatatatgaactacaatgactagcacgattccaaaaacatattccaaacaaaaaaaaaaggaaaacaaatcaaattactacttctaattatacatcatatctttatatataacccacgaaataataataataatttaaaaagaacccaaatagaaattacgcctacccaaatatatatattaatagtttcctttttatttgtgtggaggagagagagaattaataatggagtagatagtgaatagtttaatgagatgaggtaatgggtgtgtcagttgacaactaatcatgtcctgttcactaatcactaaagctttttgtccatacatttggtactaatcttgtttacttgataatctttcttattaatctctaatctctttactctttaatctaatcacgttcacataacccaacccaactcaagtctcaaccgacaccaatattttttttagaaacatttgtctttctttctctcgttctatataaatctcaagaaaaaacctcgtactgtaattattattattaaaataacattgtatgaaaaaagtaaagatattggagaacaaaggttgttattacttattagttgtcattcgtaagagctgcttctctcggatcggattgaataaaggggcttctttttaataactttttaaaagcacctaataaacctttgtaacaaaggaaaaggcttcttttaaaacaataatagtattaatactaataaattgaaagaaaaaaaaatcagaagaaaatgctcttacatttattaattattctattcaacgctaaatttgtgatgagtaattttatttaaagtttagaatttttaaaatatttacaaaactaaattaaaataagcttgttctaaatttttctttattttaaaatttctttaaattttacaactcttactatacatttatagaatattattcattgttctaaatatattttattaaaagtaatttgcagtataaatatttaagtttatctcacagttctaataatacttaagttacaattctggaacctttgtaggtaagtgttaaataaattgtcatgtggtaattcctgattggtccaagtcattaaattttatttttctaaaaaattaatttaaatatacaaataagaaaatgataagtggataatgacttattatttaatagttaagtacctacagaattttaaaaatataatttagatattattaccgactaaaaattaaacttaagtatttatttataactaaaagttaaacttaagtatttatgccgtaatttacttttttattatttatttgagattttaattttattttttatatagtgatatatgtaaatattaataaattatattaaaattttaaaaaaaaaaaaaaaggtaaaaattaatagtgatatgtgatgtatgtataagtttacggtaaaattaaaaaaaatatataattttaatatattataaatgatagaggggaaaaactaaccagtactctaaatttgtatatgactccaaaagtaataatgaccaatattaaacaaattaatgtaagttccactcaatagt

SEQ ID NO: 243436 - DNA, 2549 bp, Cannabis indica
ccatgaacttggcttcaatagctccagttttttagaacttttgtccatttttttttttaatttttattaaagagaaaaaaaagaaaaaagaagagagaaaaaaaaaagaaactaagaagtttaaataaatataaaaatagtaaaaataaaaaataaagtacataaaaatgtcttagcacaatataaataaatataaactttgaaaaaaaatacaatatttatgtaaaaatctcaaaaataaatagttaatgataattcaattaatatgtgttgcaatttaattggtaactatcataatttgtttttcatttaatccttttaattggtttataaaaaattatttgtcaaatgttatcaaaagtatgctgaaattttgtcatcaaaatcaaatcctttcacataagatctatttttgttattaattttttttaacatagggtccaaacaaataatggtacaaaacacaagtataattattatgaaaacataactattaaaactcttctatgtaataaacacaagtggatttttttattttttttttgggtaatgtccatatctttattgggagaaagagaaataacattatctcccatgttgcaagttctcaccaccttttgattgtttcaaacatctactttgatgcttgtattttggggttcagaaccccacatattgggtgtaatgagcataagcgtctgatttcattgctattggggcccttgtcacctcatccggaagatcaaacgcgtctacaagttcctttgcaatatttctcacttggaagctcaggtactctgatagtttgtgaattgcctgaatacacattcatgtttttaagggtcaaaattctgaagtacaagttacaaagcttccacagaccgatataatgaaatatttttaacattcaaacttctagtattaactaaaacagaactgttgattacgagaatgatttattaatttcagcaattctcgatctttaagttctgcaattggagtattaatttaggcgtaccttagctttgttgggagctacatagtcaacatttcggtaggttcctatgtctttccagattcggtccaaggcatacagatcacagacaagtttcaaagcagcccgagagcttggatcaggacagctgatacagcgatggaaaatttgtaaaaatattgaagccaactagctagaacatcaaaaattcctacattgagttaatgaagtacctttccaccgcatcaataaacttagcaaggatgacagattctatatgggactccgccaatgttaaaagatgatttaagcatctattccaagcaccaaaaccccctagagttttagagtgcttacgcagtcgcacagcaacactttgaagcaaccgtgatgttcgatactggaacaatataaattagacaaaagttattttatacctgattacattacttagacaatataatgtaatataatactcactctgaaggcatctaattgaaacttaggatctcgcaaatggtctgaactttcccaccgagcagttacaggatttggctgagataagtatgtgttcatggactctttcaggtagttccacgtaactgtgaaagtcccaccttggaacttctccttgtattgcttcaacagatcacctgcaacctgtggaacaaataaattatgttcgctaattgtaaaatagataattccacgcttcttttcaataataatttacttttcttaatattaatatgaatattgagaagactccagataattcttacttgctgcacttcaaattactcgcagggattgtttctataaactagagttggcagtgccactgaagacacgtttttgttttctattcctaccttccctactctagtgtgagcattctagaactcgcatttatacaacaaaattagaagaatgatatagtaaaaacagttgcaaacctgttgtagtagcactgtattgtccccttcaaatgtctggaaaatgtcatgatcattcctcagcataccaaagcgattaacagcagcatacccatggcctccacaagcttccctacaaacgctcaatgactttgccgtgtatgatgtcacataagccttgaggcctgctgaaagtgcatgaacatcagcaatcaattgttcatcatgggactttttcatctcggcatacttttccactaaatatactgttgagaaatggaatgcataagtcgaagcgagcattggcataagcttatgctggtgagattgataatcaagtatactgacttcaggctgcttgggaggaccaaactgctgccgaagtaatgaatccgtattgcaattgtggaggaaagcttgaggacacttactgaagaatatgccagccaactcttccaccaacaagttcacctaatgttgcagcaaatcttctgtttatcgtggggaggctacttgtgtatttaccatccctagagacatctccaaaaacggttaacgaaagattgtcacgaggtatcctgactgagcggaatctcagtgctccattatctacaccattt

SEQ ID NO: 243437 - DNA, 2950 bp, Cannabis indica
  modified_base (178)..(178): a, c, t, g, unknown or other
aacaagatttaatttgtcatataaaaagtaatttataacttttgccaaatataaactcaaaaatagtatttcttcacatggttctttaatttagtgagattgacacgtgtctcatctaaaataccgaacttaactaccatttcaaattctctgtttcattatcttcttctttcttctntcttcttctttcttctgagaataatcaacaatggcgaatgtaacccaagacgaaaacttgacactgacccagatagaagaaaccacaaaggaactgtctttacacctcaaaaagtcaattcaaaacgttgacctcaagtttcaacagctcaatcattctattcatcatcatcttcatcactccatagtttctgaattcttgacactcaagaaagatcaaatgcttcatcagcaagagtttgataaaatggagtctttgaaattcaagattttgaaggatctcagtcttaacagatcaatgttcttccttgtgaagagggaaatgcagaggttgaagaaagaagaggaaaatcttaaccagaagctgatccaaactttggggaatgaagattttcgggttgtggaatcgcgagatggtgatcttgaaggggtcaagaaaagggaagatgatgctgttagttttgatgaagagttgaagaacagttgtttgattaattgtctcaaagaagaagaagaggatgttcagactagtgttgaaatcgttaagaatgatgcaatttcgaggtcattctcaatgaaatttaaattaattaagtactattatcaacagcctatgttcaactggattagagatggaaaagatgagagattcgaggaggaggtttcggtttgttcaaaggagattaaagtgagaaataagtacgaactcgagttcaagattcatgagtttttggaggcaaggcgagaggcgatgaagaaagctcgagtagaagggaagttttcctacattgagtgggctgatcatgctatgagtagcaatagattcaccgagattataatttcgattcaagagaaagttgaggagatttcgaggcggctttgtgtgcaaatatgtgaactcatgtttgcttcagcagaaaatttgaaacagtttaggcagtggcataacttcaaacaaattttcatgttactaatgattctgcaggagcccggggagaccgtttacttggggagaatggcttctgtgttagaagctgctcaacacattcttatgaggacttaaacagtacaagttttgtgaagaatcagaagggttgagcagtgaaattggtggaatatttgacttgtttctaagggaagtttttgtgttttgaatccattctaacttacccgatttttttctcctgtgtttgatgataacacaatgctagtaaatgttgagaaaattcttgatgagtgtctgaaacaagaatttggatacaatggtagaaaagatggtggctctttagtaacatcaatgatcattcttgtgaatagggagattgaaaggttgatgaaagcaaaagaaaaactgaacaagaggcttagtgctttgacatctaattgtactgaagatggtagttcttcacacattcaatcccaagggtcaacaagggtaagagctgatgttaaagaggaagaaaaggatttgggctctttagattcgcaagtggtgcgattgcaggaattgacaagtgagagagctgatgttacagaggaagaaaaggactcgagcgagttggaattcagctcttcaaatacagattcacagatgttgcaagtgcaagaaacgacaagtgaaggggctggtgttacagaggaagaaaaggatttgatcgcgttggtattcagctcttcgagtaaagattcgcaagtggtgcaagtgcaagaatcgacaagtgaaagagctgatgttaaggatgatggtaacacttcaagtgaaaattcacaggctgcacaaccagaagaattgattattgaaagagctaatagttttaaggatgaacataaagtgctcaagaaagaaaaagatcatgatgtttgtcctaaaatcattaagagtaaaaaatattcaagctcattgtccaggaagctcaaactgatcaaacactattatctagcaagaaatactaagttcaactggttgaggaatggaaaagatgacaaattcgagatagaaagtgctactgatttggaggagtttcgagtgaggaacatgtctgaaatggaaaagaagattgcggttttgattgaggaaaggcaaaaggcgatcgagtatgctcaaaaagaagggaagaggagttacctgaagtggtttgaacttcatagtaggactaatcacaaaagaatcaataagattacactaaggaaatgtcaatggatttatcaaaatgccatgtaccttcatgacaagcttattcatcaaatgtgtgagctgattttcacctttgaaatttgtggacaggtaagaaaatggaatgacttaaaacacatattactattactattgctactgcaagagcaggatgagactggtttcttctgccactttgtaattcttgcaacagaacgtgctcagacacttgtcgaaatcaaaatgcagcagcacggaatttgcagtgtggaattagaaggaatgagtagtagaattgatgagtttatggatttgtttctaagggaatttttgtgtttggagtcaatgtttggttaccctattctctattcaactcatgttaacagtaaactagatgcaattaagattggtgttgaggaatgtatgaaacaaatgaatgagattcagaacaaagtgactgaattcatgtctttagcaatagaattgggagaaaatgtggtgtagacaaaaacttagctcattggtattattctcatgttaatgtagttgtaatgttagatataataagataccattcattaaagccaatatgatcaatca

SEQ ID NO: 243438 - DNA, 3743 bp, Cannabis indica
acaatacaactaatacgacgtttcaaacaaactcttacactatatatacaagcgttaaataatgattgtaattggttagaagataatccttctactattttttttttgttattgtaaataagtttatgtaatttataataagagtctttctctaaaaaaatataacaaaataattaaaatttaaaaattataaataatcttaaataattaaatatacactatcagaaaaaaaaaattagtagaaggattgtaattaaacttattctatatttatttattttgtattttttaaatatttatatttactgtctttccctaacatataataaagctcattaaggtataaaataatgtcacctgcttactttaccacatttatatgcaaagagagagggagctttggttctcatggttgttccacagtaacacccacaatatgctactctactaaactaattactcactcccaactcccaacttttgtctgaaatttttgcttcaaaattgcttctttttccttttgtttttctcttttcctgtacaagtatttgactgtgtgtgtgttcagagatgcaatttaacagcagtgaagctcctcaaacaagatacccttccattcattactgatcagtaaggtttccacttcttattccttcagcttaaaattctctatgatttgttttctactgcaaagtatggaccttttgttttgttttgttcttggtttttgttgagttgagttttcttgctttttcaactctgttatttatatacagtcttttgttaatgttaatgttatgtaatgggtatataactgttttcccagatactctgtctttctattttgttgtgattttcagtgaattctttgttttgtattgtgtatgtgactgttttcttcgatacccatttttgtaaatctcgtaaagcttcaagatttggtgaaaagtttgtacatttatggttaatgaaaagaatgtaaaaaaaaattgtattgtgtgaggtgtaagtactaggaccacatggtgtctttgggagtttcttttctttgattccccccctccacctgttttgtttggttggtgagaaactagaggaagaaagaaagttcaaagctgctctgaatagttgactgtcttttctttttgtatgttcttagttgtcttggaaacctaacaatattttgtctggataatcatgtaatcaattatgttaattgacacttgggttttgtttaacttttggttctgtaattatcaatagtttgtaacaaaaaaaatgaaaagaaaagttgtctttttgaaacttttgcaattatgtttggtttttatggtggaaaacatcattattttgtctattcaactgtactaattactcctttactttagggaggatgttgcattattatgattttcacgtttataaaggttaattttcttgacctgagttcttcttttctctctaatatcaaggcataattttgctttgtactcgtagttaagatttcgggtccatcctattttcatgtcttgtctgatttctagttctattttgcaattgtgtatagtacaatcttgcatttttgtgtaaagccaaagagcattaagtatctttgattagcttatgcgcttcggtagagacttttcttgtgtgtgaattaagatagagagtttgttttttcgtcatagatgtaacttcattttaacacttactatattgttgctttaggtgaaaataaaatatggaccggagcagacacaatccaatggttcgatgttcatgttcaacaccatccgaggaatcagctctagaccttgagaggaactgttgtagtcattctaatttgccttctttaagtcccccaacaacacttcaaccctttgcctcggctggacagcattgtgagagtagtgctgcttacttctcgtggcctacctcaagtcgattgaatgatgctgctgaagaaagggctaactatttcgcgaatctacaaaagggagtactacctgagaatcttaacagattgccaaaaggtcagcaagcaactacgttgcttgaacttatgactataagagcattccatagcaagatcttgcgttgttacagtctgggaacagcaattgggtttcgaattcgtcgtggtttgttaacagatataccagctattcttgtctttgtttccagaaaagtgcacaagcaatggctcagccccatccaatgtctacccactgcgttagaggttaggaatgatgtaaatgctcgcataatgtgttttgaaaacaaaaaatggctgtctggtaataacatcttgttgacttattattaaatcagggccctggaggagtatggtgtgatgttgatgttgttgaattttcatatttcggtgcccctgagccggctcccaaagaacaattgtacacagagattgttgatgacttgcgtggaggtgacccgtgcattggctcaggttctcaggttttattaagctccctttgaacttattattacttttatataaaaggattcaatggatggaaatggtagtttttcaggttactgcattttctgtgctttgtattgtcaagctataacatctagctatatgatgaaacacacagaaaccttaactcatatcctaatcacagaattcttaataggtatggtctctcattgttttggttaggtggcaagccaggaaacatatggaactttgggtgctatagtaagaagccaaactgggaatcgacaagttggctttctcacaaatcgtcatgttgctgttgacttgaactacccgaaccagaagatgtttcatcctctgcctccaacactcggacctggagtttatctcggtgcagtggagagagccacctcatttatcactgatgagctttggtatggcatctttgctggaataaacccaggtacaaacttccgaattacaattagactcgtcgaaactacttttcaagagttggggatcatttatgagaaacccttctggaaaaatattagtacaaactcattttctcaatgtacttttacaaatattttcttgcttcaaagtttcatctgacccttgtgcaaattatgggatatcttgctctggcagagacatttgtgagggcagatggagcattcattccttttgctaatgattttgacatgtgcactgttactacatctgttcgaggcgtgggagagataggtgttgtcaaaataatagatttgcagtcaccgatcagtacccttatcgggaagcaggtgatgaaagttggaagaagttctggcttgactgctggaactgttttggcgtacgcccttgaatacaatgacgaaaaaggtatttgcttcttaaccgactttcttgttgttggtgagaatcaacagacatttgaccttgaaggggatagtggtagccttataatactaaaaggtgagaacggtgagagaccacgaccgattgggatcatatggggaggaactgctaaccgaggacgattgaaattgaaaattggtcaacctcctgagaattggactagtggagttgatctcgggcgtcttctaaatctcctcgatcttgacctcatcaccactgatgaaatgcttaaaggtttgtcaatgctgtcctttgtagcttgctcctattactaacaatttatacagataaatagccatcattttgagtcaaaaaactatccaatcaagattacaaattggggaagaactcgccccacagaata

SEQ ID NO: 243439 - DNA, 2851 bp, Cannabis indica
agaggtaactacttctctggtaccattcctaacggtttcggaaacttggcttctctttacatatcttgatctaagtgctaatcgattagaaaattctattccgaatgatttcgcaaacatgaatgccctagaataccttgatcttagctttaataatctcaaaggtgaaatgatggatatgtttgttgtcaaagatacacaacttttatctttgaaagagttgagaattaatgcaaatcaattgcatgggcttgtacctaaaagtattggcaatttgaggcatttggagattttgaatctatctatgaactcactagaaggtgtgcttagtgaagctcatttctcaaatctttcaaagctatatcatcttgatttatcatttaataaacatctagagttgaatgtctcttctaattggattcctccctttcatttacaagttcttggacttgggaattgtaaattagggtttgaatttccaaagtggttgcaaacacaaaaaaatctctcccacatagtcattaccaattcaggaatttcagaatctattccaaattggttttggaattttagtactcaattatctttggtgaatctttcgaacaatcaaatcggtggacctatagtgaaagattattcattgaaatcaaaccttattgaagttgatttgagttcaaatcattttgttggtccaataccaaatttttattcaaagtggaaagattacatctttccaaaaacaaattttcaagtctcaattccatgtgtaatgttagtgatgatcattatcattactccttgagttttctagatatctctgataatcaactgattggagagcttccaaactgtttgtggaaactcaaatacataaagattctcattttgtcaaacaataagctatcaggaaaaattcctaagtctattgggagcttatcttcaattagatcattacatttaagtaacaataatttcagtgggaatttgccttcatccatgaaaaaatgtcaagaattgattcttcttgacttgggaaaaaataaattatcagggtcaataccaatgtggataggagaaagtcttcaaaaccttatgattctcagcttgagatccaatcatttcaataaaaccatacctcaaaatctgtgtcatttggtaaagcttcatgtgttggacttgtcacttaatcacatctctggaagaataccaagttgtattggtaatttttcttcaatgaaaaagaatgaagatgaggatacatattttacaactgttgattattatgaattgggaataactgattatgatgaccaagttttcttaacttggaaaggtactttgtcttcatacaaaagtactcttcgccttgtaaaaattatcgatctatctagcaacaagttgataggagaaattccaagacaaatcactcaacttaatggtttggtgttattgaacatttcaagaaacaatttaagtggacaaattccaacagagattggtaagttggtatctttagatgctcttgatttgtcaagaaaccacatttttggtaaaattccttcaagtctatctaaagtggatcgtctcaacactttagacttgtcaaacaacaacttgtctggaaaaattccaactggtactcaactgcaaagccgagatgaagcctcatacgaagggaatcccgaactctgtggatccccacttcttaaaaaatgttcggaagacaaagaagcaactcctccccctcatcttggtgatgaccgcctagaaaatgaagacgagcttattataaccaaaggatttttcatcagcttagcaatgggatttgtggttggattttggggaatttgttttactttgatcttcaataagtcttggagatacacttctttcaagttcttgagtaatgtagaagattggtgtacctaattaatgcaagatttataaggagaaaatacttcaatttatgagaagctaagaggtgaaacatactaataattaattttcttttcaaattataatatattctttttcatattactttatttaagaggtgtcttacttgcaggagacatgtggttggttcttcatttggagaatgtttcacttctgaaaaatttcctcttaaaataatttataaggttaagactttttttttaatatttaaagtgtaataaaatctgtaaaatctagtttgtataatatattgaatgttgcacaaaatcattctcaatggattgtgtacgtattaagatgatatgtattagggagtcatagtctgagtctgttgttgtcgttatttctgttattgcagagttgttattttcaactgtttttcagttggtcactcctctcaagtgactcaatatataaacctttttgtactctgtaatatttcaacaataatagaatgactctctttgattctctttctctttcttcctctctgttatttgttcatctttgattactgtttgattcttttcatcatgaaccgaaggaacactaaccataacatggtatcaaagccttttctgccattgacggcgaatatggcgactgttgcagctcaaaactcggccaacccttcgagctttggaaattcctcaaatctgccattttttatggcctttaatagaatcatgatttttcacctcctcacttaatctggatttttattttttatttttttgaaccaaattagtattacaattttcttgaaaattcaaaaccaagccagataattaaatactaacttcaaaaccatggtgtattttacaattgttatgtgtttttttaagtattgttcctttttggtttaaggtaggtttctaacctttgcaaagttcac

SEQ ID NO: 243440 - DNA, 3555 bp, Cannabis indica
attacgtcttcataatagattatcattagccatattaataaagctactctagtctataagcttttggatccaaattgttagatgttgaagttttctttacaattcaacaagaatttctggctcagttttcaaaaggggtccccaaatacagagaaagatacataagaagtttttggtggtggcctaagtgattatgttcctaacgagaaacgagtctgaggtcttggcaaggtcacagccgacaggtttagaggtccagacaaattaagctgagagcatattttattttttccattactgttttgggacacaaatctgcgcaccagagagagacttgtgctaaaatacgcgtgcctgcacacgtcatcatctaatccctcagatctttcgtccaataaacaaatgcttttttcaaaatttcagagcaaagggatcaaagctgatacaataagagcgacagctttgttctttttggattttaaggcatttgtttctagctcatgattatggaccatagagacaacctttattccttttgccacattttcccaatgatcattaccacctttcattttctatatcagttcaaattatgtactttcttacttccgagttattcaagccctttgccatttacttttctttctttcttttttttttttttttcattttccaagtgtgaatatgtgattttaggaagcatgcattaacaagaaggatattcagttgtaatagaacaacataaggtaagtttaatatcatcaatatatggcagtaaaggcaagttgcacgctttgtatgaagaatgcataaatgtgatttgcgagcataaaataatagtttatgcataatggcatataaagtaaaattcagaaccattcaaccatgccctcaacctatagtatgcccatttgctttcttttgctccctccattaagataagaaggattctgcctgtttttctctttccaaaaattcaaaactaaagggaaagtgttagctcacatcaacatcaaatgatccaaagtaggattctcccacttaatgatgatgattacatccacaatccacttacttcattagattatctttaaggaaaaggactctacttactaatctttttggggttttctagtaccacattaattcacaacagtattgatcctcgttcccactgtatattgtgaatttttgtggaaatctaaacctgtaagcttaagttaaaagttaatgaaggcctctaattgttctgatgcttatatcacagttctgaaaagcattagataaagctacaaaaagagataaaaacatcttcgatgcattagtaaaatatatcagaactcggtaaacagcttttgactagaactaaacattctttccagacatattttaaaatacaaacagatgatttccaacacaaaataaagatcatatgagatttagtacctaatttcgtgaatcccatgaggcaggcagaaattgaattatatcctagttatatatatagagcataattaatattccaaggacctagatgaatgacaagattagcaatacagcatcagcaccagacactgaaccagagagcacagctattaaagcttttactttatttatttactagactaggttactaaaccttcctaaccaatcagccaaaagtgaataaagattacttactccacacttggaatccaagaaatttatttcaataaaaaataatattttccaaaacttttggtgggtcatttcctgttgtacaatagtcgttttttttcttctatgtatgaagagacctaaactaatgggaagaaaacaaacagcgtaacaacagaaaaataataataaaagataatgctaaattgctaatcagcatgatgaagaaatttccattattttgccttgcagtagcaatttttatagcacaaaaggcagttttatctattagattgcaaaccactgccaccataatactgcctggtggtttcacgggaaaattcagcaaaagtcataccgtcctttaaccgagacgatagaggtggtacaatcttctcgatttcttcaattctctcaccgaagccttcttcttcttcctcttcggaagtcaacaggttcagacatcggtcctctaaacttaagcacttcatagggtaacccgaaatgcacagaactttgtcccatgctggctgtaagaacaccacaaaagtttctctgctcaaattttcatactttccaggtcttgaaacagagtgtagagtcgcccgaagcttgccttttgaaagtacctcagctgattccccaacctgaatgataaaattttcaggagaggaattcgccatgaaaatacctttcttgttgtgatcgtatatttgcaagcatgtgtggccattggggtagccacattcttcataacgagactccattaaatcttcttcttcttcaatttcttgcaagagaaaaagaggtgccgtcagaatagtaaaaatcccataatcatagtgccattgctgccataaatctgaaccaaagcatgcctttgaagctccctgctcgtcatgggcttgctttctcttctgttcatgtttcgaattccctctttttttcttcgcactatgtttcagaagaagccgcgtatctagcttcgaatgataatgaatgagacgccccttggacgcacgcgactctaacaaactctgctccaattctcggcctccaatagcggaatcgcagactcgagcgagtcggagcccgagttccatcatgaaaaaccctagctccgtcaaatcacttcccaggctctcaaactccttcgcccgatcattaaacaataaatctcctcctgaattcgaattcttctcgaagtacctcagttgcatcgcaaaagatgacacatttctacacggattcttcaacgggacgtcactccccaatttgttatcctaaacccaacaaataaatacgatcataatcgaaaaatcgattgtagcttctagaacccaatttccattactcaccttgagaatgcgattgcgttggtcggaatcgataagagcgagattgcgagcgagtgggaggcaatggcggagaacggagtaattggggacgccggaaactgataataggcctggacccatgggccctagggtttccattatgtgtcgtttgacaatgtctagtctctgaagctctgccggagacgaagaaggcgattgaacataatctgaggataggattaggagatcagagtaatggagttcgaaaagctcaaagccttcggctttttccatgttcgctgaatgttgttagtctcgtctaagtattggagatcagtataatatttttcaaaagaaaaacaaaatcgcgccattttttatatttattcataaatatatcgctcatttacagtatttttcactactataaatttttagaattattacatagaaaatataaaagggctattttaaaaaatattggaaattattaaggttacgataaatatggcataaaaagtaaatgccactaaatcagccattatctaaccaatcaaactaa

SEQ ID NO: 243441 - DNA, 4006 bp, Cannabis indica
ttttgcacattttttgtaattatgttgtttttggtgtacaaaaaagccctttattttttatcctaaaatcaaatttagaacaatgctctttattgcattttctacaaagaatcatacatcagtacgtatgcatttcaatttgaaactagaattcaatatgatttgtacttaaatatcttggttgtaacatcttgatgaaagctaactcgaatcatttcggattttcaggacgcttgggtttgtagcttaatgagatcaggtgaactcgtctgggatgatgagattttgaatgatctcttataaaagacactggtttgatgactcagataactctttttggcgtatactctgtggcgtttgatccaaaatctggtctggcatgcatgtaccaactgtttgccaacaatgacacaattatgtaccaaacatgtagctgtgagttctttgtgtcctctctgctgcattgaagaggagtcaatcttgcatgtcttggtaacctgtagtgagtcctaagaagtgttgtgatggtactgaggtacctgtaggggccagttttttcgactggtgctcgagttttttctgcaataattctgcagaagcaaattgtagagttgcagcaatttgctgggcagtttggggggctaagaaaaacttggtttggaaggggaaagcttttgtgaacggggacatagttgcattcgcataccagtatcttgatgaatgaaaatgtgctaaaaaatgtatggatttgtcatggccttttattcgggcctttgattgtgttaagcattggactttgccacaagcaaatagtatcaaggttaatgtggatgctgcgttgtttgaaggtggtgggagttttggttcaggcattgttgctcgtaattctactagtttgttggtggagggttggactaagctctcttcgggccaggtggatgtcattggcgtctgtgaagttcttagttggttaaagggtcgtagctggacttatgttttcgtcgaaatcgactccctttgtatggtgcaagctcttcaaagctctatcaatataatttatttgtttggtttagtcattctagattgtaaagttttatttgcatcttaaattaatgtttttttttttgttaaacaatcaattaatgtaatagctcacatgtttgctaaagcaactaagatatatctttgattctcgtttcaatttagagtctattccaactaatttgctactttatttggtgacataacttaagatttaattaagtttaaatttccattaaaaaaaatacatattatatttgcatatcaacaatcaagacatttaaataagtgatttcattatttcattgtaccttaatgccttgatttaatttttgctcaaaacttcaaagctttccctttatggagaaaaccttaaaacacagtacacccccaaaccacttgagctagtctcaagttggggtatcaaggcaaagcctagtcatattttacatagcattaattcaagataacttgaaatcagttgaagatttgagtcgtttgtgttcagagattgaactacaaagactaagatcatcagacactgcaacaaagctttggatcaatagaagtgaggcatatgcaaaatgcttggtaacctgtcaatggatacctgcaatgcaaaacaaaaatatgatgtattcgttaagactttagaggcatttgagcattcttaagaatatatactatttttattccaaaaaaaaaaaatatatatactattttgaatcttgtattttgcaaaagttatcaatcggaccctttgtttattaaatgacaattcaaattttgtatttttcaaaatggtataaaataatatcgtgagctaatttttcattaaaataaaacttaataataaccttacttgaaaatttatgaccagattagttacattttttttgtatatgttcgtgctaataacataaaatttgattaaaattgaactcacggtactattttataccattttgaaaaatacacgacccaatttatcatttaacaaaacagaaaatctaatcggtaacttttaaaaaatacaaagtcctgatattttctctagcatttaattaaccatgcataaaatgttttaacaaaaccttaattcacacagatcattacctataatccatcacatatttcgatttttccactcttccaagctgcagtattgtctgctttcccctctcctgagtaaaccatacaatgtaagtaagcataattccaagccaaagatgtctcatttcaacatcattttttaacacatcctacttgagctagtctatgcaaaaaatatgcatgttttcgaaagtaacactcgagtcatacctctagagttagctggaaattctttactgagctttggattttaagaccagctcttcccctatctctgtaatctaactcatactgccttgaaatctgattcaacatatgaaaaatatatgccatgagaaacatttttaaacaattattgtgtgttgagaaaataaagttccccaaattcttactttgttgtactgtggaaccttcgagactaaccgatgaactttatccttcttcccttcccagtccattggcaatcccttaatgtgttgaacctgatacaaaaagaatttaagttagcacaaaaatttacttacagaatcagaaaacaatttagtataacaaagaagtggttgaaaaacctgagtattattagtgttctttagctgcattgattggtgtttaggtatgtatgcccttaagcttctgtaacttccagtccaagtggtgattgtaggtaaaaatctgcatgtagaaggaatgaccataagaactagaagtgataacaaagacaaactcaacacgaaaatgcagatgagctcaccctacaacagcgataagcgatttagactgtttgttgggagaattcagacaagtactgccctgcattgattaacataatgcttttaagttaatgataaagataacaaaaatgtctacattcaacttgaaaagtacaaaacttcaaatgcaagaagtttaacctgatcccatatatgatattttgaacccatcaagttagcagtaacagttccaagtaagctaccatcagaagtagatgttaatccctgcacactctgagcaatagtaaactcagttttcccttttcgccgtttacaatgagcaacagccagtttcctatcctgtcttcctcgaccttcctgcaatctcaaatttcaaatataaatataaatatagcacctatttctctagaaatcatagtttaaaggtgttgattctgaaatataaatgtagcttttgaggaaatactgaaacaatacaatcccaccattcaaaagaagcagcataagactggttttctagtaatttgattattaaaaagtggtgaaaatcatcaatggtttagcattactccttaacaacctttactacatattgttcccatatggaagaaaccaaaataataagccattaagcattaaaaatcacctttcaatttctaattcttaaaaaacaaacaagtggttgagcatcatcaataataaaaccacagcacatgaaaacgtgtaatgttaggcacaagtgccaaatataattattaattactatttgatcaatcttttctagatggtattttcttaatagaaatcctaaaatataggtcctaatgaaaaaacccaatctccaaagtcaaaacatttatatgaatatgatagtacattgactatttgaaattaccccaatattttacagttgaaataagaaaacaaaacagaaaaatcttacattggtatacagagaatacaaagtccccccatgaaatccatctggtgatgcttccttaacaataacacaagtacaccttcctatatccataggcaatggtctgcacattaatgacctgaaacaacaaccaataaaacacccaattcatatctcattcaaagaaaaatcatttttttct

SEQ ID NO: 243442 - DNA, 3968 bp, Cannabis indica
tttttttataaaaataccttttataaaactatcgtaaaataacaaaacagaacaattaaaaacaataataaaacaacaaaaaaactaaccgtgaacaacaataaaaacttaacacaatacacaacataaaaaatacacaatatttttttaaaaaaattccaacccataataaacaagaaaaaaaaaatggaaattttggtgtaaaaaacgcttacagttttgaaaagcccatggcgcagcccatcatactgggggtgctaaaacctctcattcatactctcttcttctccacaacaacaacaaccctttcactctccgccacaccccaccgcggccacagccacagcaaccactctctctctctctctctctgattcatatattggctgaaaataataagcatacatataacaacagtgactcattcacaataaggttgtaattgttcacttcctcataactatactaaacctctcttaaaccctaatattcttcccctttctaatttttcggataaaccttatccactgccatggctgccggagagaaccaagcgatggagccttcggcaaagggtcccatgaggaggaatatagggaagaagaaaggtttcaagggtaggaatagaccgaacaggggcttacccgggggagtcggagacttgagaaagcctaagaagatagatgtcaagatgaagaagctgtttcgtaagcgagctagggattacaattcggatggggaagaagatgaggaagaagaaaatgatgatgttgaaaacgagaggaaattacagaaagtcgaggagttgagtggtggtgggcattcatctgaggaagataaggatgaagaagatgaagatgggaatctgaaagagcgccgtgaagatttcgatgatgggttatccgacggcgaggaagaaactgttggtattcagcctggaatcaccaagtttacagagggttgtagagcgtttaaaatggctttcaagagtattattaacagggttattcaagacgatggtttggtaagctatattttgtaatttttgttttctttcttttctaaaacatgggaattactcgatttgatgtgatgggtgtgcattgcagggtccggttctatcatctcagaagaagcttgttgcagaaaaactggctgaagaagacgctgagaggaaggtgaagaaggacgtcaggagggaaaagcacttggtaaatcaaatgatctttgtgtacactacatctgtatctgttccttgttttaatcttattagcattttaatgtaatagatgggagaaaagggacatgtaataccagcaaattatttggatgcacatgaaaagtttttaattggtgttgctacaaaaggaggtagtggcttcttactatatttaatctttatatatatatttgttctctttctaaagacttattacattgtttctggtactaactgagttactacttgtgcattggtggcgtttcagtggtcaagttgtttaacgctgtaagttgcttcatgatactctagtcaagtttgatccttttattattatacatggatggttttgtaatttgtatggttggagtgcttttaatttagtcacgtttatgaatttatcttctactaaagtgtgttgttcttgttcaaatcttctgcaggttaacaaaggctcaacatgctcaaaaaggattggatccttcgaggtctaaggatgctaaaggtatgatgttagatatataattgtgaatctaaatacttgaaaagtttcgctatgacactgaattgtatgatagcacatgctaaactgtatgtggccttgtatttcaccatttcaattacctggggtttggattttgttgccccagtagtgtatattacatattatatataaaaatataagtataaattaataaatgtaagggctttggatgtagtcccatttgtacacaattagggggctatagtaatgtatcatctttgcaattttgtgacatgaactatctttctcttttttacattttaaatttttatgtacaagatttatcatttatgctatatgtaaatgcaaacttaccttttatgacggaaacggaccaatcttatctctctatgttagtatcatttttgtttatttataaatatacacactcacacatacacctctacattaattctacttcaaccacatctgtagtagatatactttcttctttccgtttgctgtttaaatttgatttgcactataaaaactggggtatctttacctacacagtaatccaaattccaaaattttcaagtcaaagtttattatgtgtgagctctagcattggacaatctatggtcaaatcggtcaataggtgcattgaagctattacttggaagcttgtgtgtaatcctctgtttgctgcatccataacgaatgtgcatgtacttttattattgccgttcatcattatcctatttgttggactggacaatcctcatttgtttaatttctattggttagctcatattaaatatatttaccgttctcagtgactatatatagctattagaaaatatcagatatggcttctttctgaactttcttgttgttggctaaatgttaccagagctaaggaaacgaaggaaagatgccttcttttcagaattaggcaaaactccattaactgctaaggtgagctttctttctattttttctctagtctctgccttcttcttcccctaatttttgtttacttttccatgcttttagacacattgaatgtgtcttcgcgcttctttcttggatatttattaaaaagcttctttaatgtttttggcaattatatgttacgagacaatcattacatattctatttctatcaaaaagagtattttatttttttttgccgggctcagagtaattgagtttcacatgtttgtattatagctttgaatgtttgcacttccttccataaaactatgattatgttttagttagtttacgtctgtgggttggcttgtttattctgttacattcaggctcagacatcaactggtcaaggggacggtgatgcgcctggttgggctcctttacgtgataattatatgctaacaaattccaagttgaagggttgggataagatgccggtaagaattttgctatccaatttgtcatagatgtcaaattgtttcttcagtactaattctatatatccagttttatctttcttcaaataagagtcttgtgttgaacttgttattaggataacgatgcaacagacgacattgggagaatgtcagaagatagtagttcagacggtgatgactaatttatagcagttttacttggagcaccaacatttgttttcatttgtgctattgttgctattctggataggagtttcccaacctcctttctaaagttttgtagaatactttatattattgatcattataaatgaatggcttgagttaacctattgttttgttcatgtaattcgacacttcttctgttaccattttttcaccctttatatagcacaagcaaaaggaattatttgttcattttgggggatatttagttgtagatgttcttacaaattttcaatttcatatttaactgagtttgtcttaccatagctggatttaatgcagtcaccataatagttttacattactatctaggtaggcatatatttttaagtgaggatggaattaattacattttatagtttttgtaaaaaaaatgcatactatagtttgtcttttgagtgcaaattaagggtgtcttattattcttagtgcaaattaagggtggctcataatatctcaaagctggccctctaactcaagaattaaggatggcaatctttattaattttttaatttgattaaaattcatgtattgttattaattttattatagttcgtgtattgttactaaatcttgttaattatatatctcatcgtcatcttgtat

SEQ ID NO: 243443 - DNA, 4891 bp, Cannabis indica
tctctctctctctctctccatgcgtgtttgtgtgtgtggaagtgcgtgtgtagtggcacgttattagatttttcttttagatactttctgtgttctgcccagatctgcccagattatcgcttcagatatccgtttaaataaaaaaaaattagggtatcatttatttttgcttcactctattataatcgtgttttatgtaagtgttctggttttttaatttagaaaacaaataattttgctccgggattgtttgtgtatgagttttttgttgatcgttgagaagaaaaaggccatttttaagggccaattcaatttcgtctcgtgggcaatttttctttagaagaatatattctgtatatataaatatatttatacatgttttaaaaaaattggactcgttgaaagcatgggaagcttattattagacaattttcggattagtgttgttgaacagtccatgcttgatgccaattatatttattttctgtttttgaaaatttgagtattgtccttatatctctgtagtagtttgtgtttgagttaacgaatattctgaactttgattgtgtatgagttgtatcgccggaactattcattggccgtgtcttgtgcgcattttttattttttatttcattttgataactattatatttgcacttctctcttgttagttttacattgatgaggtaacaaacacctttcttgggttagttcttttcttggtactctatcctaattgaatctctttatttttaaagctcatcatggttgccactgctgctacttcggcattctttcctgctgcttccccttccccgtctcccaacactggctcaaagggttccaagattggagcgacaaatttaggtgtacccaagtcaaaatctggttcaggctctttgcgagtcaaggcaaatgcccaagccccgccaaaaatcaatggcacttctgttggtttggctagttctgtggaaggaatgaagagcggggacgacatgccatcctctcattctcatccgcgaacttttattaaccaattgcctgattggagtatgcttcttgctgctattacgacaatctttttagctgctgaaaagcagtggatgatgcttgattggaaacccaaacggcccgacatgcttatggactcatttgatttaggaagaattgttcaggatggtcttgttttcagacagaacttttcaattagatcatatgaaataggtgccgatcgaacagcttctatagagacgttaatgaatcatttacaggtatttcatgctgtacatgtagttttgttgctgtttctgttatttacccatttcttttttaaaaaaactaatttgcttcatgagaacatgtatgatttgctctcctcacttttcatttttgccccctcttattgtttgttgtaggaaacggcacttaatcatgtaaagtctgctgggcttcttggtgatggctttggttcaacaccggaaatgacaaagaagaacttaatatgggtagtcactaaaatgcaagttgtgatagatcgctatccgacttggtaagtaatttttttttcctgtgctgtagttttataactttttggagctcaggtgatttgatgttgttactaaacataaatatgtatgttgattcatggaaccttccttgctcatgtaataagtacttcgatgaatgagatgtatgtgaactctatcaatttgttaccctgagatatgtgacaagaattctgcattctgatggctatattttgatgttaattctttggaagggaagaagctagatagacttgagcacatggttgaggtttcagatagaactttgaaactaggagtgtgtcagggttattagatttttgaaccataaactgaaatgttatatgtatgtccttagatattgtgggtgagatattttatgatttatttcttttggttctactgtatcagaaaatcagttttatgtggtaataatgtctagagatttataaatttatcaaaactttctttgcaggggtgatgttgttcaagtggacacttgggtgagtgcatctggaaaaaatggtatgcgtcgagattgggttattcgtgattctggaactggtgcaatactaacaagagcgtccaggtatttctttttggttaaaaatattatacggggatggttctttctcttttcccttggtatttattactggcaaattggtggtaaaagttgtatatttattggtactaagataggagaagcacgcatctgtttgtctaaatttgtactaagcttaaattgttagcctatttatcttttctttcgatcctaacattttgtatctttgtaattttttattcaatatattctgtatcctgaagaaaatgtctcgatgacttgaaattaaacttgctatattttaaatggcatcaccctatgatttattggttggcttaagaatagtaaactttttatgtattaaatgttgtccttctatgatttattggttgaattgatgttaacttggtgttttgtattgttcttttgattttagtgtttgggtgatgatgaataaattgacgaggaggttatcaaagatgcctgaagaagttagaggggaaatagagccttatttttggaattttgatcctgttgttgaagaggatggtagaaagctgacaaagcttgatgacaagacagcagactttgttcgtactggtttaactgtaagttaaactcagttttctcatcttgttaaccttttcctaaactttccttgcttatatattttttcctcattttggtcgatttttttcttgtgcagcctagatggagtgatttggatatcaaccagcatgttaacaatgtcaaatacattggctggatcctcgaggtgtgtaagacacaatttaattttatcctttttttgtcttccctttggtcgtgatgcatctttaagtacagggttaagtttttaatatagtcagcactgtactgtaatcgttaaagatgcttatgggtatggctgatgagcttggtcttagctaggccgagtagtgttttatttttcaatgataattcccatgaattagttttaatttgtaaaatgattgatgagagtagagtattcagataaattctgactgttttaaagcatattctgacttcctaatactatacaaaggatgtgtttggattagaaattaaaaggaaatgattctagcttaactttcaagcgtagacatatttcttcatttattcgttttgttgaaacatgatgcctggatttaattacttgtcatttacaagctcattctcaaacataattgtgtttgttgcagagtgctccgctgccaatcctggagagtcacgagctctcatctctgactcttgagtacaggagggagtgcgggagggacagcgtgctgcggtcgctgaccactgtctccgatgctggtgtaggagatttgggaactcctggcggtgttgaatgccagcacttgcttcaactggagaatggaggggagattgtgaggggaaggaccgagtggaggcccaaatttgccaacaatcttggatcggtgggtgagcttccagcagaaagcacttagtctcagagtgttctttctttgtagctggagcaacattagcccctctgatgtgtgttcgcttgtgtagaatcttgctttcgttctttaatgcatatatatatattatatttatttatataatctccctctaatatgttgtcagaaaaaagaaagaaaaatgaaaagaaaagaaaagaaagagagaaaatctcattgtaattagctttgctctcacgctctctcatcaatgtctccaattctctgtcaaaatattattcatgcttgggtggcctggtgggttggtatggtgggtaatttgaagggagtattcaactctcattctgtcgtttggcctaatatatatatagctgtcttgatagtacaggattattgccataggccctatagtgttaactgggcaagacatgtatttatttatttatttatttttgaaatttttattgtcctgtttagaaatagaaagaaattttttatttgcttgagttatggatcatatcttaaaagttgaaaccaaatatacctattccaagaagggtgggtatctatttatttattcaccattttgggtaaaagaaaatgatttcattttatgggtgataaaaacaaaatattttccatgataatctttctggcttttgtatgtatctcacattaaccttcgtggtattaacctttttactgaaagcatttttctattttccttttgctttaatttagaaggtaattcagttcatcaaattaatttatcaaactggttatcttgcattaactttattaagaaccttaaaatttggttattcctggagatcaatagttttgaagttgaaagttataactggtttccaaagactttcttttatttatttatttatttttattttatgttatcttggcctccaaagacttgttatcaaggtcctttcccaagttaaatgcaatcctcgtgtaagcttatttttgagatttgagttctcaacgtgcaaatccaaaagagacctaaacaaagagaaatactaaagatattagtgatgtctaacactctattcattgttaatgtaattatgtatcagccatatattttaatacaataatttttagaaaatatcaccacttttaaaaagttctaagtattactagtgcccaataataatgttcttaaacaaactatctataattacacaaataaaaaatagggtagattgcggcataaatacttaatgtttccgattttatacacttaaatacctaatgtttatttttggaggcaaaaatacctaatgttacaatt

SEQ ID NO: 243444 - DNA, 2014 bp, Cannabis indica
caatcaatggtaataaactggaatcagaaaattggcacattttcgttaacgaggttcgaacatagatcaatgcaatctatgcctacatccccgggaaacaatcaacatactttctttattgatgaatcaaagttgagtacaaagtgtttgatcttacaccaggaagatcgattacaaaggagtcaagctcctgaccctcccaaacactcaatctctcttttctctctaatctggtgtcttacttacaattatacacacttgagaaacaaacagggttgatatatatatgagttatggacagaaaatatttccccccaaaaccaactaacaaaactgtcatttaaaaatgaccaacctggtaatgccacatggcacttttattagatttatgttaaaaacaccacattttttttgaaactttactaaatcattttattttttgagcatcgtctcatgaattaggaatatttgaaagaatattattgacaccacataaaaattttcgtatgtaatttttactttcttatttatttctgcatttgcttaatccatcaagtctatttctgattgaccaagtgtcgaacttgatccatcaagttctcacggcaacattataaatgtttatttgaagaaataaattaaccattcttaaacaataaatttcacttatatattgctcatgtatatatatatgcattaaaattcaataaagcattgacctttttagggaggaataaataaacacttacatataataatacaataatttttaaactaatcatatctatctatattgaaatccactgttttttcaaaatcattcaatttattatgtaactttattattttctatttactaattaaaaatatcatcgcaacattgaggcgattttacttctcttctcttcaaattctaatttttcgatgtcgttggccataaggacaaaggcttcaacttttgtgtgacatttgagattaacagttgaaattgggaataactttgatgttgatggatttgcttgccacactatgagttcatttccaaaataattaccacacttgattgcagtagtgttacttctaattttaaatgtccatagatcaccttgtgtgatgaagagcatcatgtcaagaggttctccttctcgaaaaatatagctaccttgtgcgaatgtcattggtttcataacgctaagaattttgtcatagtcgtgtttaaaaatattttgaaacaatggcacctacaaaatataaaaatatatataagaatcccgactacaatagagtactaaaaaagaaaatacttcgcgatagggtatgattcaatataatacttgtaatatttttttaagaaattgtacctaacttataacgcccaaatcaattaaggtgcatatggtataaacaattatttttcatgaatttgaaatatatttacataaatacacatacaacaaattgtttgaactttaccgaaatttcttgaaaatctacagatgccctatactctaacttgtgtttattatatatattataatgcatttcttaaacatgtatatatatatattcattagaataaaaagttaattaccctttctagtataggcaaacataggtgttccttgagttttgcttgaagtatagttggaagaataaacataatactttcacatccaacgttgccttcttccaatctcaattgagcataactcataatcttttctttcaattctttagggatgccaatccaattatcttctatccacttttctgcatcttgttttattgtattttttacatgtttcaccattatacaatcttgaattgtctataattacacaatgaacaagttgaattatcaatacttaaaattaacaaaacttgtgaccaaatgtaaaaaaaaattgtgtctaattataaattattattcttaggttgtgattaaaaagtctaaagttaaaaatagtagtcataaaaatcacaattagtgtactaaatgcgtttttagtcacaa

SEQ ID NO: 243445 - DNA, 5403 bp, Cannabis indica
ttaattttttttttttaaaaaacgaaaagaatccttatatttgatgaaaaattggaaacttgagaaaagtgagaaagtacccattattagggccccccttatttcaataagtatttgccaaattctgtgttgggtaatatttaggatcaaagcagttgatgtgtatttatggcacacaacgacttgttttaagacaatctaccttgagttttcaattagggataatttggtttcgaattaggctaacagtctgttaattatccaataataacacgtgttatttggctaatcatgagaattaatgttagagattaataagcaaccgaagaataagataagagcaatgatagagatatttatgacaccaacaaatttgggacccaaatccttcgttttagagttatctgtctattttccagtccaacaactaaaatttaatcacatcattacaaaatatattttttttcaaaaaagaaaacccaaataatgtttatgaaaagtgacacgaggtttggaatagtcacttaaatttactgtttgttttatggattcttaaatatattaagtgttgtgagttgtgaggtaagaaaaaacagtgacagaaaacttaaaatcaaagatctttgctttacgttatgcataatcgaaaggaaaattacagtgacgagagctatattgctttcagttaaagaaaaaaagaaacacaagaatattgcattaatagtcattttagttacatctatatcttagaatacggtaattataaatattacaacattagtggttcagtctcttccccaaagttggatgaaaaactgcttaaaatagtgtccagtaattatttcccgacactttttccagtactctgaagcttgttcatgtgtttgaattggttattagaaaatggcataatgtaataactaaccagaatttttgtccccaccaaaaccagattcaagaaaacctgtttgatcaagatgagagacatcaccccggacctgtaaggtccatttgtccccatcagacaagtgaaacacattgacagaagtgttgagtaccttcggtccagtcttctcgtttgggcaagcccttttgtacagcgatctgattacgcctccatgagtaaccacaactactcgctctcctgaaatagatacaaaactttacttatttgctacctgtaattctctacccaaaagtattagacttgatttcttttagggagattgaagggaatatgtacaaacgtgggagttcagctccaaggaacatgatgctatggattaccacttatgaatcatttttaaatcagttgcaaattcacttaactctgaaatccatatatggagaattggatagttatacatgataattcctagctagttaaaaaacagtagaaataattaccactagtcatgcttagtattgttcttaggattatgagtatatattgaccaaaataaagagctgtgtgtactgtagtgtagctgagtaattataggaatcaataaatgaaagagtataggctcctttccactttataattatttagaacaaggttgaacctaagttacaatgcacaatggtaaagtcgcaaaaaggaaaaaaatggaggacataacacacctttatgcttattaccgattctctgtaacgcagaagtacagcgtacaaagagttgatctcgactttcacccccacccttcatgtatgtacaaaaaaagacatttcaaaacaccaattaattccagtgggttttataagcttatattggaattgaaatcaagaatacttattctgcgctaaactcacaccatatgtcatgcaaagtcagtaactcttaaattctatgtcccccatagtaagctggaaggggacggtatctcattaagacttgggtcacaaatgtaaacactgatagacaagtcatgtgggccacaaattccatccttgttttctatggagttagtggcaggtaggtaggcagttacagaatcttaagtaatgacagacatgcccttattagagagttagtagcaggtaggtagacagttacaaaatcttaagtattgacagacatgcccttattagactcgttgtattagattgcctgtcatggctttaaaaatgatatggcgtaaatacttgatttcaccactcaaaacaaagcttttgaagaggagcagagcactaggtcaagcaggtggattttgtagtaatgccataattttcggttaggattactgttgtacctcagatgaagtaacactcactttaactatagttcggtaaacagaacaagcactggagttcatcctcaggcaggcctgagataatacttgaacaagctggacctgctgcttctatagcctcagagaaagaaaccttataggggactacagttgaactgagtttactttccccatattcgagcattagaatgagatcaattactgatttattaatgattcttatgataccagaataaagtgccattcaaccatctagacatatcataagtctacagagtatcttcaacatggtaattgataaaacctaacgtaggtccatgtagcatgcttattggataagattgatacaccctgcctggatgagattttacgattgtcccccaacgttctccagtactgccctttatcactcaaaaaaacttcaatgctctacaaattcatatcaacttcactctatatcaaattcaaatgaattccagttatggatggagtacttacaggaatttcttgatctttacttggagatgtaaaggctttgtacgcctcaggacaggctttgacagcatcactatatactttaccttgaagatcccctaaatgcctttctcgtaaatcagtatctttaataacctaaattcatgtccagcaaaataagtcataaaaaaagcgaagaaatattttaatacataaataatatggctaatcatcccaagcatagatgagcgttagctttgaatgattttcaaccaattccagattattggttaaatatatttcattagctgcacgaatatggattgtcgagaactcatacaatttgcaacaagtacattttttagtataaagaaaaaatcaaagctaaagtcatttttccttatgtcaataaaatatataagtaaggaatcatcatgattgttaaatgtggaagttgctagtgattaatacctctaatccaccacatctggctgcaatagtctcagcagtcacaagagctctttttaagtcggaactgtacacaactgagattttgggctcctttgataacctttcagccacctaaagaaagcagaagccaagtacaattcattcagaagtacaaaatctaacttagcatttttaaaactccttcattgagattttcagttagcattataaaaaagaattgccagcttactgcaactgcttgctgtcttccagcatcatttaaatcaatatccaaatgaccctgttcaagttaaaaagatatagaattaaaacagaaacccatgacaagaatgcgagaaaaagaagaagaaagaaatcagagttctagagaagatactgaatgcaaaaaagaaaagaaaaaggtagatatcagagagttttcaagtaaaacatatcagacacccaaaccatactagcctcattctataaagtaaaatgtaaagtaacaactaacaagtagcctgtacctacgggatgttattgctcaataggagcgtaaatgaaagtatatagtcaagatattattcgaaacagtcacagtctgagcttatcagagaactggtttcacatttcagaaacagttgcactcagcttatcacagaaagatttatttctggtctcacatttcaaacataagcatgctgattccataaatagtgtagcaaagctcatattgcagctttactttctaatgactaatttttacacataaatttgatataaccaacatgtagctgtggcgaaatcctatttggggttgcctattggcaaacttaaccagcccttacaagaatttgtgtcatgcataagtctggtcatataaggtagttcaagcttgacaaaagtgtttactttcacactcaaactttttgcaagtgatatttggaattcgaatgcgaaaatgtatacttccttataattgaactttaaacacaagaactaagaaagaattttggactgaaaagaaccttttttatgcacatattgtaaattacatacgttcactacatttaacaagtcaccgacaactacaaacgaagcttatattaataaaaatttcaaaatcttctcagctagctactgaataataaaatacctgaattcttccgtcgtgattccactccgtttcaccatgacgcaccacaacgatttcagcataagcaggaatattatcgcagctgcattggtaacgaatatgaattagattataatataaaaatttcaaaaacgaatgtaatgtgccggatttcagaacaataataataatatatataaaaaaaaagagggaacatcataaaatactgatcaaaattaaaatttaaatcggcaatggagaattttcctagaatcttggaccgcagtgctgaaactaattgaaaataaaaaatattgaaaaaccagaataatttgttttattgaaagaattttgctaaaaaagagatcggacctagaatcggactcggccatggagaattcgacctttctgagaaggtgagttgagcagcgagtcaaagtcaaggtcgatggtacgttacggcggagaagttgatgaagtccgcggaatctgaaagagttgtgaaagaaaagattgggtgagctttgcgatttggacgaggacgaagaagaagaagaaagtagccaatttgcagtgacagggagacaggtgggaactgctctcattttctgagttcaaggacgacgtcaatatattattattacgcttatcatttttgctcccaactttcacatgccttctaggagtagtttgttacgcgctattgtaatatattgtattgtattgaattgtgttatattctattatattaatattatttaatagaataaaaagatatttggtattgactttattaattgattatgtaaagttataatatatttttaatacactcgatcccaacaccaactatgggtccgagtcccaggtcctgggtagcaggtcggggttcggctacaggcccgggcccgggcttgggttcgggtatgggtcctgagtccaggtccgggtctgggatctcgggttcgggctcagggtgcgggatccgagtttaggtccgtgtccgggtctggactgggcccggggtcggggacgaggtccgggtctaagtccggggttcgacgtccggggtcctggtgcgagtcggaaatt

SEQ ID NO: 243446 - DNA, 1104 bp, Cannabis indica
attagagtctctagagaataatatataggtccaaaataagtgaacaatatgagtgcatgcatgctatataccatttaatatcttggatatattatacaaacaccaaaccatatgaaattaaaggtcatgtttgttcaatagaatattccacataaatatggatcaatatattaaataaagacttacacttatgtagtacattaatgtataattaaaaaaataaattaataaccaaaccaaccattattaataattaatatacttaattaaggtaattaagttatcactacgaatgtcatcatataatatctgatgctgttaaatataattaattaaggattaacacccacaccttgtgctggggatggaggtgaatgttttggggtacagtccttagcaccgttgtacaacctgtaattaattattaacaacaataaatattaattaattccacccatgaaattaacaatattagcaaaagtaattaactaattaataataaaaacattacataattaattacaaaaagaaaaacatacgtattacaatggcgggcagcaaaggagggattttgaaagagaataattataataagaataacacacaacaatcgtaaagccaaccataataatagcttcatcttcgatatcctatatatttcctgtcaatcttatatatataaatatcaaaccttgtttacttacattacacatatatataagaacttaagaagtaaagaaatcaagtcaattcatgaatctcgctcagtcaaccatattaattatattttgaaataaattaatattaatattataaattattttttatgattttggtagctgatttattaattttcaagtttcacacgtacacacgtataaatatcctaattattaattggtagaagtgattttttagctgaacaatagtgagtgcatgcatgggagatagaccacttctttagtcaaattattaattattaatgtgattttatattgtatacatggatattaggtctgcctttatagtatacttagacaaatgatctttggccactcaggtaaacctatttttccccaaagacctattatatacatatatata

SEQ ID NO: 243447 - DNA, 1914 bp, Cannabis indica
tacattgtaagaaaactttgaatttagatacccacttttaaaaaaaaaataaaacaaaaaagtcagtataagaatatagaaacgcacaacaacaaaaaaaaaagaaagaaaacggaattcaacagataaacgataacactgggaatgtgcattcagcttaacatttgatcaaacacctaatctggaaacttcacatgcatgaaccgagaaacagatatgcaaaaaaaagcaactccaatacaataaggagaccgatgtggttcaaagcttttaatcattttggatccaaagcacataatacaaaaccctaatcatggaaaagcttgcgaacactggtcctagaatcgcataagacgaaaacctggaagaaaatataatccaactgcgataacaaaagaagaaatgaaaaaaggaataggagaatcaccagggcattgatgagctttccatttttaccacgctctctggtcactacaactttagggcttgaagtcaaaacagaagacgaagaagaagcaggttgaatagtggaagaatgagcaaatattcgagttcggcggtgcagtaatggagaatgaggaggaagtggagctgtaaatggtagagagagagaggagagagaaagtgcagccattggtgtggaaacgtgttgagctcacaggaccagctatttatttcccaattaagtatagcaagtagcattattataatttctgtgtaccaaaaagataatattttatttatcgaaatttgattatcaaactgtgctgattggtttattattttattgattcatctacacgaccattttttaaatatgtaataacttgaacgctgtgcttaatattttcgtatccgactcaaaaggtcacagttggtacacctgtagacgttagtggatgccacgtgaaagattgtggtagggccgtgtaatgtggctcgccgacactctagcatccccaagaggcatcgaccgcccaccaatcagcttgatagcttatcatgtgctttctcttgtgagcaatcatcacacgccacgtgttatcagatcgcttctaatgtggaccgtggatttagttgaatccggacaaaaattggaagtgtcatcttaatcgtagggtgaggagtattaaagagcgggcccatgattacttggtccattgtaacgttggtccctctgcatcccaaccgctggattgggtgttgtgcacccccggtaccaacattttgagtacgtcgtcgctcttcatgactcttctgggactccagaagtcatctttttctttttcttttttttttttttaattaagcaattataataccaaacaataattgattattgtatacaactatatatgttttctccagaaatatattcatcatatgtgagtctctgatcaatatatgagcaactaatattccaaccattttaaaaaggataaataaataaactagcattccaatcaaattttcatttatttgactttcatgtcttatcttataattaataaaagggtaattttataaatatgaaaaaaagaaagttagtttatataaatatggtaaggaaacttaataagataaaatgtgatatttaaaataaaaacttaatatatatatagtactgaattaccataaaagatattaaaatttctttcaattaattttttttaaaaaaaaaaaaaacaaatgaaactacagtgatcgccaaagttgttgtcggtgtcagaaaagtcaccagagtagctccctgtatcagaaaagtcatcagaattgtcactgtcaccggaaaaataatttcttggtgattttttcagtgatttttttggcaacaatgccaattctgacgaatttttcggtatcggcagcaattctccgtacgacttttttcggtaccgacagctactccggtga

SEQ ID NO: 243448 - DNA, 6793 bp, Cannabis indica
cgatctctctctctctctctcctctcgctctctctctctgtctctctctctctcttcctctctctctctctctcactctctctctctctctcactctctctctgatggatttcattagtagccgatgggccacattgggtggggaaagtgaaattgaaaagttgagcaatcagttttaggtgcaatcccatcccacctacccaccatatgacttgaaaacccatcctaactccaatccagtgtgattttgaagtccatttttaattttaccaaaacaaattaggttggtgatggtttaatggcaaagtcttgctcatttgctctccgataaagcaaagccgatgcctctaccctgattttggtaaaggaaaaaggaaaagagacaactatgtcaaatccatgatccaaaagcaattaacaaaaataaaagtcaatatttgagatatcttaccagccaggatggacggcaaatcttccattagatatagcccaattcacctgctcaagagttaatgccatattcaaactccataaacgcaccaaagatcgacatataataataggacattaacaatgtttaccttatcagtcccgggagaattggccactacatgggtaacctggtcatctatctgcgtagtgcataccgcaccgaactgctcagcagtttgccacaaaggatgtaagtgaggattaacctcactaacaggaaacactctactaaatactattcggcagccagacaaaatctttcgctgctctgatgctagaatatttctaacatctgcttcatctagtgagtgatggctaaaaaaattctgatggattctctcaataacctgtaagagaaaagacagattagtaaaaattcaaacaggcaggcatttgtaaaaagcctaggcagatttctatggtagtctcacccccaaagaggacgctagtgttccatcttctggtctttcatcatggtcaatctccaaaagagaaggacctggaagaccgaattggcgtctactacagggaaagaatgtatacctgcaagacatgcacaaaaaccaatcacaaactgctaggggaacaacaaaaataagaaagaaaaagaggcaaatgcaacatttgcatctaataaaagcattgttacctttctacagctatcaagtttaatttgttatgcggccagaccctcacagaatcatcaataattacaacagaagattccatacccaaaactccttccaaatctttacttcttggaaccctctcatcaccatctataaattccccatcatcacccctagaaataactcgtccagcaaataagagcccctttgggtcaagcacttttgccatctctgtagcatatagtttgttccccatggtgtaaagatgcatctcatatagcttactggcctgaattccaggggaaaaaatgactaagtacttcaagttgaagtcaagcaaataatatcaaacacactataaattaaacaaccttttctaaaaaattccagaccccgggcctcagtttggtccacattcccatatgagggaaacgaaacaaatgtctatatggtttttcacgatcttgttcctctttctttctcaaaatctcctcatgcactggatctacttccacaaactaagaaagggaaacatagttataacataattgaaggccaagaattgaaataaaacaatcttccatggaacaactcaaaattgcaaacacatgagatcaccttggctgaattaagaagagtgtgatctaaatccaagacaaggcacagcttgcgggcctcaaacatcttcttctgttcgtctaatcttctagtcctctctctctggattgcagctttttgcttgtcatcatatccttcaaatagatgttcaacatctccccacgtgttaggtgcacgagaagaacctgccacagctgctgcttcaagagttgcacgagagggagctgccacagctgttgtttcagaagttgaaatgccactcccctgatcctcactcttcgtagaaacatctttcacatccctttttttctggtttgactgacactggttgcgaagtgagactctgagaaacaataaccggacttgtagatgcatttgacactgacaggagatcagcaatatttctgagattcttggtaaattgtccagcaatatcagggcgttcagctgattgagaggagactgccttctgatcagctcgaccctcctgcatttggctatttgaattgtccttatttcctggattatttgacactgagggaatagtagtttttagttgttcattccccaggctcccatttttctgaagtgaaatgccatggagaacacgacgtgggtctctgggtttcatacggatttttcccaaatcttcatgcgggctctgtaatatatacacaatggttttaactacaaatgataagggaatctaacaaaaagtaaaacaagaaattattagcacaaattaaaccctatcttggccaatatgtaaacaacataacaattaactagtatgctctcaccattggagctactcgtgaagtaactgaaagtgatgccgctggtgtctgcaaaatcccagtcttagaagaagcaaggttcactaaaggagctactcccaggattgaatttgggctcgaagaatgaatattattttgtacatgatctggtttgagctgagtttctgatactaatagctggctgttgttgctgttgctgttgctgttgcccaagtttaataatgttgagtaacattgtcggattaacaactatatccttcagtaagtcgggtaaagaagttgtagtactcgtacttgtaactggcaccagctctttagccatatttgggccattcgttgcatgatcattccccatatatgattttctaggatcgacttcagcaccctctgttgactgacttttgtttgcgaactgtggacctatgaaaccattgtcttctatccagccccctagtccagacacacttttaacatcaccaacagttccagcattcttaaatgaatttctttgccttttgaatgaagaaccatccaaatgtgcctcatccgcaaccttttgctttcttgagcttgttggttcaacatattcgactttaggtgcattacgcactgcagccacaggtctttgattgagatccaaagcacccgaatctgaatttgcaaatcgaagcctaggatctctactctttgcaaaggctttcatgcttgaactagaagcagaacttgcagatagagcatttttagcaacaattggtccttgcatgctggaactactcacagcagtataagaagagacctctgaaggtctcaacatcggcatacttgtatttcttaaactactaccagatacagagctcgtgacctccatattagtatcatcattctcctcattgccatcttctgaaggggttgggcttggaagcctgtcactcattagaaaggagctcccaccaaacttttgttgataagtagaaacagctttgacagcatcagtttcatagcggcgaattctagaatcatctgtccctgtagtcattttagatgtagcaggcccaggtttaacaacaacatcgccaacacccaatgatttaaggactgaaaaggtagttggtgcctctcgagtaggcgaaggaagactatcttcatcgtgatccttgtgaagatctaagaggggaacaagaaggcccctgctcttaaatgcagatactcctcctgatctcatttccagggaggtaatcgggttagcatgggccacagaagtaacatcagaactgacagtcttacaattaacatcagaaggcagctcagaagttgtcaatccataaatggcatttttagtattatcacttgtattcttgaaatctatttcctgaaccccgttaacaatctctcgctctttcagtttatcacttgctgccatgagctctatctgtgaaaaagaaagcaacaatgttgtcaactgtcaacgctagaatgaaaaaaagaaaagatcctgaagtactttcatgcgttctcacctccttcatccatttcggggagacgacaggaggatcagagttctttacaaaacaaagtaacctgacattgcaacaattaattggttaataaactcagcatttcaaaataatcaatcagaaaaattagggaaagcatctatagtcgatacctagataaagtgtccttattatgatcttttttattctggtccatagaacaaaaaacctgcaagttacaagcaattgaaacattacattatttttttcaaccattacaacatgtaacataaatactcagctgaatgttcgattgccttacagagttgacaatttgaatagcagtgaacgaaatgtcaataataacatccttagctggagcactgtactttgaaagaacttctcttaagctctccaaagtgttatgcagccgggagcaagcctgctcaaatgatctacagcaaataaaatggagccaaaattacacacaaaaaaacgttgattcaactatttccactaagtatttgaaattgggcagtcatctcattcactctcaccaattcaccaaacattcaaagtacaagcctttatttatttctgttctttttgttacttacttctcagtattagtcacattaacactctccagatcttcctgaatcaagtttattcgcttctccaactcattgtgcatggaatcaatagtcactaactcattaatttgggtagcatcacagttcaacacagcaccatctttggattcttgagcagggttcgactcctccaaatcaatctcaccctcctctagttccccttcttccttctccatatcgtcatcactatcatcaatcacaactttatccacttctttgacattattcttttccgccggcgtagacgatgatagtttagagttttggtcagaatcaacatccattacaaaaatatcatcgagacttttgttctgaacggcctgtgcccaggcaagattatacaaacccgtattattaaaccccttatatccctggtattgaaacagatcacgcatcgtccaacccctagcactctcaccaccaccacctcctttagttttcgattctttaagattcaaatcaaccggaactgcagcagcaccaccaccatcaccaccagcctcttgctttttgaaatcttcttcactgatctcttccacagaggctgaatctgaaatttcaccttcttctacatcttctattttccccatttcacttaaaaaaccttcaatctctttaattttaatccactcgacggatttagatccaaaatcaaccataaatttttagtatatttcttacacagtacaatcagcaaaaaaacagatattcatgtactcgatgtaccaacaacaacaacaaaattaggtttcttgatttctcttttctttcggtctctcttttgcccagagacccaaaattaggtcgacaaattaatcgatgataacagatgaaacattaatagcaattaattttctcagatcagatccgtttggctgagaggaaaagctcgaaccaaattttaaatcgtaattctttgaatcgacaccaaaaaaagtaataataatcagagacgattgagaatgagagacatatagaagttcgggtgagttttattatataaatatattaaataataacacaagaagaagcgaatctaatacgccaaagactttgaatctggaccgtccacgtcagcgatccggcaaaaaaaaataaaaagtgggactattttatttgttaaagctttaatgggcacaacacaacttgcactagcactagcgctacactgggactataaatagtaaaagtatgaacggaaatagccttagaaactgtacttgtgaaacgtatctctttgtagtgtggtgtgggagtacttgaatattctatcacaaattcacaatctaataatctatttatatttatcgaaattttatacatggtaacatggtattgtttttttattattattattttgtagaagatataatctcatgattctcaacattgtattgaactatatttttgtggacaagtaattttatctgatccgcacttatataaatagtgaatatgtctactctgatacggtttaagattagtgagcaaaaaatagtcaccatcttgagggggagtattgtagatattgtctcacatgaataaataataaagtattactcattactaattgattttgagatagaatctcataattcttaacattttgggcatgtttgatgcatgggataaatgtttggaattagattaaattatccaatttcacatttggataaaattgaaatttaaagattcgtttagtacatcgtattatactatattatattactagattatatttagttatatttttagtttttatttttaatctaataattttgtattgcattgcctaatcaggcaagggcatagcctaacacccatatgtcacattatcacatcactcacaaccccaaattaacttgagactgagagagtcccttacaaatagcttctcaaccggggcctggccatcctttgtttgcggtcgacgttttggcaaagtttgtccgtcgacagctaaatgtttcgatctggttcgattcatggtcgcatttgcaaacgttttcctgtgggccgacatttttaaggaatgtcattaaaggtaataaattttatttattttattttattttttaatattatacttataatgataattttatttttta

SEQ ID NO: 243449 - DNA, 864 bp, Cannabis indica
ggtccaatctgtaacttttgcaaaacacagggtccaaaatagtatttaccattattattacttggaaagtctcaattgagccccaagccaagtgtgtcaataatcaaaataaaaaaagttatggtaaaggatatcctgtaaaatcaagtagtgaatttacacagcctcatttacattttgctatgggtataaaacataacaacatggccggctataattattggctccaactcattctaaattggcataatttagaaatctcataacacaaacaaacacattgacacttaaaaacgcaaagacacacacacacacagagacaagccagtgataatttgttactcaacaaaattttattgtctttcttaaaagttgttacgctcgacagattcgcgattagctctataatatgtactcggctcggctgtattactaggatggtggctgtaataatgtggaagaagaggcaagtggctcatgcaccactgagtttgtggaaactgatatgggattcccttccaattgcagcatcacactccctatgatttcaatcattatcttcttgaactcgtcttctctaaccatcttaccatcatctgcatttaccattttgaacacatttcctatcaccttgtccatctgcagatatttcagattaaatacatggaatgtttagttagtacaacataagcatattaggaatgaaacagtggagagatattatgtgaactagtctaatcacaacataattctataatgagtatagagtgtattgcttaatttaaaatcaagttgggggatggttaccatatactaataagcataaagacaaatgtataaatcctcatgattttcctaggggtc

SEQ ID NO: 243450 - DNA, 6992 bp, Cannabis indica
aggttttatcctcaacataatcaacacctaatctaaaccctggggaaaatttcttcgcaccatcaacataacaattgaaatacctaaaacaacaaaaaaacaataaaaaaatcaaattagtaaaaaataaaaataaaattaaaaaaaaaacaaaatacaaaatcaaaaagaataaaatagtcacctaggatgttttagcaagccttcaccaacccaagcatcaaactttgcctcaatttcaggagagacgggatcaacaaatgaatcgttaagagcgtaaaggcccttcacataagtaaccatcttaaaatccctctcatctcctcctgattgagaacctgatgacattacctccattggagtgctcctcacatcagccgacccaaaatcaacaaaaggcgatttcaatgccggtgcacgctttctcttatccaaaagagaagtatcagaaaaagtgtccttagcttcttcatcagtaggaatgacaactgtcttttcaccaacaatacctggattgggttctgtgactctgtctcgtagagtccgccgcttcgttcaaaacctaaagtcaaatcctcctttgaagaaatttcctctaatgcctcaaaccttgacccacttctcattaacccctgtgagtcacctacttcccacacattattggtagtcatgcttgcttttcttgttacaaatctcattcatttgtctctcaaccctttggtgtttggcgctagccccaggccataaactactggaatctcatgaagtatccgtgttgtatcatgaattacagaactaatttatgttctcatagtctattcttttatatatttgcactcgtatttgcaatctagtccattttaagtttttagaagtttattctcgtgtaaatatcatatcattctcaaagcttgttcagtggcggaaggtctaagccaaattagaacacattcaacgcgttccctgcccatgatatcatgcgttttcagtatgtactcgatagagggcattcggtacgaaaatttgtagactacaaaaatcaagacacttcgaattgtaattgccataaagcacaacagatgacgattcagttttacttacttcccttgagaacataacaagtacagaggaaacatgttactgagccaagattggaaatggctttgtgcagagccaatttttttgttttcttttttgcagtacagagccaaggagtatcacatacaacaatgtaaagcgatttacctatacataaaattttcttttcccaatcgaatggactgcgaaatcacaaaagtaatccagatatttacaaattgacaaaagttaaactccctcgaaagcaaagggcctatttgatgttacccaccaaatttttttaaaaaaaaaatagaaaaaataatctcagttcttaagagatattaacttgcttcaaaaatataagtgggcaaaaaaattatgtacttttaacctatttgattgaataggatcgagtacaaacagactcaagtgcctctgtaaataaggaagaaaagctagtcaatgcttgaaacactcctggcaaacccgtttgaagattgtttagcgtcatggcccttgttacctcagctgccttggaatgcctcatcatttcatcttgcactcgtctctggcaagctgcaagttctgtctttttctcagcgagcgggtcccgagcatccaaggctaatccgccttctgccccagacccagattcgggcatcccaataccaaccatggagtacgactggtagaatttcctctctaagtttcggatagatgatgccttcttctcgagctcctttgatgcactttcagtgcgcttttttaccttaagctcttcactttgcttagcagatatcacatggacaacattgataaagctcttgatggcctcagatgccactgtgtctggaacacgatcaagtgcaagcttccactcatcacaaaagacatacacatcagagggctctctgttgccattgacattgtcattgtcaacaggagtaagagtgagcttgaaccatccatgcagtgacctaacaaagtcccgttggaactttatcaagcggcaaaaactggaatgccatgaagagacagctgattcaaggtcacgggttgcctgccggtgtagctcagaagttgattcacccttcgacgttctgttcacaagaccacgaacttgttgcacaatattattttgaatttcatggtactggtgcattgatctccacatatacataaacctacatttaacacatgagcgaaatataggtcagaaggatgtgaacatttgttagttgtcatgaaacctatcacaataaaatagagggtcgtaaaacttcgggactaggcagacaggcaatcagtacttaacacgaattcagaattacttgttagatagtccatatgcagtagactgaaagagaaatttcatcactgattttactttggaaaagcaacactgctgtttatttccttcctgatttattgttaattattttctcgttcaagcaatggtaccttagtactagagccctactgaatagatggaaggtaataaaggccagcggccccactggtgaagataaaagagggaaaaagaaaatctctgagttttttcgtattatgtgaacataaataattgaaaggcaattacacattttgagagccaatataaactggtttgtcagaattcaggaatcatcttactactaccactatataaaatgtacaaatataaaagaaataacaaatgaagctttttatactaatagtgttgtaaataacagcaatgccaatgatgcttaaaatgatgtgatgatgatttccttgactaaatcacatctattgataatattgaaccagacaaataattctagaatcttaaagaaagacaatagtgggtgggccacatacaaatgaagtccaactcacctaactccacatacaataactttttgggtccttaaaatggatctggagataagtgaaacataaccacccaaaagccagatactgggccaccatttagtattgagaaatatctagcagctggataacccagtacaactaaggcacatgtgcttccagagaggatgaagcaagtggtactatagcagtaatcaataatgactttcatctaccaagtcaatgcatgtagtattttgcattgtgaatgagagaattcaaaccagtacaaaagtaaagcgtatctactctaaatatatctaactaccagagagagttctgatcctcaaagcttccactttgagctatcatactgaggacgcactagcaattcacattctcaacacattttagtgccacatttaacactaacgtctataagtgacatcaagttgactgactacactatacaataagacacgtagcatataagaaatgtaaagggatgaaaaaaaaaaaggattttttttttgaagttcaattataatttcatgttagctttcaggtgaaactaatgaaacggcaagtggacaatttaaaatcatcaaattgatcatgaaacgccaatgtcttcatatgaccaacatatcacattttgtgtaaactctttcgatttcaaccaatgttttgtgcgtattaaatcatatgttctaaccaaacgtaattagattgagtcagttcacagccggccacaatttatggttggttaaaatcaagatagtcgatacttacccgtgacagagttcaacgagctgaggaactaggtcagtgtctctgagaccaatgatggcagttgaggttgtagaaacggcctgagaggtgactataatgagtgattgcagcttctttaaggaagttttggtcttgtctagcttaatttcatcttctcctttgtactcttgactttgtagcagtgacaacttcttttcatgctctatcttgacagtttctcttgcctaaatttcaaaaacaaagcagtttgcaacataaactttataacatttagaaaggagaaaggaatataaataaataaagaaaatctcctacaaaaatttctctaaaagttaaatacaatttatgaaaagattcaaagtagtccacacgaaaaagatagttgaaacccaaccatgttcacactcatccacatggaatgttgtcaagggcatatcagtgaataaactatggggttggagaaagttacgaaagtagcaaaaagccaacatggaataactaaacaccataaaagatgctacttctacttaatacaaaccgtccaatttacagcaattacccagatagacaggacaccaacgaagtggagcccaccatttgagcagggatgaaaatgtcaataaacaaagtatttaactttttgagaatagtcaaatactgctgtggattaacgctatccaccaccgtccataccaggtctattatctatatgattactcattacactatggtgacccattttcttaataaaaattaaatgaattaaattaataccttcacttcctcgtaaagcttcttttcccaagccaagaggcggtccaaagtggagcaaaggctctttggaccgcccggctgttcgagtgaagtggcgtcgagcctgtacctaacagccaggggcggttttgaggtccagctagagctcaacgtactaagtacactgctcgagtgataaacggtctctgtttgaaataaaaaataaataaataaaaattgaaattttgcaccagtatgaagaaacaaaacagagaagaaaaacaacaagaacgaaaaaatagggcaaattgagtgaaaatgagttaacgtccaataagcataaattccattccactactttaagctgcttaaagctccgatcaagctgagcctcccagtctccagcatttccgagacctggtctccggcagccgcggctttttcaaaattctcttaatagcacgatttccttaagatccttgtgcctcacaaccattttcatgtccgaaatctccccgtagttggctgacgagttctccgtcctcctctcggacttgctggtactggccgcgtacttgggtggctgtggaggctgaacaggtgcagttgcagcactcaccgattccgcccgagtcgacgatccaaaattcgagtgcacacccatctcggatctcgaatccctatcgtcatcttcatcctcagacgagcttgttgtgctgtaatggtcgccccactcgctgcactggacctcttccctctctgtctcggtaaaatcgtgcttctggtgatgaaggtgatcttcttgaaccttcggatggaaaaaatcgtactccgatctttcggtctctgtctccgtttccatttctatttcggagtcaccttcatcgtcgtcgtcatgattagattgcttctcctgtgggaactgcttcgtctcggtcctgcgctgattgaaaaattcggaatcgggcggtgaaggagggtaaaagttttcccagttccaaatcgatgatgcctgagatggagtactggtataggtcgagttggcctggaaagcagtgggaaatccagtagtaaaattggacttctggctctgaggggaagacgacggactcgattccgagagaatgtggggaagcttcggctgttgctgtttacggcggcgctgaaggttgtggctccgggaaggaggaaccgaagaggcgagagacgaagaagaaagtatgtggggtagctttgagctggctatagtgggagaatgagccggaaacggagaaaatggcggcggaggaggttggtggagcgacggggagggagatagaacacgtggggagatgggtttttcggagggaggcggcggatgtttctggtacagctgcggcggagggtggaggaagactgcgggggtctggtcagagacggccagaggttcataggaggcgaaggaagtgagtgcggagccggtgacgcggagggagcggcagtagtcggcgtgagcagcagccaagtggtggcgagcgtggactgcttctttcatgaggcggcgccggtccttacaccgcctcaccgtatcttcattgtcgagcttcgaggccgcacaacccatctataacaattgggtcgctcagacccaaaacccagaaagacaaagaacaagaaacccctcggtggattcccgaggtatggcgtggcgcgctttctgcggtggttgtgaggaatggggatgatggcgccttgcttttgggctcttatagtagttgtgagtgtgaaatagaaaacagagaatggagaaatgagagagtgaaacactgagactgcacagtgtgtgtgtgagtgccgtttttggttttgggtttttcttacacatctgtattattaattcgctagttcctgggtccttgtcataactaataaaacactattgggttttcttttcttttctttaattaacaattgtttagtctttttctaatattcaagaaaggaagggacataaaatacagaaagttaattttataatagatatatgtgtaaagattattttgtaagagagtaggtgataaatctgatgactgaatacaaactaagggtggcttccttcggattttattattattttaataaattgtgggattaatttaataaaaatgttacttgtatggttcataacataaggctgttttttgtttttgtttagtcttaaagagtgtatgtagagtgctgagactgagcctgtgtctgtgggatcttcctttcacccaattgtgtggtcccacttgttttcatttatccactctatctttgctcagctcctctttctcatttccatttacatttggtgcacacatttgtcacaatagaggctattgtattttgctacataaatttatatgttaatataggaaaatttgagtttttgtacaccatatctaaaaattctcacatcagcaaattttttccactttatcaattataaccctgtaatttttaaacctaatatgttctttctctctctctctctc

SEQ ID NO: 243451 - DNA, 1995 bp, Cannabis indica
ttttgggtttaatgtaaatttaacctatttttaaaattttgaaatatataagttaaaggaattaatttcccctatgtatatcgttgcttcttggtctttcctttacacttgtcctttggttctgttttgccccaaagctcaattcaattcaagaagtgattaagtagacatgacccattaactacattaaatacagcacttgaagtaggttaaacaactactaaatgttgttattaatagtaattcgatacctcatcagaatgatatacactaaatttcaacacagcttagaaaaaaataataaattaattattatttattaagatacatattatcccatatgaacttttgttttggtgtctaagaattcgaaaaatatacattcttcatagaccacacaataatattaaaatgcttccaatacctcaaaaaaaaaaaaaaaaactgcttccaatgccattatgaagttacaaagcaataccttccatttcgctatacattactccaacataacgagtaaagtattgcacattataatgtagagatataaattgttctacactgctagtggcaaacttcacaacgacgaagccgaaaataatagtcagggagctaaacgttcgattttccatactcgtcctccattggtttcctcgggggagtagctcaatctgtgtaccagaacataacataaacaaattgggagagtattgttgttagtttaagtaagaaagcatcagcctgaaccatttgcaacattgccctagaaggtcctagaatcaatttagatggaaaaagttgtaagaataaaagagattagagtgtgaatttgcatgctgattcatactgtgtactgaaccgtgtctctctcaaattacctgggactatcaattacttcaattctctattttgctgcctattgctattacttgtgttcctgaatttaccaatgtaaaggaactttgcactatgtaaaagtgaattttaaacagcataatttgtcctctcattttactttttaacaagtgttgataaattgctttaatcatgtctgtcatgtgtgccaaactagccaacttgatatacatataccaaattctagcacaaagaatttaaaaggaacatgtctcataaatgggatagaaagtagaaactacctgtcatgcaatcgagacttttgtccttgccaaaactcaaacagctcaggcttaagccggtatcctccccagtatttaggcttcggaatcacacttctgtgcaaacaagaatttgttattatttcagattcatcgaaatgaataaattgttttccttcatttttaacaaacagaatggagactaggtattcaaatcatgtaagtgtccatgtagaacaaaataggatagtgttcaaagagtgtgagattaccccaaaaataaacttaaagatggaacctacaaaaacacaaaccctccactaaaatcgtaccaaatataggtttggattcaaattccctttcctaagaaccaccccccaataacaaacacccataaaattgactttggtttgataaaaaagtaaaacaaaatgtaggcaactgcatgcagcccacagcatgtaaggcagcgaaggaccaacaagctgggacccattatctattcttggacaggaaagtaagactgcattacactaaatatattttaaccatactgaaaaaattaagctaacaagctaactaattatccctccggataatttagtcccattgagaaacttgggataattcatcaaatccaatcgtccaccttcatatgtgcgtgtgtgtataaatcaatacatctttatctttctatccaacttgtttttcataagttgttgacaaattaataaattgctcattcttattgttttctctcttttttttaaaaaaaaattaatttcaatattatcctatcctaatcaccaaaagaaagcctttaaagaattgtactacttgcttaaagtcaagcgaaaat

SEQ ID NO: 243452 - DNA, 2051 bp, Cannabis indica
aaaaaaaagaagaataaataagtagaattacaaacagaaaaaagctacattactggtgaaataaccatgaatgcctatgaagcacccccagcagcagcagctaattcagtcttcttctttccttccatgagttccttcaacctttcctcagtatcaattatttcaccggtttttatgagatatcgaactcgtttcccattttcaagggttttatggccaactctgcttgctacttccttttctttcgagtacagcatcacattggagctatggatgggtgcttcaatctagaaataccagaaatgaaacgcaaaattcaaggacaaatataatacataacaaacatatcaatgaacaaatttaaggttgtccaaatttcaaattctcatacatacttgagatggacatcaccaaatttcctgaaggagcaaaagaactctaaactaaatacttgttttcacttgtaaacaatatgcagtagatttcatttatgcatgacatgtagaactaaaaagaaattactaatttcaagtttatgagattgaaaattaaccttgattatttgtcctggttcaccctcttctctgctcttcacatgtttcgtctttaagttaatctctgatattaccactgtactattatgcttgaagatcttggttatctctccaatttttcccttgtcacgtccagatattactttcactgtatcaccaaccttaacatgcattttttgtaagacaggaagactgtttggcttacactccttccgctcccatcgcttaagctgtgaacaagaacaaagcatttttatgtcaagtgaatgatcatatcaagatttttatcatttctttttttatttgatcatataagattattaataatcactatccggattatctcataattctcactcactcttagtctttcatttccttatgtctattatattttgaaactaacctttgcggaaatgagacatggcttctctgttgacttaatctggcaacagaaacaagtgaaatttgtcagaaaatcatgtgttaatattacagttctagcaacaataaatctgttgacataataaaacatttcagaacaaaagtaataaccccaaggaagaaacaattcacttgaccaacttgctagcacagaaaaacctaaaagtaacaagttatgaccatcgaatcggtataaaaggtgcaataaagttgcgaaaccgaagctttactgttacaattctcacttcgatctccagcaggcattactagacaagaaatctggaaaattatagagctgtatacaagcaggatgaatgctggcatttctgagctgaagagcggaaaaaattaactagctaaacaaccgactatcgatatacattctcactagctgaatatacaatgtatatcttatatctatctaattaccagtaaagcaggtactagctcctttcatagcttaagtttggttattccttgtaaaactacctaacactatgctggagtttccatttcttccaaggattatagggacacagtaagttttataaaacaaaaaacaaaatgttggtccatcaatgtagttttcaattaaaacaagacaaagaaaactaatcatttaacggcaccaacagaggcaccatatctacaatactcactccattggcaacctcatgtaaagatacagccgttggacccaaaacttccacccaagaaattagaaacaacatttctagtctcactacttgagctgagttttcacttcactatattatatatagaaactatagttttatcttctccttcactacaaaaatgaaaaacccatttgaaaataattatcaatggaacaaagagaaaacatagcaaagggagaaatttacaaacactatcacaatgtaattcagtaaataacgaaataattgcgaaagatgagttggcagagtccaattcgagcctgacccattacaatgttactgataaggaactcaattgaccataaaaatggggaggaagaaaagttgaaaggagatgaatcaaggactgggaaag

SEQ ID NO: 243453 - DNA, 1461 bp, Cannabis indica
tataaataaattataacacaacaaaagataaccagaataacaacctcatgtgataactaactctaatacaactataaataaattacaaaacaatcacgaaaataatttatttttttactaaagaggtattttatgtaaataaaaaagttcaaaaagtaaaaattaattttttttttcgtgttaaagtattttttgtaatttttttcaaaattttagtgtattatctaaatttttcataaatttattgaaccgaaagagtcatataaaggtagaaattataaatatcttattcatgatcgactttacaggcacagtacatacaagtgtttattctaacatgaattatattattacatacaaataatgtcattaattattactatttcacattagatatattctccaaacccttgtactgcgcatcgatcctttcatctcctagcttctcaaaaattaagaaaaataatcacatagaaattaaataattattagttagaataatcaaattaaataattatgagattttatctaaaactaattgatagagaatgtagtttattatgttgagaatgagatgttattattggtgtgatgtatttatatgtgtttttgttggcaagaaggcattgcaacatgtttttttatgtattctcaaatatacttttagttacagtcactgtcactgccgttgttgctactgtcaccactgcggttgcaatcccgacgcttcatcatcatcataccatgtgaactgtatgactgatgctcagagtagccccggtggctttgaccatgagcatggcctgtaagattggccatgtcatgagctattgttggaccatagggcttcatggccatgtcatgagctactgttggacctatgtcatgagctattatataagattggtctgggaacttagtcataaagtgattatacaggtcagttatcatgtggttgccctgttggtggccatatacttggccatcagtggagttcgtgttgggcttggccatggtgtgaccaccagggtagtaaccctgaccgcgggaagcactgtggttttggccatgaccagccgtggaatggccagaatagtaagatctggtactgttattatgcttgttgtcgccataacagttgtcaaggcacttttgctgacaagtctcattggttggcttgtagcattgtattgaggccatggtgatgattgattaatttcttttgggaaagaagaaaggtttattaataactttgagctattgaattttcttggtggtggaattggttaccactgttagccctttatatagagttggatatgtgcatcatcaagtataataattattatttttcaattgaaattaattattattcgtttgcaaaaataatatatataaaaaattatattattctttcatttaaattatgagaactttaaatctactttttcaatatagtga

SEQ ID NO: 243454 - DNA, 2011 bp, Cannabis indica
gaaaaaaaaatatgaaatggttttctaacaaaactaacatcattgttaaaatggaaaaatttcacgaactaaatttcagagtaattactagttttagtgcgtttgtataactaggtaattgaggagtctaattaccaagtgagtgtaattacgatactatcaaatttaaataattaatttttaaacaatttgttctgtaattattaaatttttgccaaatataaaaattaaattatactgtacatgaaaaaataatttaaaatcttccaaacgcaccatttataatgttaataattatattctaaaaaagaaaacagaaatcatgcaatgtatataaatatgtataaaacatctttaacattgctaaattagaattcgtatgatttatttatatgtatgaaagctcaaaatttagagaaatacgtaagtgagtttgtgaccgttgctatgtttagctcccttctctccgcttataaatattaataccttcgtttctctctcatcaattctcaagaactcatttgctcacccactctctctctctagatctctgtgctttcttgttatcagcaatggcagacacaaatgatgattatgaattcatcaaagaagaagagggtttgactttgaccaccttcaagaattcatctactgatataggaggttgtcatgaatatcagaatcttgaagaagagttcaagaaagttgatgatcatgatgatctcgaggattactccgatccattatacattacagatgatgattatgatgagagtagctatggtgcttatgaattttccattccattgagcaggaagcttaaactgataaagcattactaccttcctgatctttctcaagaacatgttcaaagagaggacaagttcaagtggctcaagcaccgaagaggtgaaatattccaaaaggaaagtgacaactttgatttagatttgagagtgaagaacgaggatgaactcaagtacaagattcaagaattgatggaagaaaggctgagagggattgagaaagctcaagcaaatggtaagtcatcttacttaaattggtttttcattgatgattggcaacttcattctaaaatcattcagactgcgtatagtctttgctgccatctatgcgagttcatatttgttgtcttgaaaaattcaagacaccaaagaaagttgaaactctttaaggatatacttgagttactaatggaaaatgataagaatagtaagatcatcaagaaagttgtttcttttattgaaaaagctgagactgagcttgtaatgactgtgaagcacaatcatttctatgataaagatggtgatgaagatgacatggaggaatattttgataacaactttgacatattcttggtggaatttatgtgtttggagtcgatgctgagttatccgagcctgactaatgattatgacactgcaagagatgagctcgcaaatgatcagattgttgttacggaatttgataatgaagttgctaatattgaatctgaaatgtgtgctttgaagatacagtttctagatgaaaatccaagggacgaaccgatgatggagcaatttctaataacactaaagctttggattgcgtcactgtggaaaaacttagaaggtgaaatgcactagctacttctgctatgaaagcttttcttctgttttgatgtaaactctcattcttattgctttgatttagaagcagaatttaataaaattcgacctattaatggtttgatcaaattaagcatgttggttgcagctcttaaaaatcttaataataggcttttcaattttctttccaaccatatactcatcttcctatcatcatggatatgaagcttattatcttcttatgtgtacaacagtttcacatcagactcattatttgatcatttgattattctcagaaattaaactcttccagttatttcaatgtcttgtgatctttactttttttgtgctattttattaattaatgagaaacatgtgtagtc

SEQ ID NO: 243455 - DNA, 2301 bp, Cannabis indica
acctataaatagagggagaattcatagaaaaaggagataaaagaattgagagaaaatactatcatttaccttcattgaaatttgtactctgcatatttggttaacgaaaatctaggttaacatgtatatttttactaatttaatataaatgttggttgcaaatatctaattataacccgcctaatgaaaatatagcaaatttaactcgcctaataatttcatcaatttagtttggtcaacatgtttaaacataagaaaatgtatttatttttttattattattgttagtttttagtgtttaaataattaaatttggaaaataaattctatatactttaagattaaaagtgttgtaatctaatttaactgttaaaaattttaaacaaaacattaatataaattaaataaatatttaagtattacaaaaaaaaaatctttaaaagatagaaaaaaaaaatatactaatgtaaaaaatttaattttaattttatattatgcaaaatatcatagccaatttgaataaaaattatattaatcggtttatttaagtagattaaaataatatttaaccggctcaatattatatattcattgaaatgtattttttttttatcggtttcttcatattggtttgtaaattcttttaacagccgagtttccttcttgaaacgacgtcgtagttgctgacgaatattctgaattccgtgcaatcaagatccgattttcaaagttgaaaccaaaattagcatctgctttatacagtggatttgttttaaaaattattatttatacgaactctgaactcaactctgttatattatttatacgaactctcaagtcacactgattgagcaactaaactcatcataatttatagttgttgacacactccactcaagttttattcttttcgactttctataatttagattttacaatcaatttaagatcttcctttctccggtatggacaactcagaagacaaggttgtcgccgtcattatggtcggcggtccaacaaaaggtaaaacttttctgggtttccttattttatatatatatatatatatatatagaattcatagacattagttctttcttggtttttgaaaattagagtggaaattgtttttgggttgtctgatgatttattttatttttgtgggcatatgggcagggactagattccggcctctttcgttcaatactccgaaaccacttttcccattggctgggcagcccatggttcaccacccaatttctgcttgtaaaagggtttgttttgcaatcacttgtggatgacaaagttatcatttttatgaatttcaacaagtttactgatacttgctttggttttctcacttgtgtagatacctaatttagcacaaatcattctgattgggttctatgaagaaagggaatttgcactttatgtctcttcaatctcaaatgagctcaaagttccagtcaggtaaacttttaatcactactttataattatacatctcttaagtttactaacgaataaggaatcaaatatctgaatttttcattcccaaatttagtaagaaatccatccaagactattaaatcttggtcagccccatgattttatacattgtttattttatggatgtaggtacttgaaagaggacaagccacacggttctgctggtggcatttattatttcagagatatgataatggaagacaatccggtttgagtctgcatcttagttttgaaatgaaaagttatgcttttatagttttatcaaattctaaatgtggtttatatttattggcagtcacatatcttcttgctaaattgtgatgtttgctgcaattttccattgcctgatatgcttggtgagttttactctggaagaatatgctgttgtatagcacattattatgtaagacatttaagaattgtaattgttttgtgcgatttttcgatttattccttcagaggctcataaaaaatatggtggaatgggaacaatgctagttattaaggtaagtgcatgcattaactactttgaaaaattagcaagcaaaatatgtttgtggggtgactattgtttctcttgaagttaatcagtcaatttgattgagtgtaggtttctgctgaatctgctcatcagtttggtgagttggttgctgatccaatcaccaacgagctgttgcattatacggaaaaacccgagacttttgtatgtttactatggtttttgcatttgaataccttaactagtctgttaaattttttaatatactattggtttgtctcaaatgtctttct

SEQ ID NO: 243456 - DNA, 2808 bp, Cannabis indica
ccctggaattctaatatgtatcatatgaagtagaaatggaagtcttacattaagaattgatctgaatttaaacttgtttaacttgtgctttctgatgttcgatgttctgctctacatccaggccagaccggtatgtgccattgtttggtgaatttttctatgatccttcaaaatggagggagagtgtgccttttgtggagcaactgagggctttccaagaacttatagatgaaggaaaggtaacttgaattattgttatcattatttctctactcataatcaacttactatgaaatggttagcaactggataaattttggttgatttatattctctattcactaaggattgcttactggttggcgttcttgcgatgctcataacaggacatttaaagctgtgatgtcaaagtataatatttattaatggttttgaacctttacaggtacgttatattggtgtttctaatgagacttcctacggtgtgatggagtttgtacatgcggctaaggtcgaagggctaccaaagatagttagcatccagaacaattacagtctgcttgttagatgtcattttgagagtaagttaacaatttaatattatgctaataaatcaataaagaagcttcattcaccatttgaaacgtttcgacagtggatctcgttgaagtatgccacccgaaaaaccacaacattggtttgctagcttattctccactaggtggtggcacactatctggaaagtacatagatgccaattctgaagctgcactgaaaggaagattgaacctctttcctggctacatggaaagatataacaaatctattaccagggtatgtaattaactcaagctctttcatttgacaaaacagaatagtcccctaacatggaagcaaagtgtttgttattcgatattcatcgtctctcgttctaagaattcgtaggataggatggacatgaaatagctgccaattgtctgcttgatttcgctcttcctttatttatggtaccataacttttccatagagctaaatacaaaaccttgtgtgactttctttatccaggaagttacaataaaatacatggagttagcaaagaagaacggcttaacaccagttgagcttgctcttggatttgcacgagaccgaccgttcatgacgagtaacatcatcggtgcaacctctgtggaacaactaaaggaaaacattgatgctttcttgacaaccgaacggccgttgcctgcagaagtgatgacagagattgaagatatcttcaagaagcacaaagatcctcctctttgaaacatttctaattagtcattaaagtttgtgttagtgtatttctaatccaattcttgtatgcagtgttttttttttaattatttgttttacaaatgttttatttatgttttaattacattaatgtaataatgtaaattgctgttcaccaattttttcatatatacattgaacaaacaaaccaccaattgtgtattttcttttatttattggagcaaaggtatataattactttaatttaattagaaatatttatttcatagattaagaaaatattcaaatttaccaagtatgtccttaaaaaaaatcctattaagcatttccaaataacaatgctttctatcaatatattaaataagaataataatacttaaagcatttttctttaattagtaaagtattagcagccaggcattttctttgatttgggtggattagataaataaataaataaataaaaggggtgtttaattaatgtaataatatataatttacgaaactgaacaaaaatttacataaaaaaataaataataaattttaaaaagtagttaaattagttattgtatataggtggaaggaagagagaaaaaaaagggttgttcagagcttcaaagttgcctgaaacccatattgccctctcatttccaaccctttctctctctctttcaataattcattgaccacattttcattcattgacaattgtttttcagattatttcttcaatttgattgaattttgatgagagggcatagcagaagaaagcataggcatcacaatcatcatcattatcattatctatgaagacttggagacgggactcatcgccgatgccgttgccggttgagctttcttcttcttcttcttgttattatgcttttgtgattatcagttgtgctctttacaacattttcagatggaatggcagatcctgtcacctatggtaatcatgagcgtgacattgaacaagtgagtacactttttttactcattcatgatgaatctatttatctatatttttcattcataaaattgggatttgatgccaaatttccaatctttatatgcaaattttaagaccctttgagagatttgaagttggtattgatggaagacaagtttcaagatatcttctaattttaaatacgcgtgcaacaacctgattaaatcggatttggaagtcttgtaactatataacacgtctttatgaaaatgttaataatgataaaaatgaattttagaaataaatgtttatacattgataatgtatataatattatctttgttgtgtttcgtaggcacttgttgcttttgaagaaaggcactcaattaatcaagtatagtaggaaaggaaagccaaagttttgcccatttagaatttctaaggtaagaaagcttctaaattgaccctttttttccaattgaagtattttgaaaaaagtgaatactttgtagcaaaaggaaaaacgatagcgcctgatgaactatcctaaaacgaaatagtttttg

SEQ ID NO: 243457 - DNA, 4475 bp, Cannabis indica
atttacattttccatataaaatctgaaaggcttgccaaccaaaatgctatacaatggaaggaaaaaaaaaattcatagcaaaatctaaattctaagaagaatgccccttattttaatccaatatacaaatcgacattcttaattatatctcaacattgtactccaagaaagaaaaaaattccagttcttggtcttacaaaccaaaccttcattttattctcaattattttttttcttttttcatgagggtacagatcaaactcttaaacaccaattattgaccttcacattgcctctaaacagaaattttgtataatcttttggccatacaaaaatccttaataaatttttgtcctttttaaatttacaaattttgtataatcttttggccatcacaagaaattatattctgcagcttgtaagaaagctgtgattccaattcagttgcttgaaaggatcaaattctaggtggctacttgtatttataaacaaaatactttaagaactttctttcttagatctctgtagagaatggggaagttttctgtactaattatgcttcttttttttctgtgccttttactgcattttgtaaaattttggtactgtactttgttggtgttttgcatccacggttttcctccaccatcagtgatagctctcaatatatttgggaggaggtcacccctagacatgtgaactttttgtctcttttccaaaaaatcagaaatagttgtaatccttttgaccattggcaaacttcgtacttaattgaggccctaagaacctcaagatctagagttccaaggttccaaccttggtctcccctatttcccaaccccccctaaccactagatcaatgtagtggcttgttgtaatccttttgctatagagaaaatcttctacaatttgcctaatattttgtctcaattttatttgaggttctcgtttccattatcttaacttcagttgtaattgagtacctagtaccacaacattcctaacagtttcttcactgcaactgaaacattcgttgtccttcatttacaaaatacaaagatttcatatgtttagaatttattttgacaacaaagtcaatgtgtagttctgcccaagaatatacctatttccaaagcaaggatgccgagctgatatgctgatgttgacagtgtgtatattatgctgagacttagcatcatcaggcagcaaaaaatatccctgttgaaactatattaataagaaactgaacttctatagatactgaaacaaaagaagcccaccataagcacatccaaatacaagttacaaagccaaagccacttgcaagaataattcttttcaagactaaagaaaaggggagaagggggggtggggggaattactaaaagactaccctctccacaatcttaaatataaatttgatacgataaggtaattaccttttccatagtgtataaatatgttggctcaaatgttttgctgtgtttctcaagcaactgaactgagattgacaataacaaatataatcaacaatgataataaagctgaagataagacagaagatagtggacattacggtgaattctggtaggtatacttttgcatcttaattagatgaattaggttctcctagtcgtgggattcatacacatgcttagggaatgctagaccacttgggcaaaagcattgtataaactttcaaatcagactagtcaaacaagaaattgatttcaccaacaacatttcagagagtttaagattcttaaaaaacagagatgaaatgatgatgcctgctacacaactattgaagatcacttcagctttaagtagtatgtagcattcattcttttaccaatcccatatatgttaaacattaagcatggtttatataacttttataagtcaatacggtcagtaattcatgtagagtcaaggttgggtggaccaatttattaattgcacctcagtatattcaatccaaacacaaaaacattacaaaaaaattatcaagaaatagcatataaaatagaggtctgaagtatttgtccaggtttgtatgaaaatcatgcagaatctggagctattgtagctaacttcccaatcagagtttcaaattaaatccagggaaccaacaaagttacattgtgataaggctgtcatagacatgtgcaaacactctactatctagttaaagttctttcttacaaaatattcagcgagccattattatatacataatatattcatatatattgcttcaaaaaaataacctatcaagaaaaaaaaataacctatcaagaaacatagatgggggtggagggggggggccaaccatttttacctgcatataatttaaccttctctaaatgaagtaaacgcagccactttgaaatatcgagatctaaaggtatacctgcaatattctgcatttcaatttaaaactcagtgaaggacatatttaaagcaacataaagactttatgttcgtaccaaacaaaacgagcaaccatgataacatacataacctattgaaagtgtgaacatggttgataagaaataatattacgcacaaactaaatctaaatatttaaataagatagaagtctaataaaatcctaaaaacacaagaagaagaaagaaaactattatcccttacaaaatttacaaatacaaaattgaaaatgaacatgagagattttgaaaatctaaggggaagaaaagtattcatgcagcagacctgtataagcaaaagaccatagccaatgaattttcatgtttaaaacaaatcctataatccacttaatcaaaaccttacaatttttggtgagtatggaacttgttaccattcagaagtagaaaatattgagaaacaaaatcccattctatattgtggtatacagtagaccttatggtagagtataaataagagtgacattgataaataggtgagattaaaatagctacaaacaaaaaacacagcacaatacaaccaaccatctaactcaataatcaagcaattagaaaacacggagaatggtaagcatatacacatatatagatatctatacatattatagaagtgcaaatatttttaaaaagattatttgagaaaaaatatgccccaacctactcaccgacagcttcaagatacttccaaggattttagtcaggtgcttccaaaggaatgatatccgtctataccacttttttccaaagtgaataactgctgctttaaatgtctccctggctgatagaggaaatctactccgcggttcctctttatcagattttacaacatcatcaatgataagatcagagctatggctattgacagagccatcagcttgatgttcatgaagttcattatcagttttcaaaaactttggtgtcaattttcccctcctagcaccggattttacagctgcatatgttaacccatcttcatccatgtttgtatcatctagtttattcgatccagatttcatgtcaggaatatctgtcatgctagatacaaactcatcttgtgaccacaacccagcactagttatctaaaccaccaaaagcaaaaattaatgtcttagataggaaagtgccatcataaagaagaagaagaaaaaaaagagctcagcatacaaaatacattgaggttttcttataatttggctatgccattttggggtgctctatcagaattatgttctaaatttgtttctcatttaaacatcaaagtaattccttattcatgaataactacaattaccaaaacagcccggtccaaaaaagttttttaaaagaaaaacaattacagcacatttttttccttcaagaataaaatctatgaggtaataatcatcaatatgttgtaaagaaaatatatccaaatttaaatgaaacaatatacaaacatatatatatataacgtggacatcataagataccttaatttggatgagttgagcttctgttgttttaactccagacagctcgcttgaacagccaggcttcaaatccaaagaattaaattagatgacaggcacaaagcccacataatacaagtaagcattacactgtaacaacatacatgaaaatgatcatcagacgaactaagaaaaggtagaggccaatagactttttatatagagccattgaagtcatgaaaaagaattgatacaaatataaaataaaatagcaaaaaattgtgttaccaagagtgctttttacaaagacttgctgcataactgaaaactgtaaattaaatcctctttcgtccattataagtacaacaacaaagaatttcttttgaaaaagaaaccactatttcaagcacagagtagagatatgttatattgatacatgttttagaagaaatttgatcaacattccaatcatgtcaaccatcaatcgcctaggtccaaattgaacaaggcaaaaacatcaacaaccaaatttaattatgcaagttaagtcaaattctag

SEQ ID NO: 243458 - DNA, 4016 bp, Cannabis indica
aattttttttctttgtaaaaaccattattaatcttcatcctctcatataacctatttatcctttctccttttttcatagtcgcatcattgactgtactcttgaacaaccattgtgatccattagtaatgaaattcaacgcttcattctcaaatttgaaaacatcaaaattgagctttgcattgtaacgaagtgcacctgttgttggatcaacatatatgattcgagtatcgaccatagaagataagctcacgataatatacacttcagtagtacaaaaaactgataagtgtgtaaatttgagctcacattacaacttaaaacattaaatggctcgttgagagtctagtccgtactaggctattttgagggattgtttccctaagagtccttttggatttctgtctgggcttttagaacgatttagttttttttctcgtatagttgtgttttctcctttctttctttgaggctatggcggcgagaggaaagaaaaagaaacaatggatgtccatatgttacaagtgatacaagcattgctcaacttttggaacgggatagtgcaatagagatagaaatgttgaaactttttgaagacattactcttgaagatgtagttgcttgtaaggcatgtgtggcaatggttgtgggctgtaaagacatgcccctctgttgtgaagaaaattttgatgggggtgtggaacaggctgggtttttggagaatgaagaaatgcggtgatggggtcatgggcttcttctttgaatctgaggaggactgtcgttatgtgcttgataaaaggccatggcttattaatggtgtcctactcaatttaaagccatggccagtggaaggggaatgagacttgcagagtttgaggtagcacgcttttgggttcagtttcacgggctgcccaccagatgcttgtccgtttaaaatgctctgatcattgctaagaaagtgggtaactttgttaaggcaaaggaaaaatcgaagttataattggttagaagaggttatttgaaatgctgggtagatatttggatgacacatcctatatcctctgtgttctttctgagaatggaagggaaagaagaaacttggatacagttcaagtatgaaaagtttccactattgtgtttcacctgtggaaagttggcacattttgagaaagcttgccatgccccaatggcgatggtgtacccaaaggaggggcctacgactagaatgtatggtccataaataaaaagtagacacagaccgcagtagctacttctccatagctcgtaagggagagatgcgtttgaagctggatattgagtatactccctggggaaaacagaggatcaagggcatgtggaaatgacgcttaaatgaccgtcataaggcagacaatgtcagacctctagccgatgacaaaaaagcttcagatagcatctctggagataaacgtggagaaccgagattggaggacagaggacattgtacgaaagaggatcgtgggtggaaacaaggcaatacgagtacggagaatgagaatgtggagatacgtacaagcactggcagtaaggaggagggaaattcaaataataaaaacgtgggattttacagaatttgggcctacctacaatagactcttgtggtattataccatacattgggccctaaattgctcaatctttggacataccacatttgtggatttgtgcttctcgcaggccccacgattttcctgaacccactcccctgggatggcctacaaatagccctgagaagcaacaactctttctgcaattgtatgggcctgaggtggtggacaagttcaaagcccaaccatctctgatttataatccaccaaatgtctcagaaatgattgttcacttacttgggttccgtaagctcaaggtgcacacatggtataatctcattcctaatcctcatcttttttttgttattgaaaaattgaatggtgtgagtagggatacagtggagacatcacagtttgtacagactactaccaagggaagttcgacaatttacgaggtagatgttgaggtgaccaaggggggaatggaattgacattgatgataatgtaacctttagttgagggtattttgtggagggggaatgctcgaattcaggcaaaaaagagaggaaaaggagggcaagaggcagtgaaaggaaaagcactgtaagcatgaaatcgtcaggtgttaagacacgtcagagaaggaaattggctaaatctgatggcagagagaatacgggcaacatttgtgatctattggaaatttatgtggacataccggttacttttgtgaaaaattttggtggtggcaaggaggcggccgaaagcatgccctcacctccccaatgaggtgcctttcctagaactgtcggggttgccacagacccgtgacagaacgaaccctcggggtttgatccgtgaggaggatgtagattgtgtttttctctcagagacgaaggtgggcacggatgtgatggagcaagtttctcataggttagggctcctaaattgttgttgtacccctgcttatggcacgacttggggtttgtgtttggcttggaggaatggaatacacattaaagtggtagatgtgtttgcatctagttttaaagcagaggtattgctagcctcgggacataatgggtggatttcttttttgtgtgtacgacacaccatatcaatcgcaaaaaacatgctttgtgggagtggtttactggtattgtcacaaatttccatgaacctaggatggttatgggcaatcttaatgttattttaaacaaatatgagaaagaagggggatgtcaatttgtggataaagagggtgattacttaaataattttccttttgaaactggtgggattgatcttggattcgttggggcgccatgtacgtggcatattgccaggagggttgatcaaagggttcgaaaaatactcgatagggcagtggctgattcgcaatggtgcgtggattttccgaatgcaaagatatttaattgccctacttatggctcagaccatgtgcctcttctggttaagctttgggaagacactgcaaaattgagattccctttccgtatcctggaggtgtggacatcgagcccataatgtggggaggttgtcaatggagcgtggcatatggttccccataataatcacacttattttttcttaaatataggctaaatccgagacaagggaacttccaactactatggacacttttcaaaagttccaccataaagacaacacttagcacaaagaacatgcgctgagtttacatttatattaatttataaatatttctttcaatttgttttgtattcaaattaattatttaatttatttaattttttaggagcaaatagttgaattggttgcaaatcaactaatgctcactagggattagcgtgatgagactgctatagatcccacccagtaccctgagactttgcctgttatgatgcaagtactaggtgagagatctcgacatttgagaggcttcggtcatctctcaaaattgaaggcagttgaggccaaaagatcacctgtcacgacttcttctgcctcacagattgttactatggaacagtacgaggccttacaaaaaaaaagtggaggacgcagagcaggaaactcggtattcgaggcagcatcatgaaacacaacaactttacctcaagcgattccaagatcagtttgagtatctcttttgggttgtgcctggtttcaacttacgtcatagggatcttctaccattctctacttctcctagtgctagatcgtcattgcatcctcccgtgactcagaacaacaacgatgatgacattatccatctttagaacaatacatattttataatgggatattggcggctaaaccacctgaactttacggtttgtaacacttaaccacaataactgaatttttggtggctaaactacctaaaccctggtttcgttttgctctgcacacctccgtccaaaaatca

SEQ ID NO: 243459 - DNA, 17236 bp, Cannabis indica
atattgtatggtatccatctttactactgttcgagttggttttacaagtggcctgatctgaaacaaaaatagaattcacaatattaacgtaacgaatatacattacttccaaataacatattgatgatgagtaacctgtagaaaataagcaaatgaaaacttcgcgctcagaatcacaagccaaaacaccaaatacctgcaaaagttaaaatataaatattaaaatttcattcaaattaaaggtgatcagtcatccataagaatattttataagaatccagaaaagaaaaaaaaagattaataattacttgataaaatcagtggtcctttcatacattccacgcccaacataataccgttcctaaaaaaatgattaatactaattaataaagcaagaatgaaaattaaatcaatagtgggcatccaataacattattgtaggttgagttaatggtttgaaaataaattcctttatgatccgttgcattttgtgtgtatttccaaagaataatctcattgcataatatatatatgtgtgtgtgtgtgtttataattagacaagaacctggcgcatccatttgacaaaacggattaaaggccagcgatcacattgattagtcaaccgatgacaggcaggaattcgcatcatgaaactaatgaaaaattgaatgccaccataaatgccaatgacaattaagtacaatctgaatataacaccatttccatttggtctactctcttcctgaagcgctttcctgaattaaaaaatggaataaagattacctttggctcaaagagttaagtttagacaaaccaaaggcaaaacagagatttgagtgcatacacatataggagagatacaacaactgaagccgtactgaaccagataaaacgaagaaaaatacgagcaacagcaagcctccgtgatgtagaatacgccccaaacatcattataacatctagcacacctagagaatagagaaaattttcacagtataagagatctagtttaccagataataaaaataaagcggcattgtctgaacgagataaagacatactctcaaaaaatttcattacaacaaatgttggagcaagactgagaatctcccgaagagtcttcccattaaagttttcatcattgaatgcaataatagcaagtccctgacaatcccgaaaggaagtaaaactattaaaaacacaaaagaccaaagtccaagagttaattaattttaactgatatagattacaatatcagaagctaaactacaacaataaaaagtataagaatgcagaatacaaatcaaaggaaaaaaaaaggactcaagcatgtagtttgactaattagtaatagaagctacaacgaagactataagatatggataaaattgacaattcaattgtaaataagtaaacctggaacatcatcgcaaggaatatccataggcgatgaaaactgtgatagagatgaagaaaagtccggtgctccacgaaagaagtcttccctctatgtttacttctgcccgatttaagcatattctgtaccaagacaaataaaaatcagcaggacatatctacgagtaggtttagtttatattggtcaacacagtaccatagagtaaataaagtccaggtgtaactgtgtggagctcagcaacagatggcgaaaacaaaaagtacttaaattaacataaaccaatacttctaaagtttaatgcccgtgtacttaaattaacatctgttttgtggaactcagcaacagataagaaatttttccatcatcacttcaccaagaaattaaaatgaactttcagtgcccatgtaaatgttgtacaactgtcaatcacttcaacaatcttagggagaatgtaaccaaccttcgagagttctggcttttggaaaaagggtgagcccaaacgccatggccagccaagttcaaaacaatgaagtgacctgaaataaaacttgttagaaccaacaatgtgaataataactcaaaggcattgctacaaaaatctcaccaaaaatgctcattaaaatcatcataattgcgccaggcagagtgtggtgcttttccgtctttattgctttttgtctcctgtgcactttaaaatatgagaacaattttaccaaataaataaataataaagagggaaaagaaaatgtttgcttcactttctagcaataaacccaaagtcccaatcaaggaataccaacacccaagttagataaacacaatccgaactactatgcatataataaatataaattagaatttgaagcaagaaaatccttgacgaatatttaaaatttcttcttttaagcttaatttgacaaaaagatgttcgctaagacataccgcttgcataacatcatagagaggaaatataacttgatcaaggaatgaaaccccatccccagccttgcaactattggctggctgtgcaatctgatgccttaaaatttcatctagttctctggccatctgcacatgaaaattattgttcaaaggacggaaagaaaagaaaaactttcttaggaagaaacaaaacctacaagttttttttttttgtaaaacacatatattcaatgctccaaccaggagagtatccgtggtaggacagaatcaataccacatgtgttcttcaatttgttacaaccacgagaaaatcactcaacttcaattagagagaacaaggagaaagatacaaaaaaaaaaaaaacaattcaatgctccaaagaaattgcatagaatgcttgacggttgacttacatgatgaaatatgtagcacaagcattctggaatgaatctgacgttggctgcttcaccccatatcaaaaagtacaaggaaacaaatagtatcttcttctccttgacaacaacatcaaaactgaattccatccaaatattttacaagttttaatcaccttaatccaagtaaacatataaaataaagttgagtagtatcatgaataatataggaaacaatttaagatacatacttgctccagacgggctgaatgcacaagtaattacaccacttaatataattatcaagggacttcaggaatacattttgcactgcagcttcatccaattcctgaagcaatatcaagaaaaatattggcataaaaacatataatgaatttaaggcatcaatgcatttagattccaaacatactcatttaggaaaaattgtcaaatgaatgtttttaatatactcatttaaatatacctcttccaacacattataaaggctagaatgtatttatacattgtagaacctttataaaatatataattctgttgggttgatttgacccaacaggttactattacccggctgttatcgggccaggcatcgggtttctacgcttaaatggccacacagctcttcagccctgttgtttgcccaattttttacatgagttggacaggttcttcaggcttgctaaaatttgagcacccccataagatatatcacaactttatttcactatgctctttaagcatatactcatttaacagcccctcctgtccatgagacaaaggtccccatggccatgagggtcttcctacattataaatacttatctaggctattcacctaactctacaatatttggagactattcttgtaaaaattgctacgtaggtgccctaagagacttgaaaatctgatttgtaaaagcaaaccaaatgcttgacaatttttgctacccatagcaacaataataataagaaatgaccttgaatatatttaatctactctactacatgtcaagtgtttaaaagcttatgctattcccaacaaattacatgaacatcatatattataaactatgtaattatacctctgcataggactcatcctcacatcacaggttatgcaaattataaactaagctacaatattgaaaaaataagaaaatctctccatagctagttgcaaaccaaatcaacatgatctcaaataaatttcacaatctcacttaagaatttcataataagacaatttggaacatattaaatatttaggtaaaccacataatgattagcaaacatctaaacaatacaagaacatactcgcatagcgagaaacatctatgagcattaaagagatgaaacttacaggttcagcttcttcaagaacacgaagttgtgattgctcattggcaagaaggtgaacaatattttcgcgctgattagaaacactgtctttctgacacataaagttcaagcattagattaagaaaacattggttctcataatattgaccgattttagagtttgtaaagaacaaaacatgtggtcttgtacacctaaatttgtaagccaagaaattatttcccacctaaacattttgagacaatcttaaaataggcagccataggaagtaaaaaaaaggaaaaacaagaataaatcagtgataatgatgggcaattccacagcccttgtattcatcgatcatattaattcaagcaactttagtttcaaaaaagaaataagaacaaactcatctcccccatagtacatatatacatatatatgcatgaacatacaaaacaaatctgaggattcaaactttcgccgccatataaatatagaagaacaacaaaaaaataaagttttaagaggggagaaaacacagcaacagaaggggaaagaaaaaaagaaataatagcaaccacatgtaacttatggcacaaacaaaagaaatgaataaattcaatataacacgtgagctagacgtacgaacctgaaatccaaaaacgtagtgcagaaaatcgaaaacatcagcattccttgtagctgggatgggaaaatcctcaggcaatttgggcaatcccctatattttaacactgagattgctgctttaacctgttcacaaatttcttgttcaactaatacatgttttgctctatatggtgtcacaaaaaacaaatattttaattggaaacataaactaattacctcaggaaaaaatccaatacgatttgttacgctaggagcatcaagtggaataatattataagcaattaagttgtccgtcatagctgcatcagtttccatcacacgtctcagctgcataagaaaacaaaccaattgagagatgcaagattaaatacaatgtgtcccatttatgttagtttcaactttcaatggagaaactcaagcataaacatatccatcctctgtaaataagtatcaaataattttttcccaattatagttcctaatgcttcacgtgatttttcgttaggagtacaacacaaatgcttcacaaaatttcggatgttcaaaaatacaactgataataaagacatacaacaaacctcatcaggaatttcctcagtcaactgctgaaggactgtccctaacactttcaaagtagcaaaaactctttttctcttaaccgtccttctctccaacctgagaaaaaaataatcaataaagagatcaatctgatggccatgaaagaaaaactgagaaaatacctttcacaacaaaaggtaaagcgtagacccaaatacagagaaagatacagctcaaacatttcctactagttaaaagaaacttttcaaataaataataaattctggggaaataaacattaggagagaaatgaaagtcacattcctatagttatgtttttctctttatagtagtagatcacagaattaaattacattatctaattgaattcaaatggatgaaatacttactcccccaagtttccactgaaagccccagcctcccttaaactcaactcttcttctcttaacttttccacatcattctgctctcgatagactctgtagaactcttgcagaagagcaatgtcttggcttctatctataactcctccttccctcttagctagtttttgctaataaaaattaaaaatatggtccatacaacaatattattgtcaaagttcatacactgcaaaacataagagactaaaaaattgcttcctatgagttatttttggttgatgtatgtttcagtgttttaaaatgctaaaatcttgtaatcacgatattcttccgccacaagtgaggtttttcaatacataacgggtacgggtggtgaccagtctaagacagtgaaaattaatccatttcaaactaaatacataccttaattacagacatcaatccggttttaaattgtaaaactcctcttccttcactattaggatccaaattttgagccaaagaataagcatgttcacatactgtatatacatacacacaaaacaaaaaatccaagataatcataatgctgttattaactgacaaattcagcttcttaacaactcaaaataagataatcatacatatcctggagacatttggattctcattttggatctcatcagcagcacgtagaatttcatcaatatctccattattagcaagtgaagatggaacatttccagcaattccatcaacaggttgcccatacgcatcctttccagtccgttctcttttcaatacagcacgaactaaacgctcccatagttcgtcaacttgagacattttctataatagaaacaatcacaaatactacaaacgctcaatcaaactacaaatattatatacataaatcaacaattacagtttacaggttcaataaacattttaatttatatattgcaatcattttcgatacatgagaaaacctcaaacaacctaagaagaaaatgatgatgaagaaagaaatcaaaaatggcgtacctgtaagtaaaaaccagaaaagagaagaaaaccctagagaccgagtcgaatcggtctttgagctcagaagaagaagaagaatctctctttcaaaactcagcttctttttttgctctgttcttttttgttttaaagctttttcatttaatttaataaataaataatattaataatgaaaaaaagagaaaaagggaaggaaataagaaagaaaaggtgattgattttcaaaaatgagaaaaattgaattgagaaaaggttttaccgggtgtagccggtggtgggtggaggggttaaccggttatagccggtggtggatcagacacggcaatggctgaaactgaaagagagagtttggtcattgtaactggaaagacgcggagaagaaagaaaattaataagaggaagattcattcgtttttatggcataaaagacttttagcttcaaggttgacacgtggcaaatggttagccgtttgatctagaaacgtggttggatcttaattgtccgattagtagctacgagttatgatttttttaaaaaataaatgtaaattagatctcacggtcattataaaatatataagttgaaatagaagaaacaaataaataatcgtactactagtgggaaaaagtacattttaatacattatgggttaaagaattacaaattctactaatatattaaaaaaattacaactaacaaagtaaaagaaaaaaatgtttattacaaaaaaaataataatttacaagctcattaggagttatgaattcacatcaatattcaatactccttttgatattctcaaaccaaaggggtcaagcttaaagctagaaccccaatcatagtttttaaaaggtacaaattaagtcttttaaggttatttttatctccttttatatacttttttaactttaataatttgttatccattacttgtagtgttagaattattagtctattttgttgatgttcaaattttaaggtaatgtagaaagtaaattttattacatgaccaaatactggtaatgtagtagtttataattttgctagaattcttatattctatcccgattgtacttttagtttgttgtctgtcacaaaagttgttggataataaaatcgattttctattttttttttaataaaagtttatatgttcttacttgacaacccagttagcttggattttaccaaaaaaaaaaaattatagggaagaaaaataataaaaaaaagaaggaaaatgtttttaataaatttaacatgaggtgttttttaatattttctttataagtatttgtaattgatcatgtgggaaaattacgactaatagtgcagaaataagacaactaaactttaaacaattaaataattaacaatgacaagattaatatattacgaacaataattggatgaaaaatagggacaaacaaagtatagaaaaccagaaacaataaatgcagaaaataaaaaatcaacaccaagatatattactggttcaagtccgatagatcaatgtgatctatgattgcactatttcatccaaacaccactgaaatcctctttattgattgagcaaaaacatgtacattacagttgagatcgattttctgttgagtcttctcaaagtatttcaactctcacactcttttccaagaatcttcttcatctacagaaaattctttatacaaaactcaaacccaatctctctcatttctcagtacctctctctctacctctcaatctcaactgaaagcatgtattacgttcatcatgctcaatgcttaagtgttggtggtataagatcctaaaatcggtggctgaaagaatcaaagttgttaagttagttagacagtaactaacttgaccaactttccttatgcgcgagatctccatgtcaacatttgtctaagtgcatccgagaacatatatgagcttccgagatcacggacaaaaggtactacgctgaagaagcttccgaataagatagaactagctggagttaactatccgaagctactttccagggagaacaaccttctagaaagaataactagttgtacgaaactcctttctagaggagggctagctatcttgaagaccgaacctagagtggacattatagtcatttagaactcccttccaaactcaactatctccttatggaatgaacaagttagttgtccaaaaacaacatatgggagacacctaactttctatcaggcccggccctgggcataggcgggctaggcctgtgcctagggcccacccagcccaggggcccaaatttttttttctcttttaaaattatacatttttttttaccgatttttaaaaataccacattttttctaacataagggtccaatttttttttttccccctatgacccactttgtttcaagcccgaccctgctttctatgaacaactttccaagaataataataaaaacatttttatttggaagaactataccacaaaataaaattttataaaattataatggtcattttcatgtagttaatcgattatagtttctttgattaatataatttcaaaagtcttcctttattattgtctagctttcttcttcccttaaacatgtaaaattgacacttggcactataaatgtataacgattgtttttcttttcaactgacttttgctttctttttccctttatatacatacacaaatttatctaatcaaaaccttgggttcaataaaaactaatatttttttttgacaattcaataaaaattaattactttttaatctaggtagcctagcttaagaaataagagagaataagaaccagtggtggtgctaagcaccctctatgtcatatcgttattggtaagacaccacttttaggtgttgtgctcgaaagaatacaaagaccaaaaaagttgtaatattttcagtgacggtgctagaaatgaattcacaatttcttacttaagtacaagcaaaaagacaataaataacatttccctaactccattacactaagaatataaacaaagatcacaaaggaatgtaattaattaaaatctgaacaaaagtcccttccatatatactgtcatataaataaatataagggaaggagacgatggggtggggcttcagctcagttagaagataataactaaacctaataaaggaaataaacaaaattgcagcccacaactcatacatatatgtccataataatataaattagaattaaaattatgaacaagggtgtatacaacaacaatacatacacatacatattagtagtgtgtgtagtactactactccttgtttcgggaggctctgtctttcctttgaccaccaagaatacgagaaatctgtagacctctactgaatgcttggttgaaaagcatacgagtttggaattccgacacgaatggaaaccacgccaagaacgcaaccggtgtgaacagaagcaaacccatcactatctcgaacccccgagctagagtccgaatcgatccccagaacccagctctgtggactacgggtttcagggcttgtgcaatctggaattttttttagcaaagccaagatttttacatattagtaaattttaatcttagaaaatgaaaacctaaaaaatcttaaggaagagtggatactgaccaaaagcattccccagccagtgggcatgaaagcaagaatacacacaagaatgtcttgaactgtcatgtgaggaagggcaataagagtgatgataatgcccacaaatgtcatgaatattaacccctttattagcctaaacatgagttggaaattcgcgctgaactttcgcctcccgacagacaccgtcttcaaattcaaatttaacaaaacaaagtatcagtatcgactggtaaattttatattattaatatgttgagaaacgaaattttagtaacacaagaaatgaagaaattactcaccttcattacaaacaaaattacaaatatcaccagccacgaaatgccatatacctgtcaataaacgagttgtaaataatgtcagtgtaattttttgtttctcaataatataatttcgttgaagggatggactaaaagaagttaacaaatgcagtgaaagataacaacaattaattattatggctaactaaaaacggtactaacattagattgggaagataacttaatagggcttctaaataaagcaaaagaaagagatgacgagggagagaaagaattaccaggaaacttttgttggatgaaatggtcaagtgatatacaaggccatactgataaataaagaatcgaatggctaacagtatctcgactactataccccggataccagaatgacggagatgctcttgctcctcctcccaccatgattcccaactcttttcaggcggaacaccaatacctcctctgttgcttatccacttattccaatcagtccaatcatcgacaatcttttgccactcaaaaccagaaggattgaataggaaaggtgcgaaaagccaggtgccaaccataaaccacatagatatagtgattaaaacatacgcaacatcacttctgtacggctggccaaatatttggtacacaatcaacaaaatcatgagctctagacccttcacgaaatggctgcgggagtagagcctatagttgtcagcaaacttggcatggaacacgacgaatcctcgacctgtagacctatatttagcacctccgtgtagtagagtccttccgtaatagtgggtttttgttccgagtgagaatgtgaagaacacaggggctaattgcagttgcatcaatacaaattcacttagtgcggtccggaaacctctttcgagaccaatttccattaacataggtaaggccatcaagaaaccaatttgaacaaaagattgagaagcaagagcaacttgaaggggcttgttatctcgtacacctggttgagtacttaaaccctcttcaagaccactaagaacaagatagagccgaccgtagagaaacacatacacagtaagcacagttacctggtaaagcaagacacatcatagggtcagttaaataataaatttcaatgtcaactagaaagtgttaagttatgaaataaataccaaagtactgaagtagaaaccaattgttgtgaaataacatgaacacatccggaaaaaatcaaaacggtgtccaagacgataaatatctcgactgactgtctgctctccatttccattagccactttcgcttcaaacatggaaatctggttgagacccacatctctccctttccctacttgtatgtactcatgatgagtgacatttccctcacgtaacgtagagttgaatcctgtataataatatttacagtagtatgaggaagatcaagacatttttctttatctaaaataagataagacagatcaaatcgaaaaaagaaaacataggaacttttgattcactgaatatgttttgtaccagcaaatatgtcttcactcagattgataacctttgacgctttactgacacctcctctagtaaggtgaaagagcctatcaaacacatccggatgaccatagtggaaacgaaccctgtatgagcagaatcaaaggacgcatgtttactaaaagcaggaagagaaaatacccacgaaaactcactagaacttttaagccaagtatagattaaattttcatacaataagataacacactgttttagcaaacttaacagaacacaccaaaacatcaaagaattacatgatacacatctgatctgtactgcaattcttagtccacatcacatcggaaattaatggtaaaataccaacaattacgatttcaaattagagaagattaacttacttcagtgggttagccaacaatctctgaccaattgtaacaaaactggtctcctgatttgacatgaaccaagctagagaagaaacactacaccacacagcagaacaattagaatgactatcctcgtaaactattatatcaaaaacaaactgtgtcacacaacctacctgccagtaaatatatgttccctaagtccaagaattgaaggaaacctcacaccatcatgcttcttaagaaattcttccagcaaattcctcatttttaaagcttcttccatgtagttatcctgcaatttagacccatttcaggaccagcactgaaagtatgctacaaatgacctcagagaagtagaaataaatttacctggttcatgtctatcgtttgcaaaccttccccacgagtgaaaataatggcatgattctggttttctggctttccctcacccaagattgcaggtcctggaagtcttattttatatataatctgtatgaagacaataattttaagtgagtgaaaaacataaaaaaataaactccatagaacctattattaatagcaagcattgcaccacacttatgtcttttctacactagtgacccttacctgatctagattttgaatcggttcctgtgaatcaatagactttgttgggaaagcagcttttacaagagttgaataataaagttttgggtttgttcttgaacttgatctgtctaagctaggttgctcaacctcatcaatgtatgccacacggagtgatggatatctgaagcatggaaacacataccgataaacttttgtgcaagatgaagcatcaagaatcaagaattttaagcttgaaaacatacgctgtcatcagcctcaaaatgtcctgtgcacgagcatcaccagatcgtttgtgaataccatacagttggcaagatacaacatatgtgaatttcatatcagctactgcctgacattgcgcccacagagatctttcccctttctgttgatcctctgaattcaactccacagccttatatccctccattaaatctgaagagaaggaaagtaacatccttagcaaacaatctattaggaatctttaatttatagtgattaagtattgcaaagaaagatgcatttgtattaaaataaataaagagagaattgataccccgatcttcagccatatcaagaaaagcctgaagctccaatgctttccggtagtacatcatacccctcactgacattaatacataaacattagtaaatgctatcaagaaagtgtgaatatggaatatactatcagtgtcataagtaacatttagagaatacatatacatacagaaaagaagacatgtctgtagaatgtacctgttctagtcaaggtctggcctctgtatgaagcccaaagacggagtttttcttcgtgttcatcagataattttagctgctcctcgttgtggcaatcgactcgctcaaggaagttttcccattcatctggacaatttattccactgattcagtcaaacaaatacaaaatgaagggcagtttaatatgaataaaaaaaggaaaaagaaataaaacctgggaagatcttttgcaagtaaaagagaattgagacaccatcttcatttggctcttccaaatcacgcaaggagaaaagaacctcctctgtatagtaaggagtcaacaccctacaaacaaagtcaattcatcagaaaagattttgtaatttgaaaaggaaaagatgccagcatagagcatacaactagataatagccagtaatattgtcataattgccatccatagtgcatttgtatcatatgcctccagaaaataggctacgagaactttgaaatttattccagattgaaagtttgactatgatgcagctgttagaagataataaatggctatagaagagtaagactactacaataacaattattgttcagataagggcaactgggctaagtacactatgtttcatttaaaggggaatgcaacgagaaatggctaataaattagattagaaagcttacgagaaagaaagcatattgcgaactttaggggcatcaggcatatccataaacaatgaatttgagaaaaaggacattcttcttcttgcttccaaattggatggcacatccatggcagattcctttgtcgtaagcaatagatacagccgctttatctgtgtatagttttacatagaacagaaatcttaggaattattcaacaacaatttttgtaacgttgtatctaactttgcacaccttttccttccactgctctgtcagatcgataggaaaattaatagctccagcagatgcaaataactgatattgttgatccagtgggatcgatccctcaaagcctgatccaccgtggattgaatccaccaaactgctcaacaaaagattagaaaatcattaccaaataaaaaagagatatcatacaagtgcgtgagctatagagaagaaaaatacagcaccttgatagttgatcctccatcattatatctctggtcacagtctctaacatgtcctggaaaacaagcacaactttgttgctatcgtctgccttattttccaactgcaaaatgagaacttgcattatgaccctccaaaaagttattgtggaattgactgagaatatgaatatatctacatatacaggacattcaaaacttaccataaattcaataagcttaacaaagtgcccatagagtgtagggagggaactcatcttgaattcagtaagtagatcaccatctgctacatgcttgtcaaccacattgaatatatgctcaacaacactggaaagttaatcaaggaggttagtaaataatgcgaatgatctcaatataggatggccctcgcacactctcaggctgacactaaaagaaataccagggaggttacagttcttaaacaataggttaacttactctgtttcacgtttcccttgaaccaatttcttaataatgtttctgaatgaagcatagcattcacaaacagcacaagacatgtaactgtcagccccaattctcttttttagatctttatcttttccattgctgtccttggccatgtccaatgctattggaatctagtgagcatattaacaataagaaacagacatgatgaattgagtattcaaaattttattggtaagtatgttgaaacaaaccttgctggcaagtaaaaatggaggccactgtataagatccaaatcacggtcagcccagtaaggaaccagcaaaaggtccatttccctgttgtatacaaaaaaattaggcatgtgtaataaggaaaacaccaccaacattaagcaaccacagtatgtcatgcaggataaactcattctgactacctacctgttacttataaggtcttcctctctaaagctacttatgattttgttccatagctgagcaaactttgctgcccccttctcttggtttgatgggatcttcattgtaaataaacaaacaaaaaatgacatcatttcaaaggggaaggaaaaaaagcctaaatatactcgacagaaaaggtcctgtatgtaaacctcagcaaatttgcgagagagagttgctctcagccctttcttctttggctcattcttttccaccggaaccaagcgggcgttaaaagcaccaggaagggactcaaaacgagatctaagcattcccagtgttcgaatctggaaccaaatttgaagcaacaataagccacattatgccttgaagataacttactacataaagatcccacatattccatattgagaaagcttgaaaattccgtaacacagaacattaaatctatattctgtcaagtatatctaaaacgaagaggcaaaatgaagaaatcttcacaccaagcatttttttttggtgtgtgtgtgggaataggactgcatcgctattcagatggaaacacaagagaaattggaactaacaaaggtaaactcaaatggtatgagaggaggggtatgtgcgagttaggggaaggtgttcattcaattcccatatgcatcaaaaaaagaaaacaaatacataagaaattggaaggatctcttcacttaatcaagaaaactagagcaaaagagcatgcttagccaagttatggtcgcaatgttaaaattgcaaccaagatgagagattattgctaagcaacatttacgtagtggcatcaaagaaaacccaccaagtagcgattacagctatcatgaaaaagagcaacaaaaataagagactacatcaaaattcataagaatgtcttacctctccaagtcggcggaatgcaccatatataccaccgaataacgttgagaagattgcataccaaatctgggtatccataaaatagacctgcaaaattttgctatgtcagaaatctaatcatgaaggttgacgtgataagaaaaatatatatagggagagcagaaaacatacaagaataattggagcccatagtgcaacaacaacaccaatattatttttggctgcacaaaaggtgagaccaaatcagtatcacttttttttttgctaagacaaatcaacatatcacttgatcataggaactgcattgttttatatatagataagaactaaagcataagaacttcatatattcatatataaacccattacc

SEQ ID NO: 243460 - DNA, 3529 bp, Cannabis indica
caactaacgctgacaaccactttagaaacccaaaccgtaaatttagaaaaaaaaaaaaaattaaagaaatagtatatcgagtagttcccctttttttaaaacataaaataaaaaaattaagtattcaagattatgggatcgtggtgccccaactcatgggctgtttatttttttttttttgtagagtcgcgactctacacataagtgccttagcaggacaaggctccttgaaacttgtacttacttttcaaggccaaggttcctaggtgtggcgttgtggctactttgtttcctcaacatctttttagggcaaggctccttttgtggggtcacggctccattttttttatataatttttaacattttcacggtttaaactaattacaaaacaaaattaaaatgtaaactataactaaaagaaattataatttgttcataaactaaagagaacttcactaaaaaaatggcaataaataattgggatgccccctaatagtgctgttgttattttttagcatttatgaattaatccctttaatgattggataaatggtgtttgatgtaattaaaaatttatttaaaaaaacaaacaacactttctcatcatcccaagtaaacatctaacaacaatacaatatgagggtgttacctattgcttgaatgtggcttcaaaagtggctccaacaacacacattcaatctttcttgtcctttttagcccaaaactatttcaaagcgaagctatgcaatagaagaaattttaactccaaagcataactactgagtagagtccaatccatatacgaatcagatttccatgcatctcttacagcagctctccacataaaattggctccaaaatgtttaacttccatgttacatacatatatcatcacagagcccaacatgtcagcaaccgaaagaactaaatcaaatgtgagtcaccgacctgactaaaagtgcgtttttcctggcctcgaaatgtccaacttcattttcagtaggtgaatgagtctagcaatcaccggagttggtcacttttgaaaccttgccttgtaatgatcaagagtaacatactccaccgacacaacgcggtcatcaaacatccgcccatgcaaacaatgtgctgccatgcaagcagcctctgttcttccaaactccacaattacacaacccacctcaaatatgcttccgagatcaaaatctcgttccttgacaacatccttctctgtagcatctgtttctgttttcatactaccgtccaattcagcagcatttcctagtttactgctatcagcatcttccatatttgagccatctttgggattcggtttgttttctgaatcatcagcatccatcgggacagcgcaagcaatcttgtcatcgtgatgttccactggcacatcactctgaggctgaactgtttgaggcagttcttcatgtaaaatgttatctggtttattatcatcagtaccgatatcattgtcctcatagttgttatcgtctgtaactccctcttccttgtgttctttcactctgtcttccttatgttctttcaatccatcttccttatgttctttaacatcactttcaaactctacttcatcaattcgactcagcttatcatccacatgctcaaacaaattttctgcttctgtgtctttatcctcacacactgatttttgttcaactccgcctgcttgttcattgctataaagttcagatgcttctgttccggtggtctgactactgccttgcctgataacattaacagacttgacactgccaaacctacatacaaataagataaagagttacttaaaagtatttttcgagttcactagaacagaaaatactgaaaaattctggtaccttgcacactccaatcgaacatcttcaatcacttcttcaatcaatggttctgagagtaaggagaaatcctctacattgaactgattttcaatgaaaacataaataaaggaagaacacagaaagatctgtcagtgacaacatcattcttcttcccctcttttttagtcagaaaaatatattaattgggaggttggtaaatacagaaaagatactacatttcataaaactatagtgcagtgaagtgaccataccacatttttaagctttataacttgcgtaggttctttcagaagtggctttgcaaattctggaatctcatacaacgacgaattctcagtattttcctgggaaatatttttcgtttggtaaggaaacaagtcatcaaggtaagtaaaaatcaacacgcataataattttctagaaccattagtgtacgaccctggtatcaactaagaggaacaagagagcgatggtataccatggatgctccagcatgaagtgcctgaacaacagtcaatactttccctcccaatttcataccattcaggccagcacaggcttttagagtaactgatcgatctacatactgataaagagtataaagctcagaaagtatcaaagcttatgttgtaaaagcgagaaaataagataacactataaatttggtttgatgcaagaaaatgattaaacagctcaaactttatgaaatataagtagagaatctagtctacacacatatccaactatgacaatgggattgcccaaagcatattattactcattattaattggtctaaagaggccatttaccattgaaactatttccgggatcccaaaccattatgacaatagtaccactaaatcgatattgtagtgcctaaaaattttttactagaaacaaatgtgagtcacaagtatgtttttataccatacctctagaaatgcacaagattcgtctagattgtcattggcctcaaaatagtatgccttaagagatccaaacacgctaacgatctccatgagctacaaaagaagcacaaaaggataaagtcacaatacggagagatgagacaagtaacaaaaagcaattagaagaaaaccatgtgtgggaatggaaggaatcaaggaaatgtgctacaattgaagccatacttaccatttttgatgaaagaacctttgaaattccaccaatgaagatctgcaagaacacaagcatataaaagaaagaagaaaaagagggagagggagagagagaaagaagaaaaaaaactacatatgaaccaaagcaagcaacgtaagtattgaatagaaagtcaaacagagaaatttaaagaaaaagaaaaatctaatagttgctcaaacatatacataaagttcaagatcacaactaacggaacagcatgctatcttaaccgatgttaaaaatataactatgtacaataatgccaatgaataaccaatcaagaagtccttcctagggagcttagagaaaacattgaccaagcgtaaaagctaaaaaagtgtatgtgtgcggcacacatggacacacttatagagatgagaacatataattgaatcttatcttatacttgataaagaggttccactgatgtcatcatttatcatccgaaactatttaatcttttatgtatcattt

SEQ ID NO: 243461 - DNA, 3244 bp, Cannabis indica
ttttttttcttttctttttacaaataataatatatgcgtcagataatttataattataacctaaatataaaattagctcagtacttatcgatggataatgtttttatttcccaatattttagagcttgaaaagacagaaagatataatgatacactctagacctactttgtaataatatttaataagttaacttttttttaactattaatcaattgagacttaagatatgtatattgtacccagtcagagtagcatatagtaactagtaactactatatataaacatatatatgttgtcaaaaagtgttaaaatttgaattagtttcgttggctgccttaaaaagaatatgatgtatatgaataatacttcagcggtgaagtaattagatcaattatgaaaataaaataataaaattaaagacagatttattgaagagggagtttaaagcagacggccggatgatatatatgcgtatatgaatatgtgtatgtgtgtatagatatataaaaagtataagttaaggaaggatggggatgtataattagaagaaataaaaatggttgacattattgtaattattaattaattaagaaatgaggaaaggggctaagcaaagcaggtgaagagatgactataatgattccatatccatcgccatctatcacatggagacctcagtttggtcggctgtttaggcccttaaaataatgttaatggccgatgcaaattataataattaattaaaattatttatatatatattaaataaagtttgaatggttattcgattgggactcttccctcgaggacaaagaacgatgcaacaatctcaagccacttcgagagggaaaagcggcttcacagagagagaagagagaacatgcaacatattatgctagattcgaagcaataggtgctcatcacatggaactttaattaaaccaatttttattttattaattgtttttttgcacgatatttagtgtggtccatatgtgttgtccccatttaattgtattagctttgctaataccaaatatatatttttttaattagctagctgaagataatggggttttgattagtttaataaaagaggataatgaggtgattaagataagcatcaatatgttgttgttgttgtcgcacttgtaccaaagctttttatttcttttttccttctttcatttctctctagagccaagattatgtctttctcaaagaacggagacttaatttaatttcacaagtatactttacaaatttcaaaagctaattaatcaatcaactttttagtttggctttatgatatagcttatttcttttgatgattatatgattaataaactatatacatatatatacgtaaacgccgtgagaacaacgctgtttggacttttgttgagaactaagacttaattgttatcttggtcgtggagccaactaatcatccaattagtgccttaactgttatatatattctactagctaattcaatattatattttttgggcattaccaactgattatcgagtaaatgtaaagcacattaatatacggcagaccaaattaaacttatacttggcaacatataattctaataagtgtacaatttgtcatgagaaaaaaaaaagcaaccaatatgcattatgaattgtctataggggcgtaaagtgtttaatgttgtaaaggtacttatatatgcatgccacatcaaaatcaatcacttcttatatatatatataaagataattttaatattttatgtaattcaatatatgcatatatgtaagtgttaaacacatatggtgataatcatacatatatatatagagattattatttttggtattgaaaaagagaaaaagtagtaaagaaggatcaagtagtggggatgtaactgttagctaaaaaggtgtttggtgatgaaggcgactttggatttcagtacctaggaaaagagtagttggtgcttggtgggcgccagcaccgttgactgcctctacaaaacgatgtttttattaatttcttgttttatataaatatataaaatactcctttatattttaataaagaatattgcgaaggaactcttacgattaatgagtggctgtggagcatgcttcaaaaattgacaagctagtaatgttttaacactacatgacatgtcatgtactgttatgatcaagtccaatttaatataatgtgtatagcaatagcataaatgtgtacatatgctttctcacttaatcggttgcttacagatggagagagagagagagagattaggaatggtatacgctgtcttaccactaaattttatctaatcttcttgtctttatcattgattaatatatatgtatacttgtttattaatgtgtgtgagatagagagagagagagagtcaagataatttaaaaactaaaaaataaaaagatggatcaataaggtgtgagagagctaacgtgcagaggagaagaaggcggagcggttgtcccggattggacccccttccttctcgttaagattcttcaatattaattcttagtccaatcacaaaactcatctgtttgtgatctataattctttattatattattctctctctctgccatgctaacatcgtctttcccattcccatatactcgttcatgaatgaattcaatcgaaccagcttggaaaaatgataataatattaataataagctaatctatatatgagccttaatgaagggctacaatgacggaccgcaacacatttattcataaagagtaccgtgccacttgtgtacgtatatatatgatcgatatatcttgttattgattcatcataaatgtaggtgtatataatatataatatagtactatattcgctcatggtaaatatatttatatagtaaaaccacatcatgaagaaaagtacggctcgatatcggtttttactatatatagatcagaagtactaagaaagagctagttttgattggtaatttaatgtttgaggaaattaaaatttaatatattaatttcgatgtgatgtgagtcattgatctcggtgtttgttttgtttggtgacaatctgtatatgtaatataattattttttatttttcttaattgttggaagaatgaatagttaaatgaatttgattgtcgtggtatagtataatcattataatatatgtagttactaaataaattaaagataagatgttgaatgttatgtactactaatactgcaga

SEQ ID NO: 243462 - DNA, 4598 bp, Cannabis indica
tgacatttgtataattttatgttatttttatgttaggagcaatgatcgagagcaaatgactatcacgaggtttcacaactagaaaattagattttatcttcagttattagactagtttattaattctgttaaaaaaatcttgctaccgaagactattaaggtaaaaacataggtcccaaaaacattgaagacgtatgaggggcctatctcttcagttgttacaaaataatcaaagacataggtggagtcgaagatggaaatcgagtgagtaaataccctacgtcttcgatctttctacctatgtcttcaattattttgtaataaccgaagatgtagtttcagtaactcattggaaccacccaccgaccttttcaaatgccctacattcaataatttatattagattcaattaattagtataaatttaataaaattcaacttgaaaaggaaaatcgaaaagtatctttgtagcgtttatgtccttttaaaggatccaaaatgaataatcttccctgcacaaacgttctcaagcattcaatgtttcctaagaaatcaataagaaagtattatgttttaattttaaaaaaatgaaattaaattttaaatagtccttagatagtacgtagttgtacttacccgacattccaagaagtgaagaacatctaagatttatgattcattgcactcaaccattctaccaatttgtcaacaaattttttgcttatttttgtcgttgttggtgttgagaggctctaggtcaaagaacttgaaatactctcctttattcgttaaatcctcgatatcatttcttttggatcaaatcacagtcaacttaaattccttccccgatatcattttttctgtattcatcattgtccatgtcaatgtcatgatgaacatcctaaatttgttcattgacctgttgtccaacaatgaaacaataatgacttaaatgatcatttttaccattatttttattctctacaaactttcattttggcgtcgataaaataatagaccatttaccattatctggatctggtatgtaaaatacttgcactgcttggtacgtagccatgacgaggatcgttcttgcttcctttcttatttagatcaatcaaagtaaattcaaactcgtcagtcctaattccaacattgacgtctacctattcatattttaaaagggcaattcagaacaatgtataatctagctcttatatttcatccatcatgccataatatgtcatggcaccttaaacaatgttattatcctttgaagtagcaaaatttatagactttgtggctatacatacgggaatattctcaaccattgcaatgtggtctataaaatagctacaaaaacgatttgtgccagacttagagaggttcttccgagtattatttcatagaaccaaagtggctttgtaaaaggaagaaaaatcgctcacaaagccactttggtttgtgtgtggctatgaacgaaaaggtgctaaatttgcttgccttttcaaaattgatctccaaaaagcttacgatactattgattgagaatttatcctgaaaataatggaggccttgaattttcaagataagttcattaatctgattatggtttgcatctccacacctagattttgtttcatgattaatggtactcctcatggataccttcaatcaaaaagaggattaaggcaaggagactcaatgtctcctctcttgtttgtgatgagtatggagtatctttccaaaatcttagataaaattaccaacatagcttatttcaatttccctatgagacgtcaaagactcaatgtcacacatatgtgtttagcggatggccttttactcttttgtaagagttattttaaagttgccatgttgttatttcttcaggggttgaagttgtttttggacaacttttgttcttggtgctaacaaaagaaaatcagaagcttctctaggaggtaagaattttgtggaggctgaaagaatcatagacttgtctggctttgctagaggttcgtttctttttatgtatcttggcatgaaaatttgtactaaaaagttgtcctttgcttacggtgagtgcttgatagaaaaaatgtctactagaattagaacatggagctctcaaaacttatcttatgctggaagaattgttcttattaattctgtccttaatgcttattggtctcaactaatcattatgccgaaaagaactataaagaaaattgttcatgttaaaatttaagataaggtgaatgaggttaattggcgatgagtggagtagctgtagcccatacattttatatatggtatttagtttcaacacattatcaatgtgagactctctaacagctcaaatttgttgtcccttcctttggacagaaaaggaggagtcttcagggctcgaaaaagtggcttggtcaggtctctgcaagcctacaaagcaaggaggtttaggcttcaaggatattgccttgtggaaattggtgctatagaaaaacatgtttgggttacttctttaaaaaaagataacttgtgggttaaatgggtaaactcggtatatgtaaaagataaagattggtgggagtatgagggatgcgagttggtattggaagaaggttgctcataccaaaaatctgttaaaaatagttttctctcatggaagttatgcaatatcagttttccattgttgttatttgtgtgaagcttgatcattcagatgataatctgcagggataaagtggaatcttgtaagcatttattttttgattgctgttatagtaagaaaattcttgaagctgttaattaaagattaacttggttttaagggtggtagtacttgaattcaggggctgcttaactgggtgaaaagttgaaatgaaaacaagatttaggcgcaaagtctatacttgtatggtggctgttacggtttattgtatttgcaaggcaagaatcgaagctctttggggccacaacaaggttccaatactgaagagagtgcgtaaaaacaatttgtaaataatagttttgctggcattggtgtttgtaattgattattgtttgaggaatataatttttctgatttaccacacaaaacaattgtaataaattatttaaaaatagataataaacttttattttataataaaaaatattacatcattaatactttttaaaatattgttataataaacataatacattaaaaattataatataaacataattataataattaaatattgatattaattaatataaacaaaattttgttagtatacaattttattcatttgtttaaattatatcgtttttttcttgaattttttaagtattatatattaatactattattatgaatgctaaattaataaacaaaaatataaaaaaaaaaaaataagaaacaagggtactcttatatttaatgaagcaacttttttataaattaatgactacatgtttacttcacttaattgattacaaaatatatgagatatattatagataaaaagatatatttatggtgaattatgtaattattaaataatttgaatttttttttgtaaatatatttttaaataaaaacccatcaaattatatgtgagtacgtacatttcaaaacaaaaaataataacaataaccagaattaaattatagttaaataatgcttcagttgggcagcggagtgatacataatttgcttcaaatgggattggaaagtagtgaggatcggtctggccatgttaaaccaataatatatcatatctataattaacttatattcattcatggttctaattgcttgtgatttcccataccatatgctttaatcagaaaacaatgattaaaagttgtaaaggtaacacttcaattacttggacttggtggaacatatatattcaagcccagtaacagaagataattaatgtaagatatatatttcttcatatatatatttggaataaaatcaaattgtatttcttaaagattaatgtatagacgagtcgtaccatttgctaaaagtgttattattttgtgtagtcttggttcccaagtgatgccaatttcagtcgaacgcaacataacttttaaaactatatatatgaattattgaaaatggattgactttcacaaagtgccacgtgaaacccaattttatattgagatgagtgttattcttatgatccgaaatagaaggcatgcatacaatcatcttatgatacactcccatggtgactataaataaaggaaagtcagggaatgaaaaatcacagtcagtactcataataaaccctaaagcgaagaacatagagaaagttgtctcaaatggctcaatatagcccacatctcattgttgtagccctcttgggactactccaaataatggttgctgcagctccaactccttatccaacaccagaaattccttatcctccaacaataccaactgctccaacaccaacaacaccttctccaacactcccaacaccatcacctcctactacttcaccaccagtaacaccatccccaaaagctccaaaaccatcaccttctactccgaaacccccaaaaccaacaccttctccaaaacc

SEQ ID NO: 243463 - DNA, 2833 bp, Cannabis indica
aaaaaaaatagaaagggttacgtattagccatgcaatatatggttagaaagataaggttcatgaattagaaaccaatattaataaaattaattaattaataataatataaaaaaaaattggtacgtactctttttcacgcatttctcagcatgtaaactttgacttccaacaactacagaagactatattattctaattaatataatttatttatattatctaatagaattaaagatatttatgtaaaaataattgtacattcatcacgtgataattatgcaaaaaataaattaaagaaagattaaaatacaactggttaataaattaagtgaaaaaaagatatatataacaaaaacaataataataataatatatgtacaaaatcacttagagtacaaaataagaagaagaaattaaaactctctaactagagacataaaataagataatagatacatatataaatatataattatagaggtagagatgatgataattaagatgatgaagaagatgatctgatcatgataatggaaattagattttgaaaagtgagttcttcacaaggaatagttaaacccatatgatggttaaatccaaactcttcttcagctctttgaagtagggtttgaaactcaggttgagttagccaccaaattggtatgatatatcttcttctattttcaccaacataaacagcaaaatgcccttttggaacatcatttggaatatcattaccatcattattattattataaaaccctaacacttcctcttcttcttcttcatcaataatattaatattattcttcttcccaaaacttgaacacctttttatgatttgcttgatcatcacagccctttgaggtagcttcttcatagccatataataataataataataataataataataataataatattatgtagtgtttttttgggagagaaatttagagtactatatataatagtgaagattgaaacaagtattattattaatttatagggagaaataagaagaagttgaattaattaattaattaatagttatttgaaaaaacaaaatcatgtgggttgtggggtccaaaagaacagaccacaaatattgtctcttgaggcaactttgtacacaagcccatgcagtgtagttttactactactacttcgaaccaggttaaggttaagccctaccatgtaccttgtcctaacaacaacatgggacccctttaatttaattttgtagtattaggcgccttattaattatgagcagtactttgtgagtgattaacagttttctatgtttgatcgttaaatttgggttgacatttgatggtatgtagttttgcacactattaagatcatgtttggttaagtttctgattttaagtttttaggaagcttttattgagaaaaatactaaaactaattaatgttgtaaaaaagtttttttaaaaactcagtcaaccaagacttaatacatataacaatttaatatatcttaataagtctaatacgttatgaagtgagactttattaattagtaatttttaatattatttattaaattaaaatatataaaatttaaaattgaattgtataaatttaataatagtataacacctcattgactacattaatggtgtaagaatactaaatattaattattacttacaccaataatattatgccatgtatgagtacatggagtactttagcaatttcattttaataatattaattaatactttgtgttctatatattttccaagtatatatgaatcgtattttgtcagtacatgatgtactacgtatatatagtatgagctttttttaatattagatttagattttagatatagataggggatagggtgaatatggaagtatacataataatataatatatataaatataaacagacaaattggttagttgttcaatgaaaaacgtacgcttttaaatatatatatatatttatatgatatccatataattatgacgtcatatttaattgcatgttcgtcataccatgtgttatttggaatatccaacagaatatatgaaacttttgctttttctttcttaacagattaagaaaaattatttaactaaaaaaatcaaatttttttaagagattaataagaataattatttactagaaaaatctcaatttcattaaaaaatctgctgtaagtttttttttttattatttttttgtttacaatgaaaatttctaacgataaacattatactaatttcaacttattattatttattattagataaattgaattctgtattttgtaaaagttattatttagactatttattttattaaataataaatggagcataaattttttaaaataataaaaaataggaccttgaactcaatttttaacaattttatattttaatataaccaactttaagataatttctaacataaacagatacatgtaactaattttgtcataacatctctagatcagattattattaagttttattttaataaaaaattattttaaggtcttatttatataattttaaaaaaatacaagattcattttattatttaataaaacagaatgttcaatgaataatttttataaaactgaagatgtaaaatggtatttaatctttattattatgtttaacattttgtgtacaaattaaatagtattgtcttggtcttccatacataatatctataaatcaatctgtaacttaaactcaacagtcaacaccaaaaaagttttttattatccattggattctcttaattttcaatatatataaataaataaatatatataatattttg

SEQ ID NO: 243464 - DNA, 5378 bp, Cannabis indica
gttaatgtagtaataataggaccggaccattctttttgagatcatcctcagaattttacaagtcctccacagcactacaaatagaattgattttattggcactctttgttaaatacaaaatgacacactaacaaggaaaaatagaaaaaataatttctccaccttatactttattattcattagttttatcatttaatcattaaattatatttttctacatccatattttgttcgccaatgcttacatttgcatatttttaagttgcttacattttgaataattttgagttctaaaaataaaaacttgatgttatgttggaagatatttgggttaagaaataacattttaccgtttaaatttataaagatgttttgttatatacattattatatttgtaaataaataaataattaattaaaaagaggagagagaaaaaagagtgccaagaactgtcagtttaaaaaatacaaaaataactcaatctttcaaaagctgttataacaatatttacataaccaacaagtagggatttgaatataaagccttcacgagcgactgtgcttttctcttttattgaaaaataataacaaaatagaatagtgattgtccccaaaaagtaaatgcagggcaactacagtagcgtaaaatgtagtttgacaaaatagcaaacgaaataccaaacataagtaaaaatgtctgccacaatacttattaatttactatcatactaataaaataatactaataagcatactaacaagatgtaaagtcaattaattctgaaacttactgctgctactatggacttcttttaaaccaccctcagtaagtgaactcccaacttcagcactttcccttggggatgacgaaaattgatgctttccatcagaaactttgacagaactcttttgttttcttgctcttcttcgtcgttcagaaggcaaaaaaccatccccagtaattccctcattagcaaggcctcctgtaataaaagagacaattataacagttctaaagtgcatcccaactctcatcttaaaaaaacaaaatccaccttgtccaactttggcctgattatctctgctcatttgagtacaaagagcggtaggtgatgtagaatggtgaggcgtgaggacatcctctgacttgcttgccaagtgctcctaaaagaggaaaaattcattaggtttttcataaagctacacgatcctctttaaaagtacattttttccaaatttaagggaacccaaatgctttttaaataatctccaatatcaaattcaatatcttgctcttcattaaatattataagaaagagtaagagagtgaataaaacacagcattcgcaaccaaaaaatgcttacctgcattgaaggtttagattgctcacttgcatctaaatcaacagaatcaaatttcaagcttgcatcatgcattgcctcttccactttctcatgatatgtttcttttttatgttgctcggcaaggtgcctctgtttagcttcattctccattcgtctttggaactccaaagtttcttcaagctttctttcctctgcttcaagttcaattcttcgtctgagttcctcttcctgctgctttaagctatcaccatccacagaaacaatgacctcagaagttggatgatcagcatcatatgcaacctcacatgcaaccggtaagggactgcatgcagcaagagacaatttacatacattaaaatgaatgttcctcgtcataagaggaagaccaataaaatacttcataccaactagagagcaattaactaaagagttgaactgatttgaacagtgagaaaaagacacgtacactgggttatcaatctcatcatcatgtatccgtggctctgaaacaccagtaacctgtggaagaaagaaaaaaaaaccaatgggtgagcttcacacttattgtgatgcttatttctacacatttacagccaccacctaaaaatatcacatcagacaataaaaacctttgaatgtttggctttcctagattccttgttctttttcttatcctttgttttctcctgagtgtgtcttgaattatcatttccccccctgacaaccttcttagagtcatcaagagcaagttctgctaaaaatgcttctcttgcagcatcagatttttctgtggcatccttctgagctaatttctccaaatgtgcctgtaagaatagaatagaagccaagatacagtcaagaaataactggtgaagaataatgcaaaatttcaactcaatgaatacaaaccctcaggtacgacttcacaagaggcaataatattgagtgataatcatggacagcaatagagccaagcttaagtttcaactgctccatgatattaacgtttcgcattaactttgcatcagttttgctaagctgcatgacaaagaaaacaaaacttataagtgcctgttctcaactaatgaaagcacatcaaaattaaaaaacactaacctctacttgtatatgttctttgtgtcttcggattgaagcttctatacaactctccactcggagcaaatagtcttcaccagattccaaatcacataactgagatgtcaaaccagaatatgtttcctcatagccaaattcattgacattcggagcttctacttcttttataatgtttaatatagcatctaattcaaatcggcttctgagcgtcaatccatcattgtcactctccagctcctctctccgctgcttcaaaatagaatcgaaactttgatggacatagtctctagaatcattcctcttcctattttcttcagcacatagattttctactgcttgtaatgcttcttcatagcttaaatgctcacatttttgctcacagaggctctgtagttgataaaattccttctcaatcatctggagtatttccattccttcacttgctttttcttcttttacacgcatccatgatgctaattcttctccactagttggacctgcataaatccaggacagaaaagcactggtatcatttagatcactatcattcacattgctgaccactgcagaagctccagccgtagccttgcctgtggcatcatgatgactgctaacatgagtggattcatctgataacaaacattcatcaagaactacaaatgatgcatcttcactgagaacaagcagctccttaatctctagacatttactaccaatatttgcctcatccatgatactacttttctcagaatttctacctaaaccacaagaatgagataaatcctgtaagacattgaggattttctgaagctcggagactcccaaaaagcaaatgcacataggtgtttgcatcaccccattgttaagaagctggaatcctatgttcattttctgcaactcatcaaacgcaaattgtgtcacccatttaagatggcttgctgcaagacatttattcctgacaagcacctcaaacaaagcagatattctttcaagaagttttgcacgctcagagtcatcagatacaggccagctatcagcaatagaagagtgcgccatagacccattggcctcaggacattgtccagactctatgttggtaactttttcatggataccgctctcagcagcagaaatacaatgactatccttttgatttcccttctcagatgaagaatcccccatatttttccccaaactgcaatccttgacaaattcagaatctttacattttgtttgattttgaaccatttcaactgcagctgacacatccacaggtttccaagaacacttatgaagcatctcaatccattcattattaacctcttcaggcaacattgacctcaatttaggcaaaagacttgccacgtgctccttcgtaatgtgatgtaagtgcaaatcagaatcagcaaatctctcattacacctgcaacaaacccggacactccacttcctaccactattagtctcagtaaaagacaaggcttctaataaaacatcatttgccaagccatccttcaaccaagcaaaatgggacttaatatcaagaatcccaaccttaagtaagtctctcttcttatcaatactggtggtattccaaaatgacctgacaaaatctctgttttccgcacaagattgacttttccttgtattgcttgacttccgccgatcgccagttctctgaccagatgctggaagtgaatccaatcccttatcagtcttgtctccatcaatttccaactgaggcacctctgacttctgctgcaacaacctagccgcagcaactctaacttcaatctccttcctccgctcttcttgtgtcttggtggccttcttaatctcattgggcctcctagctggaggcaatctcccctccattgggtcctccgtcattctccttattggaatcagccgaaatttatcatccccatttcccaaattcttcatccaggacgatatagaggcaatattagacttttgtatcagctgtcttatctcattctgcacattaccaattcgagcttctggcgttgatagcttttcttggctgtcctcctgcgagctctccttagcaggatcgacagggttttcaattgccagcaaacgctcacattcccgcacaacctcctcatactcctttgcttcattggccgattcaaacatcaagttggcgtaaaaatgcccgaactcaatcgagtttggagacaactcaactgctctacgagcagattcaattgcacgcctcagatgccgatacttgacgttttggtcttcaataacggaggccatcttgctacatacagtactttgaactctgtaaacaatcgccaaatgagccgacttttcgtaccgctgacatagttccttcgtcaaccttagagctttggtatggttcccgcgcctaagcgccatgagggctcggtcgcactcgagtctgacattagcttcagatgaagcgtccgattcaacggacttcggcgatacgatcttactctcagaaacaggattaggggtatcgggactcagggtaggctccagttcgtctggacttaaaccatcagcggttccggcggctccgtcgacaacctgcttagtcaccgccgccggtgaagccgccggcgattgtttaggacgcgccgcaagatttctcttcttgttccccattcttttaatctatgtatatatcaatccgattgattcacatgcatacgcctaaatacaaaaacgaataaacaaaatacaatcacaacgcacgcatatatcgttcgtacatttcttctatatacatatactcatacccgcatatagatatatagatatagagcgagacagtgtgtgtgtagtataacttacttgtaacagtgaatgaaaatgcgaggaggcgaatgaattggaatat

SEQ ID NO: 243465 - DNA, 3763 bp, Cannabis indica
tttacatggatatatgaccatataccacttctgagttcttattggactgtttgctttgtgtatgcaagttgtctctatgacagttgattattgttttactagaggagaaagtggagctttgagctggctagatatagaatttcttaggacttgtgctctctatgtgtatctaggctattttctaagatgagaacttacactcgttctctagagtatagactgtagtgatattatctagtctgttgtttataacttatattaaaatatttacatgggatattttttgtttaaattttgaattattgtggcaatgatacggttataaaagctatttaattatttctcttactttttagtttatgtttttaacttttgaaatattattgcaatggccagctgaaactgttatatacagaatattttactacataaatagatgtgggaccggtcatcttaccctcagggagctgaaacgtgggaacctgattgatgccatgcaacatgcagatgaagaagaggacatcaacaaagtgttgaggtaaatattctggataaggacttgtcgtagctgtgcgtggttattatattactggtatagaatagaaaccattttcatatcactagttttcacttctcacatgattatatgataagatttcattgcatgagtatgcttgcttgtaacatgatatcaggtttctaaaaatactaacatctttttgtcccgtgttattctttgacagatacttctcttatgagcatttttatgtcatatattgcaagttctgggagctggatacggaccatgattttttgatcgataaagaaaatcttatcagatatggtaaccatgcacttacctaccgtattgttgatcgaatattcacccaggtttgtgttgctgcgatgttttgtttttataattaccgttacatacaaaggattttttttttggtattcaataagaaagatatattttctgtcttccctctagtgctggtcagatttattatttagtttcagaattatttatcacctttcttttggctggcagatccccagaaagtttaccagtaaagttgaaggaaaaatgggctatgaagattttgtttacttcattctctcagaggaggataaatcatctgagcctagccttgagtattggtatgtctgcacccaaattttgtcttttttttttgttatgttgcttttggctggatcactctaattttaatattctttcatcttttcgtttcttggtcttcttataaatatgctacttttctgaggtagccttgccagcttacaagaaaaaaattatgctagaacagttgcctaagttcagagtaatagatgggtcaatcttataagtatcttggttttttactttctagaaggccaaaactaatgctattcctatttttcacacatcatggttatggatgtgacatgtctctttacttttatattaaattaacttagaggagggacatatagatacaagcaacatatgatctgattttataaatctgcaagcaacatatgttctgattttagtttggtaaaggactgttgatcagcttagcttagcagtactaatgaatgctttgctttctctatttatggtaattgctgtgcccttcagcttgcgtagttctgacattaattttcttgtaggttcaagtgcatagatttggatggaaatggaattttaacaagaaatgaactgcaattcttttacgaggagcaattgcatcggatggaatgtatggcacaagaacctgtcctttttgaggatatactatgccagataattgacatgataggacccgaggttttacgttttctatattagtcactacttttttttatataataaaaaaaatgtcttaatttgatggtttcagtggtggattaaactccctttcctgcattcaccattttcccctatccacttatttataatttctatccatttcttaagtggtgaatcaatgttgctagtacatatttctagctgactaagtttcattgaatttttatttcctcaagcgaattatgtgaatttttaaattcaggctaaggagagagtctgcaacttagtattctattaatgtttgaattaacctgttatccaccatatctgtagacagtatgcaaataaaccaatgagtattggcttggtacggtatatagtcgtgtatgttgagaatgctaaagaaagttatagccgtaatttgtctagtagaatgttttatgagaatgtcagttggtcatgtctagccatttcacccaacacatttttttttcttttctaaatcaattgtgttgagagagtttcatttgaggttgacattgagttcctttctcttgcagaatgagagctatattaccctccgtgacttaaaaggttgtaaactttccggaagtgttttcaatatcctcttcaaccttaataagtttatggcgtttgaaactcgtgatccgttcctcatccgtcaggtacatgatacacatcaactaattggaacaaattttttgtagaagtgatatcatttccattgttgattttgggtttgatggtgctgtgatatgaacaggaacgtgaaaatccaaccttgacagagtgggatcgctttgcacatagagaatatattaggctttcaatggaagaagatgttgaagatgcttccaatggaagtgcagaagtttgggacgaatcactcgaggctcccttctgatttcattaagtaagctaagctaattaagttgttttctgagtcaccatgtaaattgtctggccaaagtttggttgctcttattcattatgcaagtaaagaatgacccctttactcaggcaccgacagatacttgagagtccttcaaactgatatcattcatcacatttcccatacatgtgataaattaatgatggttaaatggtttcgactgtggcttttcattctattttttagctcttgggcgtcaataatttgataagagcactgtgcacatgataaacgtcagataaatatatataatctcagaacagctagattttcattttctctcatttgcactaaagaaaatcaagttttggtgcatgtattcacaacctatatatgcagttatgtttttagtttttcattcttgcatgctggtatgctgttgctaaacgcattacctatgaactcaaatgcgccatagatggatcacattcacatgttaatcttcacgagaaacaagttatttccttgtgttcattctctttatgactatagcaaatgattatatatatatccatgggaactccctttatttgtttttgttttgttgcaggccctgacaagaaattttttcttaattcaatctttaaactggccatccatccaagtccatagggatcagttactgaatgggcacacagtgtagagagagacctgaatctatcaaaaggggaaatctgggtttcgcagtgtgggaaaggcattgcgtaccacagcaataatattaataatttccagatattcgagtgcagttattgacacagcattgattgattacaatcaacagcccatttgcctgcctctcatacaaattagaaagttgcacgaggagtagctgtctgctgataggtgatcgatcaaacacagccagatttaaagtatttaagaacattcaattccttccccctctcaccttttcttttactttctcccaaatttaaccttcagttgtaagttatcagctatgttagtctctc

SEQ ID NO: 243466 - DNA, 1553 bp, Cannabis indica
tttattagaataattgtttaaaaatttccataataatcaaaaatttgtaaagtattactaatatacaatacaatactttatgaagtgttatttcacttgtcaattttttttttaatttatgtccgcacatctactcatccataaagtcaagaaaatcccaacatctatataaatagtctttctacaactaggtagatggtaaactcggccaccaaacttgagagatgtcacaattttgtaagagaatgagcgagagtattactactccatttctattagagttaattagattagttagtctgttaattagttgttaggaataaccggttcagttagttaagttggttagcttctcttcttaaccgattctatttttcattacctatatatttagctcatgtgtatttaacaaacataattcaataataaaatcaagacaaagtttcttgctttgtttctctcatatggtattagaagaattcttgcccactacttccatggcaagatcttcaactcgttcccaagatggtggtcctccatccacggtcgacactcaaatagctgacatcacatcccatcctcacgttgctcctaatctcaattcctcggttgttcctcacaaaaatcaatcttccaggccccaatctcagaataccttgaacccagaaatggttcattcacaaaatcaatccaccattgtcgatgatcacaagaccacatctcctctacaagccaatcgtctagtcaatgatgatcattccagtccttctttcttagcactagtgatcatcctggactcgtgctcgtgtctattgtcctcaatggcagcaactattaatcctcgaaaaaaggaatcaccatggctttggttgccaagaacaagattgccttcatcgacggttcccttcctcgtctagaaattggtaatctctatctcaattcttggcttcgatgcaacaatatgattatatcatggttagttaattctgtatcacatgaaatttctcaaagcattatgtattttgacttggccattgacatgtggaacggtcttgcttagcggtttaacgaaggcaatggccctcacatttacaaactaactcacccgtttacagcaaagtgaccaatttgtttgttcatacttaactaaaatgaaatccctttgggatgagttaaaggaattttaaccaatcaccacttgcactacttgtggtgcaatgaaaattttcttagattactatagccagaatcaagtgcttcaattcttgactagtttaaatgaatcttttgcatcggttcgagctcaaatcttgctcaatgaaccaatccccaatctatctcgtgtgtctgccatgatcatacaagaagagtgtcaaagatctcttggctctgctgaaacacttcccttggctgctgctacaaactccatgcctactaatcctccaagagccaagaaaccccgcccttcttgctctaattgtggcaaaccaagtcactgttggaatttattttaccaggatcttagatctactcacaagtatgttgtttaaaca

SEQ ID NO: 243467 - DNA, 1922 bp, Cannabis indica
tcaaaagaaaacgttaaacgacaacaaaacctaattattaataaacatgattaaaaattaaattataattaattaaagaaccctcttaacttggtgggttgttttttttttgaaagatggtgggttgttaaaagcgggaaaattttcaaattttgaatttcaaaataaattaattataaatagaaagaaaatatgatcgttgtaattattattattattattattattattatttttaaaaatatttattcaataattaaataatataaaaaacgtctttatagcttatgtttttcaaatccattttcatttttcattttcattttctttcgcattctcattttctctctctctagagaagaatcgtagtgaagtgaaggtacgaacttgttcatcgattttctcacagattctttcaattccttctatttttcttcaattgatcttctcccttttcagatttcagtagaaaccctaatttttaaatgggtcagatccagtattccgagaaatacttcgacgatacctatgagtacaggtacctttcttttctctttgatgttttaattttgattcgatctcaattttaatcggtttgtatgttcaatccaggcacgttgttcttcctccggaagtggccaaactccttcccaagaatcgtcttctttctgaggtattttccgtttgttttttgtaaaacctaagttttgatgttacattcttttgcccctttgattggttgatttgaatgaaaaggttgattttgattttgttcaatcgagtgatgtgtctgattttgtggtatttgtatgttagatcataaagtttagaaatgcgattgaacaatgtaattttaagggttagttaatttttagggcttatgtttcatgttctttcagttgtcttaattggtagatatatgggtttgggattaacgtgcgagtaattcaacgcattgtattggtttttatttttgagtacaaaactctggacttgaactatggagacattgttattgttcttaattgcttattggtttttgttttttgggtctaaatctctgaaggacttgaactatggaaacattgttattgttaatgttcttaattgattttctctatgtctcattttcagaacgaatggcgtgctattggggtgcagcagagtcgtgggtgggttcactatgccattcatcgccccgagccacacatcatgctcttcaggaggactctgaactatcaacagcaacaggagaaccaagcataagatctaagtaatcagatatcaatcaatatttgagtatctggaagtgaaattaaatacttgatacttggaactttgttatggattgttgtgagtagtggtagtacattggatgttatgatgtttacttgtactgtctatgcttcttagttctctcatttggagaatttaatgacaagctttttacctaccagaagtagtatggattcatgtgtctttttcatctgttgaaaaatcttgtgtttacctctggtgtacgtactacttagattttgtggattctaaggtccatttgtgtactatttatgttgtgtttcgttttgatttgatgggttttttcacatatattagaatgagtgtataattttaagttgttgggctttaggatatataatttgaattaatgtaggttaaatgttcacatcatataattctttttatcaaatttggtctggaggacttgtgttaatatatcagtacattaagttgtgtttttctatacactaaaaattgtcattttgggcattgtgtaattgtaattgggagtaatttgatagtaattatatagttttgtgtgttttattaattgcctaattacattccaattcttgaagataattgtccaagtacacactccatgttgcatctctcaaacatgt

SEQ ID NO: 243468 - DNA, 5414 bp, Cannabis indica
actgcaagccattcattcactattctgacccaggtgctggtccaacccacatcaattgtccatctattgaagttaatattgtcatgaagtcagaacatctcattctcaaattttgtcaaaggtttgtattggatagacaagaaatgagagaaggaaaaagataaagataaagatacctcttcatggtatggtgaggattccagcttatcaacaacatagcaaagtacattgccccagttgcaaaaacaaaatgaaaaaagccataaccatatggaacatcctcttccgaccgtgtttcctctttcctaagctgtataacctcttgttagccactgtttggtgggagataatgttataaagatgaaaagaatagagacaagagtactcagatatggtggaacaaaccttaaaacattgagaatcgatgcctgttgaaaatgttgcgataaccatagcaagaatggcaatgataaagctctgtatataaaagcaagagtcattgtcaattaggaggaaaaggaaaagagaaactgtagagctttaaggatgttaaggaaatcaaaacattactatgatagaaagccaatctgtttttcctgaagttgttgctctcctgatgcaattttcaccagctggttcactgcaatcaaaatcaataacaaatatctctttagaaactgaggactctattcctaaagttttttttgttctagagttatgtcaattgttctagcatcccttatacagaaagacaattgtttgactcgcaactaacaaagtttgatgagagatcactttcttgaaaaattgagtgtgacaataagagaagagaaacaaatcttgccttctaatggcacaccagcagatgaataccacatacagtcccatcagtcctggagtcaagataccagcattcacctgtttcatttttaaatattgagaattcaatcaataatgagaatttgagggtagaatacgatgatgatggttgtcgaatcttacttttggatggagagaaacactggtcataagttggagaagcaccaatgtccaggtaatgaagaagatgtttaggaggcaagatggttctggtgcataccaaatgtacatcataatgatcccaactagacacacaacatatgaagcagttgcaaataacataacatgtatttggctgcagtaaaaaccataatatgaattactcagcatatgaaaaaagaaatgaaaaagaaaaccataatatgtatttgaattaactaggcttacttaccatctttccgcatgcttctctgacagacaacaatcattaagccatgtaatgaaactgattatgcttatcagctgaattaggagaaataccctgaaaaaaattgatcaaaactactccacttaaaatcaagttattggcagcctcaactaacatgagtaatttctaattaaaatcggattaactaaagcatacccggcaccaaaatgtgcaatctcccctgcaccaagagaaaaagaaagaaaattgtattaacatcctctcattggaatgtgtccacaggagtaaaatgacatttcaagcttgtaaaaaaacaaaaggacaatactaaccatagaactgaataattggagaaggaagtaagaagggaattataagcaaagctgcccacaggacaattttggcagaccaccatccagattgccacacatctcggcggtcattcaactttgaggtaccaaccgtcgtaagaaacatggtgaaatagaatgtctactatgtcgttaaggtttgatttgattcagcaattggaaagaaagaaaaaaaaaagccaaaaaactacacaatttgagacaaacatagtaattttcttgtataaataatttcacaagaaaacaaatttaagttgatactggtaaaaaaggatacaaagcaactcaagctaactcgcaaaacgccatgagcacctaaacagtcatgttcatcgtcacatccttttagttctgaatacagaaaaatattgtatcagcagtacataaaagcctacacaaatgtagagttttgtttgagtcaaataataacattaattttgtctcaagttttggaaacgtacagcttaaatctcatagaagcgtattagttagttgttccactcaaagtcaaaatccaaaacttagctttgtctttcaagctttgcctagattcatttgtcaatttcaatcaacatgtttaatcacctatgaccattttaaacacacatacataagtttgagactttaattttttttttcacttctttcctcctctactgtaaagtggaacaatacacatatcttataaaaatactagttcaaaggtcaaaaaagactgaattctgttttcaaaccagataatgcaaaataggctcattgaacataacagaaaataaatgaaatatcaataaggaaaaagttcagggaaatcttactctccatttctggcagaaggattttgctgtaatcccttgcagcccaagccaaaaggttagctattaagaacataaaggcgtacacatatctggccatccaaggattagatgcattgcggaattggctaaaccaagaatcatatttcaaaacgactcgtggtggttcattgccatggttcactgtaccactctccattattgtaagactgaaaaaaaaaagaaaagaaaaactggtgcagcaaagattcaaagagaacccttttgttttcagattctctccacctctctgctcagtttcaagaatttcaactcaaaacatccatcggagaagatccaagaacagattacgcaagcccacattaatcaatgtaattgtcctcattattatatataacttctcttcccggatcgatctctacatggttaacaccaaaaattctcacttttgtcttggcactctgatttcacctgatcaacaaaaggtacaaactttactcaagtactgtttttcatctgggctatcttcacattttttatatgaataaaaaaaaatagaaacttttgaaacaaataaaactcatcccaagaatggaatggtttacgttagacgagagtaggtacgaaagagaaaaataacgtacactctacgacaataccgtatcgtatatagttaatgactgtattccccaactgaagaaaatggatctatttttttgaggattatttggaattgaaccattgcaaccaaaagcaatgatgatgataataataatagtaataataatgagcaaagatttaagcatgcacgccaccaatggagatttcagcctttcaggtgtgaatcttttgacgaaattgaacctcttttgattggacccacatgttaacaacacttttattttattatatttaatgcagcagaaatcaaaagaatccaaaatctcacagctttgttctatacttcttgaaatgcgtgtatgttcctcataccaaatttcttcaaaccaaagtgttctttctatactggaatatcttaggctcaattctatgacaattttgtctttcaaaaaccaagtattaaattatattttcaaacctaaaaaaagggtttttgaattggttgatgtaacacagagtggcaatttcggtattcgactcagatcactttataaagtcgagatttttggttggactgtggatatagtacagagcagaaaaggcatatataacaagaagacactatttacaagcaacaataagattctttatttaattggttttttgtttcttttctaatataaaataattggagagggaattgtttggttctttgtttggtagctgagaaaatgaagaagcaagtaagtaagaaaattgaataaaatctcatgtttaaactaaatcaatcaacactaatatgatgtatatgttttagcaaggtgacttcatttcacttatgacaaaaattgaatgccaagataatgacaactcgttttgtttttttccccttccccattttcggttaaaatcacagaataatataagcggtcatcttatgaatcaattcaatcaaataatcgcacaaagaaatcaataacagcattgagagacccaactcatcatcaaagaagaaaactttaaactcataggaaccccagaaaagaacttactgataaatatgcaaagactggaaaaatcttctctttatgtaatctcccagtcccagcagctgacaagggtcccaatctgttttttatatatcaaaacataatgcctaagatatgcaaatatatatatttagagagagagacacacacacacataaaaagaagagaaagaaggtatttttacgagtttctgtttccctttttaggtcttatacatcaaccaaaaatggttataagagagagagagattgctttctgaaggttttgctttggtgcctatactttctttctttctttattattatttttttttcttttcccgccgtataagcttttgctcttttctgttacaaccccgtatctttgaaggtattttttgcagccccaaaccaaacctaaaataaacattattatttattatatttacctcatgactctaactttgcatgtgaaacaatggaccccatctctgcttcttctcctacttcttaatcgatctctgctttggtcgtttttttttcacattaatacaaatttaataacactgaaagctgtgtagatatcatcagtcattaatgagtttaatatattatatatttaagtaaaaaataaaaggtggatggatcaaagagaacaaataactttgttaagaaaagaagaagaagcggtgttttgtttttttgtggtatgggattgattggtaaaaaagggagaatttcattgatgattgttattgattcagaatcacgccaactaattctttgatcactgcatgttttttctttttctcttttaatattttaatttgatatgatattaattattattttattcacttataaaacactagtggtactgcattagctatatcatttcatatcatattcggaataatcttctcaacatcacattcaaatcttacagttgcgtatactatgctaaaaaaaatattaaaaatatttagcattctttttaaataactataaaaatacacgtaaataatttatattctctccccttatatttgaataatattttttaattaagaaaaatagatattttgttataaagttcagatatttttttggttaggaaccggattctttttaatgacatgtgtgaattgaattgggtggtttttattactagcactgctatttattttctataatgaatattaaattaaataaaaatatataagatgtgatattaatttatatcaatagataaaaaagaaaaaaaggtaaaaaaaagaaaaagaaaaagtaaaagtaagtaagtagtactgtctcgt

SEQ ID NO: 243469 - DNA, 4858 bp, Cannabis indica
atatgaagcaaccacctgggtttaaggtggaaggaaaagagttgagttggtttacaaacttaatagatctttgtatgatttaaaacaatccctaagacaatggaataaaagattcgatacgtatatgcatcaaatcaaattcaaacaatctgtatacaatcactgcctttattttaagaatctagaggaatctaacgtcgtgttcttactgctctatgtggatgatatgctcatcatgggcaaagataaatcaatgatcaaaagtattaaaaccaagttcaagagagaatttgagatgaaagagcttggatcagtttaaaaaatacttagtatcgaagtctcacaaaaccgaaaggaaagaactattagtttgaagcagtccgggtacatcaagaagattatttagaaatttaacatggaagatgcaaagagtacattcgttcttttagggggacaactcattttttcaaaggaaaaatgtcctaacaacatgaaagagaaagaagagttgaaggatgtaacctatgctgtggttctcagatgcttaatgtacgtgatggtgagcatgagactggacatagctcacgctttaaacatcctaagcaggttcatgtccaatccgggcatggaacattagaaagcccttaaatggttattgagatatttaaagggcatatgggattatgctctgacctatgaggaagaaaaatgagaattagagttgaaagagttcgtggatgcagactacgcctcgaatagagataccaaaaaatcaaccacttttgatcttttcttgacaaaccagaactatatatgctggaaggcttagttacagttcgtggttgctctttcaaccacagaagaagaatttatggcgactacgaaagcttttaaagaagcgttatggcttcagggaatactttatgagttgaagcaaatcaaaggaggagtgactgtgtattcagatagccaatcatccatctatctttgtaagaatctggtttattatgaaaagagcaaacatataaaaataagactatactggattagagaaaagataaaagaagggatggttgatttagagaaggtcagtactgaaaataatcctgctgatgttgggactaaggtcttaaccttaaacaagttcaagcattgcttgaacttgatcaatctcagaagttagtatactgagatttctggaacaccaaccaatgatggctgcattctttcttcatcatcatcattcttttaatttgaagtaactaggtagaatttgtggtaaagttctttcaaatgaaaatgtctctgtaatcgtcattttgggaagttgttcactcactattatcgatccaggaaggagttgtgagcaatgatagtcgagttcaacaactaataaaatatgagcctaactgtcccgaagatctgaacactctaggtctaaccacctcgataagtagaatcttcatctagctctggactcactactgcctagcatttaccttgcccttacctacacatataaacatacacgtgagtcgataaactcactaagaaaagcataaacataaacatgtaaccaaaccataaccaggttctcatacacctaatcatgatactataactaggtcaaaaatatttttaacaaaagtacgattgaccataatatcagcctttactaaacactttagtcacactaatgtgatagagtcaatccatactactagtacaatcgaccagaataccatcctatactcagcattctagttccactgatatggtagcatcaattcatactaactaaattgcccaacatatatctgcccgtatccagtgcaactctatgtacaccaatacttcttttattgatatgttaactaataggcaaccataaaatcatgtatgctaaacatgtgtcattcaacctgagtggaaactgctgctcaataatttaaaggccctaagtcaaaatttatataaatcggtaagtgactcgctaactcacttttagggacttaaattcaaaactaaaaattttcttatcaataaatagtgtggtaatgccttaaatattgataaaatgcaaaacttgaggctcccaaaactgccccaactggtaaattgaattcctaaaacggtggactgttttgtggggttcttcctagaaaaacggttcaccatttttctgcaagaaaacatacaaactccactccaagcttaattctaccccaaaacaaaccaaaacatccagaacacctaaaaacaacataatgaacatattccaactgaaaaatacaacacccaagctctatagtgcatttcagcattattgaacaagcttttgaattccaaaactcaaacttgctcaacacaaagcatagccaccaaaaatcaaacaaaccaactaaaacaaacataattaaacccctaaaactcagttctaacaacaccataactcaacaaaaccaaattacaatagtatatttcaaaaccaactaaaacttgaattcaaaaggaagagcatgctaaggcttacaatagattatctcttcgttactacttaaattcttgctgcaaacactcttgattttggtttgaactagtagagaaaatttggtttctcttggtgtttccttgtgctcaaatcaaggagaaagagaaacaaggtacaagttttgattttcctttctaaatgaataactctatttcaattttttctttattcccttaagtattgagcttaaaacttctaagaattaactagaaaatccttaaaagtaatttctaataacttaagtcaaaatgaccattttgcctttttctttgccaagaagaaacctataaggtctagaggtaaaatggtccaaaactataattctgaaaaattttgacactctaatttctaagatactcaacgatatctaagtgactctaatggccaaatcgttgcattccactgttacaagacataaaaatatgaaaatcataataattcatatataacacacctataattcaataaaatctctctaattgagaaattgtttctctaaggcctatttatcataatagatcttattttcaactagaaagcatataatcataaaataataatcaaatctttaattatccactaattctcataataaaaactatgcagtcattacatgaggtggctgaggcgatggctcttcacaatgctttgactcagtgccacttgtttggattggaaaatattcagttcgagatggattaccaaagtattgttctcaagctaaacaacaattctattcttgactcatctttgggccttgtcttacatgatatttctcttgattgtactttattttagaatatttttgtttcttattgttctcgttcagttaatgcggctgcccacactttagttaagtatgttttgtctgacatagctagtataatttggtgaccgaattatccttattctattcaaattttgctttggctaatgccaacaatcaatgaattgatgtcctcggcctcccttaagctttttacttaagtggttggttatctgtgaggatttttttttaaaaaataactaaaagaatgagaaatttaataaataaaataagaaaaatataattaagaattgatgatgataattgttttttttgtaatttagacatatatttatactaatttacatcatgtcatataaaacattgagaaatgctaaaagacaatttaaaatggcaagcactacaagaaggtaacatatttttattggtgcaatttaatattgagtctcacacattttgatttaataaataacataatatcttaactatttataaaacatcacatcaatacctaatagcaatactcccaaaaattaaattataatttttttaattgtcaaatgagatacactaccactcctgtgaggagaaaaaggaactacccaaatgtcctaatagtgtgtatataaaaaaggtaagtgagagaggaaatttcttgggatgatattattgtaatgtggtagctattattgggtccatagatgagacccacataacatatatatttagtataggattagaagatgttaaaagggcagatacaataagaaaagccaaaatttataaatatatatatatgttggaatggaagataaagaagaaaacaaaagagataggaaaggatatcatcctcaattaatgtctccaacccaacccatataaggtgttccccacttcttaaaggcatcaatgaattttctctaacaagtcccaatctctacgatatgacatctcttacacttacccttgccctaccttcattcacaatatatctaatcaatattttatttgatttttacgtgtagcaccttaatttatatctaaatttcaaaaataacgttaatacctaatttaacttttcttttaactattattaacgtaatacctgaccaaatatttgctgcaaaaaaaaataatgcttgtcatttttttcattctatttaagccttaattctttgttttttttattatattttctatttcctatttctcactctttttttattttaaaaaataatttatggccacattattattcgattgaccttaaaaaaaaacattgtgatctactcttcattgtgaacatttcaagatatgggaagtatatatttttttcgctatttctaaaaaagaaaccatttggttactaatatattgattagttactattttatcatttttctaaaaaaaatcttaattaacattcatttttaaataggatggaaggtaacacagatattgttacacaaaacaaaaaaaaatataacataaaaatacatcttaatcaacataatataaac

SEQ ID NO: 243470 - DNA, 2321 bp, Cannabis indica
cttctttacgttttttttttttttttggtacaatacaggtaattgttaatttttttttttcgttatacatccatagatctattaggtttttcaaatcggagaattgtagggattcgtaaatcatcaatcaatatatataattataataatctctttcgttgattgatatttattttcatatgtaattgtttggtttcccaatttgattttttattgtttttttagctttgatctaacataatctaactttcgtgagatgcttgatcaaagggttttttttttatatataactttgttaaagtgcgaaagaaatcttagcttagtttaattttcacatttgatcgatttcaattgatttgcaagaagggttattttcatctgtttgaattggaatcgctaatttagaaccgctaattttgatgggtattcgaaatcataatttttaaatatatatttagttaattgtgatttgggtttgactgttgattgtatatgattttacagggtattcggtaatagtaagatgttagagcagctgttgatatttaccagaggagggctaatcctctggacatgtaaggagcttggcaatgcactaaaagggtctccaattgacactttgattcggtcatgtcttttggaggaacgttcaggtgctgcatcttacaactatgatggtccaggagctgcttatacacttaaatggactttccataatgagcttgaccttgtctttgttgctgtgtatcaacggatcctccacctcttgtatgtggacgaattgctttcaatggtgaagcgtgagtttgcagagatttatgatcctaaacgaacagtctacaatgactttgatgaaacttttaggcagcttagaaaggaagctgaagctcgagctgaagaaatgaagaaatctaagccagtaggcaagcctttgattaataataaaaagcaagggcaggtgcaaaaatctgatggaggaagtaagaaaacaagtgatggttcagctaatggtggtgaagatggaaatggtccaaaaggtcgtagattggagaatggtatctctaatggtaatcatgttgacacagaagagaccaaggtgaatggtcatgttaatggtaaagaaaatacgagctctaatattggggcttttgatgtaaataagctacagaagcttaaaagtaaaggtgtgaaaaaaatagataatgtttctaacaaggtccctaaggctgagcccaagaaaaaggcaacaaagaaaaatagagtttgggatgattcacctcgtcaggaaaaattggactatactgatcctgtgggtgagaatgaggacaatattgtagaggttgtggcagcagatcaaggtgaaagtatgatggataaagaagaggaatttagtagtgaaagtgagagtgaagaggaggaagatgagggaaaagttagcaagcctgatgctaagaagaaggggtggttttcatctatgttccagaggtagatttcttttctgatatttctttatgtgatttatatgatgtttgatttagcttttaatttatccatagagcatgatatctttctaaaagggcacaacacagttttgctaataccccaaagtaaatttggggttccttatcatgtttagcttctcatctaaatttggttcttgatgtcagtattgctggcaaggcgaatttggacaagtcagacttggaacctgctttgaaagctctcaaggataggctgatgaccaagaatgtggtatgttctctctgttcttgtagccattattaatggaggtataatatatagtttatgactacatgttcttgatgatgatgtgaggtataatctattatgtgatgtggtatgtctaggctgaggagatagctgagaagctttgtgaatcagttgctgcaagtcttgttggtaaaaagttggcctctttcacgaggatatcttcaaccgtgcaggtttgtgaattttcttcatcgaatgatgttacttgttttttcttttctttcaattgttgttacatgtgtgactaatgttaagtttgatactgactacaggcagcaatggaagatgctcttgttcgtattctaactcctaagcgttcaattgatatactaagagatgttcatgctgctaaggaacaaaggaggccatatgttgttgtttttgttggtgtcaatggagttggaaaatctaccaacttagccaaggtttggctgctaatttgttttttcttttgcctacttagctttatgattaaaggcatgccttcttaatctgattggcattgttgaacttttcaggttgcttattgg

SEQ ID NO: 243471 - DNA, 4419 bp, Cannabis indica
taaatttctaccgcgtgacactgcaacaactattacgggagacgatcgtgttcaacctgcaatcgagaagacaatgaatcctgttgttcatagcagtcaagctcaccaaatcatacaacaaaggaatctcttggaagatccttcaaatccttattatcttcatcatgcagataatccaagtaatatccttgtttctcaattcttaactggacaagataactacatgtcgtggagtggagccatgtaattaaccatctttatcaagaacaagctcgacttcttggatggttcaattcctaaaccctcacctactgaaccgaatttatgtaatgcctagtttagaaacaataacattgtcatttcttagatcttaaattctatctcttaggagatttcttctagtattttgtatgatgaatctgctgctgccatatgggatgaccttaaaattaggttccatcaaaagaatagtccacatatatacaatttgagaaaaagtttgatgaatgtaaaataggatagccagggaattagcatgtactttactaagctaaagactatttgggaacaattatcgcattatcgaccttcgtgtgtttgtaatggttgcaactatggtagagtcaagtccaagattactaccacatggaacacattatcttttcttgatgggattatttgattcttaattactctcaagtcaaaagtagcattcttctcatgggccccttcctgagatcaatagagtttttcatttggttactcaagaagagaatcaaagagaaaattcaaacactactgtggaccaatataccaatatggcattcgcttttcaaggtgaccagagtagtgcgaacaagccagattccaatggtaataggtctcaccaacaaaagagaaacattccttttgacacccactgcaacatccatggccatatagtagaaaagtgttacaaaatacatggttacccaccaggctacaacaagaacaataaaggaaaagatgttgtggccaaccaagttcaaaccagtaatgacacaggggttgctacaggtgatggcacaacacttcttcctcaactcatctcgacacagtaccagcaactcctgaacttacttgttggccaacattctggtatgactacatctgatcctagcacatcaacaggtaacacaggtatcgtactttccaatatgttttctattcccaataatgaatcttagattatggattcagggctacgatacatatttgttttgaaactaaacttttccaatttatttataattttcactagacttttattacctaataatgaaaaattggtagtcaataaaggtggtacagtcaccatttcaccctacatcaccctgaacaatgtactatatgttcattcttttaaatataatatcatttttgtaaattggctcgttaattgaattctcttcatgttaaattttttaatgatcataatttcatcatgtaggataacatccacaagagaatgattggcaaagatgaatccaagaatggtctctacatccttgattccacatttagtgatttcattgctctgtccattagtgtagatacttggcactccaggcttggacacgtcttcaataactacctgcatttacttagaaataaattgaattgtaacactattgatttccataaagatactccctgttacaattttcatttggctaaacaaagaaaacttcattttcatgcaataataactttgcttgtaatatctttgatgttatacattgtgatatttgtggaccaaatcttgaagccttacatcaacttcaaacctccttgcatcagaagttcaagctcaaagcactcgggccattacgttattttattggttttgaaatagctaaaggaaaagatgattttttttgtatcaacaaaagtataccatcaagttacttaaagacactggttttgtagggtgcaaaccaaccaaggctcccatggatccgcgaccaaaattggatgataacaagggagaacccctcactgatcccttttcagagaaacaacttgttggaaaattactttatctcactctttcaaggcctgacatcacatacgcagtgaactgtgtcagccagttcatggccaatccaacaggctctgaaccatttgctctgttatctcaaaggttgtccaggacaaggtctcatctattcaccaaactcttctctgcatctcagaggcttttctgattttgacttggcctcttgtctaattacacggcgttctattatgggattctgcatctttattagtgattgtttagtttcatggaaaaccaataagcatccaacaatttctaaaaggtctgctgaagcagaatattgagctttagctgccagcaccaacgaaattacatggctgaattatcttctcaacgacttgcatcttcctcaaactaaacctgccttcatctattgtgacaactagtcaggtatacacattgccaacaatcacaccttccacgaacgtacaaagcacatcgagcttgattgtcacttcattcgtgacaaaatcaacaactctacagttcgtctcatcccagtttccagtaacttacaactcccagatgcttttacaaaaccattaccatctaccacactcaactctcacatacacaagatgtcagtatacaatctctaccgtccatcttgaggggagggggtaacaagtattcgtgtattttcccaatagtatttgttttagtgtgtattcagttagttgtatgttaggtgaagctatttagaggagttagttacttttcagttatttcagttgtgactgattagttggtgggatgttagttatgacagttggtcattcactatttatatactatgtagttcttcattgtaattcattcaagacaaaccatcaataatatttttctgttttgttcactctttaattaatctgcaatatctcaagcttgaacaaggctttcggtgaaaattaaattagtttttttttttttctgacaaaattgttaattttattgagatttattgaaattttattttcacacatttattaattaaattcttattattaagatttttatttttatattaatgtaatattattcttcacatgttttattaatagtaatcatgcttatttcctattcatgaataaactttattttatttataagaatctttcataaaaataaataaatataaataaaccaatataagtgataaaaatgaccacacaataattataagaaagtaatatgatattatttagaggtgatttatacataaaattttttattaaaatgtagaccttaaattctgtaaggtttttgcctaaattgccttatggttaagctataatatattataattcttgtagtgctttactatttaacgtttctctttaattcgatcaacttcatgttttgcctatctattttgatataataattagttattttatcttaataatgtgtcaaccttttaccactctaataatgactcttttaactagctaactataatctaaattggttaggcaaattattttaataataaaaaaattattaagaatatatatgtatgagatgatgaaaatttaaatttgtaagaattattattaaattaattaactattattgaaggccaggaagcaagtttacactttacacggctgtaatatcatctttaattcatcacctatggtctaatcgaaatcaagcatattagagtcaaaaaatttcacataccaagtgtaatttttaaagctattaaagcagagtcacttatgatgatattatttacatatactaaaaaaagagtaatagatttagtggtatgtttaatatacaaactatgatgaggctttgaggaagtaaaaccaaatgattctaagcactgatgcaacttcttaaattaggttcgaggagcttgcttgaggctataaagagctttctttagcttgcaaaccagatgaggagcatggggtagttcaaatcctagaggctgagccataaacacttctttttgtaagtctccattaaggaatgcattattgacatcaaactgttgaatggaccaattttgagctaatgcaagagaaagagagaacaactctaattgtcaatggtttcacagctggactataaaagtttcagtgaagtcaaaactagcatgttgatgaattcctttagcaaccaattgagccttgagtctattgactgtcccatcaagattaaacttttctttgtacacccatttgcaacctatgagattgggagtccttccaattggcaaaggaacataactccaagtaccatttttcttaagagaaattgttaggttgtttttagtattatttttaagttaatttttagtgtgtttttaa

SEQ ID NO: 243472 - DNA, 2739 bp, Cannabis indica
gccgctatttttagaccttggggactaatctgtatcaacgtgaactttttgaggacttttgccgcaaatttcccttattattattatttacattacatagaaatttatattgatataaatttgttttttccccacattaatgtgtatatgataatgaatggcttgttaatatattcttactaactaatgatgaaaattaaaataaccattatataagttattatcaaagagaatgtgataatatatatatatatatattattttttttttttgagttttttcatttctataatttaaaatatatatatatattttttttacatttttacgaaatctacataaaaatttacatatcaatcaacggaactatctattctgcaaccaaaatctacataacaacttatataaaaaccaccctaacaattattgaaatgactcaactataattttttcaaaaaaaaaaatcaaaaaaataatatatatttttatatatagtaattctcctatttttttttaatattagaatataaatatcaattaaaaacacataatttttttttggtaacataaaaataatctaaataaggtgaacttcattcctttctcatatttatgaatgtaaaaaaaaaaaataataatattttgaccaaatattataatattatataattatatatctaataaaaatttatattggcaccacaaatataaatatttattttatatatattcattttgtgctcattgtatttggataaaatataataaaaaatagtctttttttatttattttttgttacttaattttcttgttttagatcataaactataattagtcttacagatttggggacatatattttatacattttataaattcaacggaatttaaattccaatcatacattacattcacgatacaacacacccctaagaacattcatactaatatttaagaaacatttaaaattatattgagaattaaggaatataattgaaaatcaattgtttttatatattatatatagcatttaaattcgagtgtcgtgataaactttgcttttatatttaatttatttttattatatttgtataaagagataataactaattgaaaccttataatgttttgatttagttcttcagtgactttttctaaaaatatatgtgtaataaatttggaattttctggtacagggtgcttaataacataattttttctatagataaaatatttaaaataattttttgttcgggtaaatggtaacgaaagaatgtgttatattaaatatacaagagctgtcaaattcttttatttattattattttggtggatcaatataatctaaccccactaattaaattgattcatcctcacaccagggtttttttttttttttttttttttgaaaatcaaattccattcaataaaaaaattacaaaacattagacaagtctcgctgtaaagtaattgtacagatttaaaacataaaaaattacaaatatatatttgtatataattattattttttcttaattaaaaagaaaaactcaagggtgggcaatcaccataaacataggtaaataaataatataccagcttaaaatataatctcctaatatacttttattattattttcttttagataaaatgaaaatctcctaatatccattaataagtaaattggacaaaatatattatataaaaatatagctcaaagaataaaatcatgaaaattaaacatatcgagtcgtttgcaataacatggaaaaaaattctaataataacctcagctaaggatcaaataagccactagcaatcaagtatcaaaaaaatgttatttatattaggcttccaaaccaaatgatcgtgtgacataatttacctattaatgactatcaaccaatgatcttccaataaaaattaaaatataacaactatctataataaaaggaaataatcaattgaccaaccataatgataacaatcgtaccacataatcacaccataaaccatggggctaatagaaatttgaaaatctcccatatctgaacatagacaattcatgctactaaaaagaaacaggactaaaatccagtgtcataaatgaaaaggcactaatacgataacaatagtaaagtggtgtatcaacaccattattgaaattaataaagaacaaaacaaactaaacataaaaaataacaaataaaagatacaaatgccagaagccacaccgacatcaacaccatcgaaggtctcttttgtccatggatgaaccatggacgcaagcccaccacaccacagaccaccattcttacccacatagtagggatgttcacaaaaattaactaactgcctaactagaataaatcgcccaaaccaaactgaataaaccgataaaaaatacaactcgaataattttacgaaaaactcaaaccgcccgatgaatatattgagtgggttgaatattattctaacccgcccaaataatgaataaaccaatttatatattttttactaaaattatttataacataatatataaattacatttagtagttaaactattttacatttaataaagtttttattttatagtgtttattttgaaatttagaatttatagttgataattttgattgcatttgaaaattgaagttaaaatttagaatttacatatgagtatatatttttttaatctatttttttaaaaaatattgtttaatactttaatgtt

SEQ ID NO: 243473 - DNA, 1787 bp, Cannabis indica
aaaatctatatagcaatttacgtagaaatcattaggaagaatttaaatacgtaaatttaaaaagaaataataatatatcaagtaattccgctaattataattaggaatatttttgactaaaaaaacacttgtatcaacaactacgcacatatatatcttctcacttaagatagagaccttgaagccgttttattagtgttgcagaaaatgaaggttagaaaacatatataaatggaggtagttattaattaataaaatagagttggttatgaattacgaatttaatttacttaattaatataatagatagtttgttatgtcgacgtgaacgacgaagtattcagaatatatatagagagagaaagttagccccgaacaataaaagaaatatatactaattgaaaaatgttattttataattgactaataaaacaaagaaaaacaagctaattaaaatcatatttcagctatatatatttatatatgcatgaaatgaaaatgaaaatctaggtagctagtcttgaaaaagtttagaccggcaaagagggcaagaattattgagaaaggaccactcggcaatacacgtttggtggtaaacatggccgcatgggacttgtttgccactctcacccggcaaaaacaattccatgcaaaccgaacaaacctcggcagaggcagcgtcagctgcggccgtggtggaggctaccacgcttggcatgacctccaccatcgcacaagtatttgatgttgtcctcgtcgtgattattccatttcccggagggcttggattattttgcggtagcgtaagagactcgtccaaatcgaaactatcaattggacaattaatagatatcatttccatcatgagaataatagagcatttgtatttggagtttaaagcttaattatatatgaaccttgctacctagctaatatttatatttatggagaattggaattattggtcactttttgaccattatgcaaggcaaaagcaacacacagcaaaccttatttattgtgtattttgtttgtttcatttagtcggtctcaatcttatcacctatttcagtttcacactggaaatatttatgagcgcattttacatgccacaggggcaggtggccacgaaattataaacatgagtttttgtctttttgtttctttgatttgtagttaactagtaaaattattaatagttatgaattgattatgaatctaaggctatatatcattattaatcatccatgttcatagattaatagtgtattcatagattaatagtgaatggatgatatgtaaggatccgtttggcacaactgttaaaaaagttaaaagctgctttttaaaaaatttgtaataaaaatgtgtggcaaataatcaaaaaatagctttttgaaaaaattttagaaaagttacagctaaaagctaaagctgctccaacccaatttttagaaaaaattattttgattaaaagactataataattatttttatactaaaaccatatttacttatttattacatattaaaaaaactaaaaaaaaaaataaactaattataataaaataaataattattaaatctcttattttttttaaaaaaatagtttatattttatttttattaacaaacaacattaacctaaaaattttcttatatactttatttgataaaacataataagcaaatactataaattatttttatgaaatgcatataaatttatatttttaaaaaaattaattaaaaatatataaaaaataaaatattatataattaaaata

SEQ ID NO: 243474 - DNA, 4645 bp, Cannabis indica
cttaattgtgatgtttaatctacgtgtcatagagagtaatatattaaataattttatgaggtctttccaaatgactgagacattatgaggcaaaagttacaaaagtgaaaaaatattgatagacgattcgtacttgtgataagaagtttgcctaaatgcctaaatatttgaatttattccgtctttgattattttcataatttcctcataattcattgtggtttaaaccaaataactttaacatgtcatgcaggagtggagtacagaccttgctaaagtggatgttgtcaactctgcaacagtaaagtatacagatttcttattggcaacagcttctgggaaggttgaaggagtaaaggcacctggtaaacttgctaccccttttgagagaaccaaagttgctgcttacactcttggtgccatgactccttgcatgaggctgtatgcttttctgggaaaggagttccaggaacttcaaaaggacaacgaagatagtcatccatatcagaagtggatagacaattatacctctgaaagctttcaggtttgtcatagtattaaagagatgcgctgtttgtcttgattcttgctcattctttgtgacagagtggttgctcatattattctgcttatacaatttgtgatcttcgaatttaggcatctgctgtgcaaactgaagagttgctcgataagctgagtgtctctttgacaggcgaggagcttgacatcattgaaaagctttatcaccaagccatgaaactggagattgaattctttacatctcaaccactctttcagccaactgtagttcctttgatgaaagagcataatcctgaagaagatcagtttatgattttctcggattttgatttgacttgcaccgttgttgactcatctgccattttagctgaaattgctatagtaacagcaccaaagtctgatcagaatcaacttgaaactcaacttgcgcggatgtcttcagctgatttgaggagtacctggggtgttctttccagacagttcacagaagagtatgaacaatgcattgaaagcattttaccaattgaaaaaggtagtagcttccaaccatgaagtttcacctttatcttagttgatttagtgtttgagaagcatttgataaaatcataggtgtttgtttttgaatttttgtggctttgcagtggattttaactatgaacacttgcataatgctttggagcaactttctgactttgagaaaaaggccaataatagagtaatagaatcgggggtacttaaaggtataaatcttgaagacataaaaaaagctggtgaacgtctccttcttcatgaaggttgcactgccttctttaagaatgtcgttacaaaggaaaatttgaacgcaaatgttcatatcctttcctactgttggtgtggcgatctcatcagatcggcattttcggcaagtatgtatctttcatgttacattttcttgcaagtttttccctttatgtgcctcgtaatcattcataatgtcttcttaacgtactttcaaaaaaattattgttggaatgtcaagcgactaagagtcctatttaaattgtgttacattattatcagtgttgcttcttagttttttgtgcattgaggattgtttttcggcttatgttatctttcatgttacactttcttgcaagttttttccctttatgtgacttttaatcattcataatgtctataaaatttcttaatgtactttcaaaaagattattgttggaatgtcaaacgattaagagtcctatttaaattgtgttacattatcatcagtgttgcttctaagtttttttcttttgcattgaggatttttttttcagcttatgttatctttactaaagattctttagtctacacaggacatgaaagtatgatgtacatatacttatgcttttctttttgatctttttcaaaatgaagcaggagatctacatcagataaatgtacatgcaaatgagttcacttttgaaggatccatttccactggtgaaattgttaagaaacttgagtctcccattgataaggttcaagctttcaatgatattatatctaattcgaacaaagacaaaaagagtttgactgtatacattggagactctgtgggtgacctgctctgcctgcttgaggcggatattggaatcgtggttgggtccagttcaagccttaggagagtgggaacacaatttggtgtttcttttattccattgtaccctggcttggttaagaaacaaaaagaaaatgttgaagggggctcttcttgttggaaaggatcaaatggtatactttacacagtttcaagttgggctgaaatacacgccttcatattggggtggtagaatcaattttttttctcattcttacgcactctacttcgcgcttggacaaacaagaaataatcagatatataaaatgttgaaggaaaaaaaaaaatacaaattttgtggccagttttattaagggtcacagatttgctgctctgtattcctctcttttttcgctcttggcattgcagggtgagcccattttaaagatgagttgattcatagggtatattgtaaacatggtacttgtaatttttcaatttggcaatatgattgctaaatttgtgaaaattgtatttttcaggttttggagaggttttaggcagtaaatgatttttaaaacaaagattgcaatgtcaatttgtctatacaaacatttgaagttccatatcatttgttatattcaatgttctaatatagaaatgcaaagttagtcgtcgtcgtgtttgaatattgttttagtcttctatttctcttcattgtgtccatctttggtctctaaattttagtgtgtttagaaggtgctttaaataagatagtgctttttattgaccattatctgacttttaggaatttagacccactcacaacttgcaatttatcttgtttttatacttgatcatccctaccccacaaaagagaaaaagcccgaagaagggggtaatgtagaagtgtgcacttattttaacctaaagctaattggaaatattcgtggaaaccaaattagtttggaatgcttttttttttttcaactaagaaaaaagaacaatggatgtagtgtgtaatggtgtttctcgatttttactgctaaaaagaaatgagttttatgttagaaatttatataatacaatcacaagcataattatatatttacaactattacttgaaatgcttatttgttaataattataacattttaaaacttactaattatatttaagttgctttctcaccaaaaaaataaataaataaattgaaattataataaatagtccaaaaatatagtatcatggagctaaatgttctcattttaaaattagcggagaaaagatcatttgatactattaattacttaaattctctttcactatataaaattcgcacatcatatttttgattagagagctgagctgtgagaaagaatggttgtaaatgagctatggaaaaaaactgcgcgccgagtgtttcgtaaattatagattttaaagtgttgtaaatcgtaaaaattctaattatataacaatgctttaatattattgattataatcacaaatatatcaaaatttatgttatacatttttttttaaaaaaaattatatcttagtttagttattttttttcccaaaatatgaatttacatgcatttgataacaaacataattagaaaaaactttattttcaatattagcgacaaaaccatataaattatataatttgtaaactgcacaaatactttttgacggtaaaacctccaaacccccattctattttgcaatttacatttccattaaaatgctgctgtttgagcatctccaataggagttgcccattgaagtggtcttgccaaatacgcaatgtaatccaattttcaagaccaattttatgtgaagtgttacttagagagagttgagtagagtcaatagctctgagatcacatcgaattggtctagccagatatttgtgaaaaaaaagcaaagtgctttctccttcacttcaatgggtaaagaaagaccagttgacactgcttttcaaagattcattgttagtagcaagcaaccttgccttttccctttgaagcttacttactaaggaaacaggctcgaaagcaacaaagcaacatattaagtaacttgtgtaaagcgttagcgtaggccgttttcccaactgcttgtagacctattagtcaagctttgatttgatgctagctgaaaaacggatgcgcgctactagcgcgctttgcttttttttttttgcgaagcttgctgcttttcattttgttaggagtaggagcttgcctttagttgggtttgggaaagagggcatttcgatcgcaaaagattcaatccagccacaggttcccctacgactactgttgggttttgtgtcctaaataaaactctattttaatgtaatcttctacattcatttatcaataaagaaacatatttattttattacttgtttaatgtgttatttggttcatgtgatcatttgtttgatttataaattcagtttaatccttatcacactgatattcttgattattgtgttgtcaacatagtgaaaagtaa

SEQ ID NO: 243475 - DNA, 3060 bp, Cannabis indica
aataataattagtgatattttataaaaataattataatatatatgtgggacctaatacttaattgtgccaataacaataccccttgggtagtacttagacaccactaagacactttagctttctccgatattattgtaaacccgatgtttaattataccaatagcgatataatcctttggtgtggtactaaacactactaataatttttaatatttctctaattctatcacaagtaaaagtaatgcataggaacctctgctagggttacgacccagtgtgcacactaaggctggtcgtggctggccacacaaagattcttcgaaggggacaagtgttgatgctggatggaaagggggattgaccgtgaaagtaaagaaaaacaggggccaacatcttcagaaatggtgctcaagaccaagtcgatggatgaaattttggggatcgaagctctgcaactctctatggaggaagattcagaggatgaccacgctcttatagtggagaacgaacatgatgttctatccccaaaatcgtctctaaacttccttcagcaacaagatgaaatcagggcagattttgctaattttttggaagcaactgctaagaacgaagcaaaatttaaatctggtatgtcttgttctctcccattcttcgatctagcaatattgttaagaacttgagtaatcgttttgatagatctaagggacaggggaataaaaattgctcaggagttaaaattgagttagcagatatagaggatgaaatactattttggcagttggcattagtatgctatgtcttaggtgctaatcctccagtgaacatttttgaggggtttgctaaacgtgtttggaaggatacaagtattgatagagttggagtgctcaaacaaggtgtattcatagtctagtttcaaagtattaatgtcaaggatgatgttcttaatggtggtttcttgttcttcgattgaaaaccgattgttatgaagttgtgggatccaaataccgattttaagaaagaagacgttcaaacagtctccacttggattcaactccacggtttgatcttaaatattagggcaaaacgactctctttaaaattgttgaacagttggggaagccattgatgttggatagctttacaaagaacaaagagaggtttaattatctgaggatcttggttgaggttcagatggatcaagcattcccggaagtgatttctttcactaatgaaatgaaccaggaagttgatctttttatcaaatacaaatggctaccgattgtgtgtggtaattgctcgggtatggggcacacttcagaagtttataggaagaaagaggaagtaaaaaagatgaggattgtgaagaaaaaaccaacatagaaaaaggaggaaaaaagagtagatgaggaacgatttcaagaggttaaaagagcaggaaaataactcatcaaagccatgccacatccaatgtccacttcaaataatttcactatactagctgcccaagaggaaggttcggaagtgatagtggagggtaatactcaaggagggggggttcctcctattctcaatggatagaattatgtgttggaatgtctgaggaatcaacacactcaagaagcaaaaagaggttaagaatttgatctctaaatttaaaatgggtttggttggtctcctcgagacaagggtgaaggctgctaatttaggggccttgtatatacacatgtttgatggttggtatttgactactaattcacttggaggtgaaccacataaatagtaaaaaaaattggtaatccttggtttatagtttcaatgatgaaaatagaaggaaagagttttggatggatttgatgaatcttgctgatagcatccttagtccttggttaatgatgggagatttcaatgatattctccataatgatgaaaggattgggatgagagctcggccacaaaaaaaatcagagctttttaagaatgtattgaacattgtcaaatggaggatataaaatcctttgggtattttgcacttggaataataagcaaggggttcaagagagaatttattcaaagattgatagagctatatggttaatcaattatggctagacaagtatgtgttggctgaagcattatttcttcctgaaggagagtttgatcacactcccgtgatcctttctgtatatcccgaaatagaaaaatggaaagtctccatttagatacttccatatgtggttgaaggcacctagatttctagacaaagtggaagaagtttggagactgaatatcaaaggaagcaagatgtatggtgtggtttcaaaacttaagatgttgaaaatggttttgaaagacctgaatgaaaagtgctttagtgatatataaacaaaggatacactagccttacaagatttattgggctgccaagagaagcttcataaagatcccttgtgtggtgaacttattgaacaagaagttgagcttaggaagaactataaagaggtacactcaacttatttttcttttctccaccaaaaagctaagctgcactggattaaagagggggatgaaaatacttctatgtttcatgctagtattcgacatcgtaaagttccaaaccgtatctttacggttatggacatggaagcaagatggttggataaaccaaatgaggtacatgatgctttcttgagatattattataatatcccaataagcctaatagttaataattagggtttataattatattatgcgtaatcaagtaataagtgggattatgatcctactaatctagttcaatataaactttaaatttgctataagtggataaataagtgtaatttataaattacggagatttatatggcacaggtgaatgtaatatgagttactggtgtaataaaaatattttcaattttggtgaccttggagactcgattgggggccataaatgtcataacaggcttaattaataaaattaatggaaatactgtgataagttgataatgtaagtattagaataattaggagtatatgggatttaatgtagcgccctagaa

SEQ ID NO: 243476 - DNA, 649 bp, Cannabis indica
gagtgtagtaccaaaagattcactcatatccaaatctcatgcttatccattattaggcaatttccaatcaaaatggtaaagcaacaatgcaagtggatactcaacatttatgagaccaaacgccatacctgcacacattctccttccagcgccaaatggaatatactcgaaatcattacccttataattagaatcgataatatcaatagagctatcgacaaacctttcgggtataaaactctcggcttcactccaataatttgggtctcttccaatcgcccatacattaactaaagtcctagttttcgcaggtatcacataaccatttatttcgcatttttcttgactttctcttggaattaacaaaggtagaggtggatgtaatctcatggtctctttcacaactatttttagatatttcatgtcattaatacctttttcatcagttgaaccagctttgttaaacacttctctaacctcttcttgtgcctttttcaatatatttggatttttcatcatttctgccattgcccaatctattactgttgatgatgtgtcaattccagcagcgaatatgtcctgaaaaaaataaaaaaatttgcaaaaaatatataattttgggcaaaagtttataattttactgttacac

SEQ ID NO: 243477 - DNA, 2533 bp, Cannabis indica
acatttatacccgaaacccaaaactcaactggcccgaaatttgaaaaacctaaaaaatcaagtttcaattttagctgggttcaacccagttatgtactcggttgagtttgggtttaatattgttgaaaacccaaaacccaccccaaattcttagtatttttatttatttatttcttaggtaaatattgtataattatattatatatatatgtttttttgagttgtgaatttgtgagtgtgtgttaaattgttaatgtattaatttatgtaatatgtacatataataatatattgtataattgtattattttataatttttttattaaaaaagcgatattaaaaaaaacctagcctaacccgaacccgacctatcccaacccgaatccaatccatcgagacccgaaacccaaaaacccggtttccatacggccagattcggtcccaaaattccaaaactcgaaatccgttaaaatctagccggtgtgcaccctagaaatgaggtccatgatcaaataaatattattaatatgatactctctaacctactccaatcattataacctttatttgcggcatatgcggtaaataatagtagcttattatgttatctcaatgtgaggagtttaaataaataaattagatttttgctgaccactagcgtaattattaataactaactaaattacatgtgatgtgcttcgcatcatgattcggttcaattttatctactcttagattggagcaccatttaatgcgcgcgcgcacacacataaatattgactgttaaggagcttagcattgaaattgctaagaaattgacacagatttttgtagataaatatatagatatgaatatgtgtatttctggtaagacatgtggttatctctttccacaagagataggtttggttttcaaagaacaaggacatatatatcctttgatttttttcaaggtgtgacagttggcatgaagaagaataaaagagtaggaaagttgggaaagggtaaaggcaacacatgtgaaccacaattgggttgatgaaagagtttgaaaatattcttaaatatgataattatacaacacattacaagaagaattacaatgaatttttgtaacttagtaaaaataaaaagaaaaaaaaattatatttatgaatgagagtgaagtaagaggagaaaaaattacataagtataacaatccaatttttaggtgcagctagaagaagcaaaggctaaggtacttctctccaaatcaaattcccagaaatggttttgttgcatgatattgccaatgatagaagtacctggccaaccagctgaaacaaatcctagacatttcttctgaggtgcaacatcaattatataactcttcactggtggctcaaactgagctccattagcaaaatggatttgtaattttggtaccaaagactcattgaatcctgttgagttgaagcagaattcaaatggtcctccctctgtggacaatctttcaaattttgatatggactcgttgaatgcagctgttaccagtttgtaagctggatcagctagataagtgaggctagttcctgaatcaatgattgttccaccaccaagatttggatcccatacttcaggtgctattttcaacagtgtaaatcctatggtgattcctaaaacatttacaccatagagtgaaccataaactccacccaaaacaagatcagtatggcgcatacttctcatcagcgatgtttcgatcttgttgtggccgaatacaatgtagtttgtgaggtttttggggcttaaatgatcaactaaacaatatgaaaacttgcccccaaattcttcagcaacttttgttgtgaatgtgtacttgccaaagcctagaccaagtaccccatcagcacctttgaagccacctaaatcacctttgatcgtttgggtgcaaccaatcaagacatttttaagtttcttttttctaccattggtgaggcctactgatacagtgtcactggcaaaaaacccaattgcagaagaaccttctaggtacctagttggcaagagaaatgacatcagtaaacaatgggatgaattaaaaaattgcccctaaaatataatgatatttgaagagacatacatatcctaaaaagacagtacaaaggccctttgtttggtacaaatattgtggctcacatgagactcacctacctacaataactaccatttaaatcttgtgttagatgtaggtaaggacttaagagcagctagctcgtacataccctgcgattcgctatggtactaataatgctagccatgagttccccaactacttgacaacacttcagatctcaaaaacaaaagggaaaataatttactctattagccatctcaaatgaaattccatcacataaacgactaactaagctaaactactcacataaatattacagatatttttctgcaacttcagctattgtcttgtactgcatcaagaaagaccatgtcccaaactacttgttgttgggaaaattaaactcttttgtcct

SEQ ID NO: 243478 - DNA, 8427 bp, Cannabis indica
aatccatactattcaacattgcctattatattagaaatcaatgtcttagtgcaactctatatacacctataccactatctcaaataagctagctacatggcaacatagcattcatgtatactaaatatgtgtatatgtgcatctatatactattcttacctcaatttttgatttaggtgtgtcagtcaacctgagtaaaaatttgctcaatgatcagaggtcctaagtcacactagtggtaaactggtaagtgtctcgctaaaacactttctaggattatagttcataatctgaagtttctatcgataaaaagcctatagatactctaaataacttaaaaacacaaaatcgaggtacccctaaaaatctccaaccaggaaacaaaattacaattgggtgctctattttttgggcattgccagaacaactggtagcccaaatttctgtagaaactcttttctgagttctaactcttccaaacatgtttcatatgagttcaaacttctcataacatattattatcacccaaataattctaacagctcaaaatacctcttaaactcagaatttagattacaccattaaatcctttaaggaaactacttcagtaagtttaattcctctttaataagctacgttctaacagtaccaactaagaaattcacttcttaacatcaaatactaacaaccaagcatcgtaacccaataatgatcacaacctaacttatatcatattaaaaattaagagaaaaaggaatcataaaacgtacctttgatttctcccttcaattcctcactagaactagcttcatattacttagttttcttgtgaaattgatgaggaaatattgataagaaaacttgctcttctctttggtatgggtcagggtaagagaagagagttttctaattccttctctaattttctacataaatcttaacatatatgataagttaaataaatctaatctaattaaatgagaattacaaaaaataccctcacttaaataaagaataaattttaatccaaggagtgatatggtcattctcctaataatccacataatcacataatttttaactttccttaaaaatttatggtacctctaaaatattaaaaactatggcattattatattttctccaatgcgtcgagtttctaatgttattgatgataaacataataaatacatattattacatatataattaaataaaatcttcataattgagtaataatatcatatttatctattttctaataataggtctttatttttaaatgctcatattattccatatttttttagaatattaattaatttctagttttccatgtcaatttatgcggtcactaaacctgataatcaagtcaaactacagtatactaaaccatgtattttccttgggtatatttttttttccataaagtttacaaatacatcacaaaagagggtagggtttttatatctaaggatgctcgatgatgttatttttccttatgctactatagctactaacacctctatctcatctacatcttatatctctcatccattttctcagccgcccatcactcttctctgtcatgttgctccccttccttccaccccttctcctgcactacctagagtcgattttgtcccagtggcaccctccactgcatatatttcttcctcttctcgtttgtgccatctactactttacctactataacatccactattactttacgtcctagtaatattcctctaccatcatctataaatacaacatctcaaaaacttattttcttttctgtctttgttactgctcttaccatttcttctactattatgattgaatcatttgtgtctaatgttattgttccatttgttaccactattcctactaatgtttcatttgtaggccctaatactcattctatgaagacaagagcaaaattaggtatctagaaacaaaagattgtcatggcttctcttgacccaactttagtccaagctacaatgaaagatcaaaagtggtctggtgctatggacaataaatttactacccttatctgcaacaaaatatggactcttattcacttaaatggtaacagaatccccatttgcagcaaatgaatttatatagtgaagtataatgatgatggcattgtcaaactacaaatcttggcttgttgccaaagcctttcatcaataggcatggtttgattacattgaggccttatcaagcctgtcactattcggattgttctcacaattaatgtcacaaatggttcaaagattaggaagcttgaagtgaacaatgcttttcttaatggtgaccttcaagaagatatttatatgacttaaacccatagttttgttgatttcgactctccttccaagggttgcaagcttcgtaaggctttatatggcctcaaacaggctcctcgagcctggtttggcaaactctcttttgtcttcacaattttagttttaactcagccaaaataaatacttttcatcaaggttgagatactacttcttgtatctacattctagtgtatgcatatgataatattcttgtcattaggaccatgatcaataagtatcttctctaatttccaatctcagcaaccataggcattgttaactattttttaggtattcaagtcttcaagactaatgatggtattctgttttctcaataaaagtaccttcaagatctcatctgtaaagctcaacttaaagggactaaaactcagagtagtcccataaatagtggtcttaaattgcctacctattgtagttatcttgtcatggatgcttctcactatagattcattgttaaaactttgtaatatgtaacaatcacaaaacccgacatcagctttagtattaacaaagtgtaccaattcaagcacaatcctctttagactcactgaattgttgtcaaaagcatcctaagatatgcaaatgggacccttgactatggtctacaaattagaagagctggtcattttatttgcaaacttactgtgatgcgaattaggttgttgaacctgatgacaggtgctccatgacaggattttgtgttttcttaagtcctaatctcatttccttgcaatctaagaaacaaataactatcttgagaagctccactaaagctgagttcagaagcataacctttgctgtagctgaactcacctgaatccagtcattactcaaagagttggatgttccttcctctgcaattacagctatttggtgtgacaacaacaacactattatgctagcaatcgattcagttcttgatgctcacatgaagcatattgaaattgatttttactttgttcaggataaggtaataaagaaggagctccaaagtgcaatccaacttgttgactgccttgctaaatccatctttagctctcaattttttactcttagagataaactgagtgttgtctctctgtcactctcagtgtgagggaggctattagggatagttagttgaactatcctttgatagttagtaaatagttaaaaggttgtttggagttaattagttgtagtagctcttttcaatttgttagttagctactgaattgtcttaacaacttgggtatataaggcttgtattttgaattcattttactagagaaattcactttgcctttctttactcactacaagaaatatcacttttatcagtatatttttgttggaaaaatggatctgcaagtcaacgtcggtattagaagtacttttgccagcacaaaatgaaaaacgttggcaaaaataacttttttcagcgcgtaaatgcactggtaataaaagttatattttagccattgtaaatgtgcgctggaatttttgccagcgcagtttgtaaaatgcgctgataaaaattacttttaccagtgcaatagcgagctgttctaataaaagtgaaatttcttgtagtgacttcaatgatatttactgtgattaatctataaaaaccaaaaagtaatattaagtaattatatgtcataactttgactaaaaaaaacaaagcaatctagtgataaataaaattatatatatatggatattaaaaagattcgaaattataaaattgacatattttcacgtggatacctcatttgtcactttgcataatcttcaaaaaaaaaatatatatttttatatatataaacaactattttaatagtagtattctcttaactctatataatatgtatatatgtgtgtgcttcatatgaattagaattaattaaaataaaccctacatgtgagagggtcttccctttggccaaagaaaaaggtaatttgaagacataatataatattatatccaaaacaaaaatagccccttaaaccgcatgtataggagtacttcttctcattgtaatagccttattctagggctaggtgggtgcctttcacatgctttgcttaattagctacgtttggtttggtgtgaacctttaattattatagttaataataatagttaaattagtcttaattaattaattattatatacctacatccttcctcatggaccttgcttgtttgatatatttattatatatattattattgggagatggtgatgggctaatttttatttgtttaataaatggaatacagtagtactgataatgatcattattattagtaaactaatattatattatgtgagataatataaaactaaataatataagtcactcccattaaggctgtaacagttttctcatcataaacatcatcatcaccatcttctacttcacttgtctttcttgaagaccccaaagtcttattaacacttctggatcggattaactacttttcatgtaaaaagttcagtacctatatatatatatataaatatatatattaattaattgtatgtttataaaaaagtataaatatatatatggatttgaagcttaattatataatacttttccaagatgttatgtgactaattaagagttttctaatgtctgtaatctttttgaaaaattacataattaatcaagaaacaaaaaaattattatttttaatttttgttaataaattaaacatatatattagctcaaattaaacctatatttatgtatgtatatataacatcatgtatatgaaaataaaatcaattttacatactaatctatcatgttctcagttttcaaaataagataataaaatcactttgacatagtgaaagtgtacacaatatatgaatgaatcgaagatcatcaattaagatccaatacatatgtattaaacaagaaaaaaaaatagtataatacaatatatataatatagctagttaattaattataatcgaaatatatagtacgtactagttaagaatttactatgtatttagttcgtgaattaagtcaatagcttagaggggtttgtgaattgcacattttgatgaataaacccgtgaagaagaagtcaacttaatttggttattaattttggactttggtagatgaaaacaatatttttttaaaaaaatttaacttatcataagagacaaaatagatatcaaatgcttgtgaacttgaaaaaagacatttcaaaataaacttcagaaaattaaactgaaagtcttcatgtttcagcttaattaatgaattaattgtccttttgattaaattatgaagaatctacataaatttattggtgaccccaacctcatcaagctgaggttagcagctagctaggagtattgtatatagtataatcaaatatatattattttctttaatctttttataaatggaggacaggtactaatatgttttatatatatatatatacatatctattctatataaaatatggctatataacaaaatttttggttatataaaattcttggttatgagaaattattgagtgttacttttttttaaagtttctattcaaaaataactagtttttttttttaattaagatgtatttaatcattaattttaaataaattaatattacttttaattttaatcgtataaccctaacgcggaacacaagctaagccaaatctaatttttaaatatgaatttctcatcccctagaatccatatgcgattacagctctagaattccctacagtattttcaatcgattgaaattgactctctatctccttaagcaaaatcgattcttgaagtcgactttcagttctcatattgcaaccaagcttctccaatggaatcacaggaatgctctgttcattcctgaaaaaaaaaattgttggatctaccctcaatcgtgatcgttgattcccaatcaagatctctgtagttctcgtcactatcactgttcctccataggcttttggaaatccatgtaccaaatccaaactatccccttcactcgaactaaaatctccgtaccactagtccaacacgatcaaatacctcttactcgccaattcttggcgaagagcacaaatgagcccttttaggccgtgattctctaccaccaactcagtcacctcttctcccactccgagcgaggataagatccgtttggctatcgctctcttgtggctctttttgtatttcatccgatggtgtgggcatggagacccaaacccttggtaagaatcttttcttcacctttttgttgtcaaaaactacagcgcagagtgacgttttgccgattacttttgtttcgacaatggcgatcgccttgaactcgtcatcttcgtcacttttttgtcggacaactaacctctcaagtgtcgccaagtgttcttcgaacccttgaattattttgggtcgacgaagcgctccgtagtaggagtggttcatccctggaaaatatcagcgttcactgatgaattggcagccccgttgggttgaggatttacattcccgttttgagatagtgtagattcgagctctgccttaattttgtttagcttggtcctgatgttgatgtaaggaaagtgaatggtgcgtttttttgttgatagaatatggcatttagttaacgaatcattaaggatataaagcttttctttaaatgaagactgaccctgttgtctcacaggttggattgagctgaggatgagaagtttttcaagagaattatgtatgtatcggaatttactgtgcatcgggattttggaactgttactactctcctttccattgaggctccttttgagtttatccaacaggtactcttcgataaccccttccatgaaaatatgaaacacaaaacacttcaacaacctctcctatatctaaaacttcactgaaaatagatttagactaaatagtagtagtagtggagccattagacaatgtataatggcttaaagaagcaaaaacatgtgattaggtaactcttcttttattttgtggatttgtttacatattattatttgtctttttatgtaatagagtgccttctataatctgaaatctctgtcaactagcagcttcttcgattcagttaggcgccgctcctctattttacaatggaatcttgatgttgctactcagcttgttgttgcatcagatgaggatggttcaccagctttaagggtattgactttgtagactcttttaagataaatataatctcccaacacacacacacaaacacattcatacacacttactatattgctttacttttaaacagctttgggatatgcaaaatataatgttaccagttagagagtttgttgggcacaccaaaggtaacaagatatcattttcaatttataatccttgaatttttgttgatgctcattttgaaaggctaggtgtaattgtaatgtcgtggtgtctgaatgacaattcatatttgctttaatatataatgttgtgtaattgcaatgtcgtggataggtagttttttccaagaggacttttgctttgaacactatatgttatatagagctcttctcaatactagtaaacttgctttgtaatgacctgtgggtctacctttcctattaatatcaaactattttattttcaaaaatttatggactctcttttttcagtccaaacttggacagaaagagctcatagagaaaaccaaagatgtaaactacagggaacttagtgacctatttcttctctcagattagagaaaatatactttttcctataaaatttctgttaagaaaatatatcatgtacatgcatactatttcatgtctttcactttatctttatgcacactctcacatataattcattcacattcatacattcatatttgctctttaaattatacattaaaaattcagaacagttcacaaaatagaattgatgtactagaagcaaaaccttgtacctatatcaacatctgatatggttgttctcataggtaaaagttagtattaccttttattttttattagttttaatagcagaaaagaaatat

SEQ ID NO: 243479 - DNA, 2176 bp, Cannabis indica
gtaaagagcgagtttgtgacccttgctctcaatgaaagcaccaaaatgttcacctcacttttagccaatgacaatgagtcttaattgtaagcgataagtgatataatatagatgtaatatagtaaaataaataaaggacacagagtttttaaagaggttcggccccgagcagtttggtaatagcctactccccttgatttgtattgacttaaggacaaagaataaagtgatccttcccttaaagctcttacaacgatatctctaggtatactctcttagataattctctcgacctttttccagtgagtataaatcactatttataaggctataagcttgagggaaagtttctcctctatttacaatgtctataattggtaagattacacattaaatacagaatacactgattaagtgatttggacagcttgccatatctctatgatatgatcccaaagttatagggattgcttctgtgattcacggtgcaagtgttgaagttactaagtgttggcgtgttgttcggaccgtccactactcgtctaggaaggcttcgtccgtgcagatatgtgcagtgttctgttcggcatatctatttcgagcagatatgtgaggttgattccacatgtcaccagcatgcgatgccacgtcagagtgccaaatttggtataacaacatggaaatttagctccttggtttcaatcgttggaggctcactggtgtctacggcgaacccagtcgctcccttcgccattcgacctagaatctcctttgtactctcgctaatgaatcgaacctcccctgatgtgtcattggtgatttcaacaacatcaccactcatgaagacaagaaaggaggatgcgtgtaccccgattcacttattaatggcttcaatttggccctccatgattgtcaattatgtgaacttgacctccgtggctaccaatttacatgaaagtgtggaagagggagcaacaaccatattgaaataaggttagacaaagctttcgtaactcaatcatggttttgtttttttctaaagcttctctgtccaacttcaacttctcttcatctgatcacacccccatttttctcaaaccattacctactgatagccccagttttatcaagcttttgcgttatgaaaatgcatggtcacgcgagcctctttgtagttaaattgtgaagagctgctaggtttcgaatgggagtctttctcttgctgagaaaacacatatgtgcatctctaagcttagtgaatgggatcagacttaactggaaacttcaaacagagattgactaggaacaagaggaaaatggcagatcttaaacaaatagatactcctacttcggctcaggatttttcaagcaagcattgtacttattttgagattttagctcaataagaactttactagaaacaacgatcgaaacaattctggctacactcgggggacaagaatagcaagtatttccatgccaccgctagtacacataaacgccataaccagattgtccaactgtaaaactccaatggtgaatggaaagactggaattcgggccttgatcaggtaatcaccgattactttaattctctttatgctactaattttgcgatctgtggttcaatggttaatggcatccgtcgctctgttactgttgaacaaaatgatgctttattgttgtcagtcacacctgaagaaattaaacaagcacttttccaaatgcacccggatgcagctccggggcctaatggaatgggacctggtttttgctaacaacattgggacactgtaggacccgatattgcgcaacttctcactgatttttttggttccgaatgcttagcacttggtctaaacgacacacatctggttctaattttgaaaaagaagtagttttctacaataggtgacttgcgacccatcgctctttgcaatgtctcgtataaaattctctcaaaggttcttactaatagaatgagaggattgattgatcatgttatctcaccaacacaaagtgcttttatccctagtaggctcatctgtgataacattatggtggcctttgaaatcatgcactacctcaaatggaagacgacacaaaagaaggggatcatggctatgaagctcgatatgagtaaggcttacgatcgtgtggagtgggattatttacg

SEQ ID NO: 243480 - DNA, 2088 bp, Cannabis indica
gtctcattttggatatgtttgctttcttaactttagttttattggttagttgattaattgggtaatgtagaagttggattttggtagagaaatgaaaatttttgttgaaacaactttttcctctaaacaattcttttcagactaaacatgagaaattgattttatttttatcttccacattttattttatacatgccaaaattcaacttccaaacatagtagccgttggggagaagtaataattttttgtaacccaattgataaaggaacaacctcttcattatattttgtcaggaaggatggaaactacaaaagaacagtaattgcttgttttatacaggcagtatatctgcttgaacttgacagacaagagaacagaagtgaagaaactgctctagccccaaaatggtggataccctttaaatacaagctagttcaaaccttggttgatgaaagagatggatcgattttcggggcaatactagaatgggacaggtctgctgccctttctgagttaatcctcattagaccgagtggtgcaccaagagctgtattagcacttagaggaacactcctgaagagcttaacattccgaagggacatcgaagatgacctgcggtttttggcttgggaaagcttgaaaggctcaatcagattcaaagtggctttagaggcattgaaatcagtggctgaaaagtatggtagtagtaatgtgtgtattgcaggtcactctttaggggctggttttgctctccaagtgggaaaaacattagccaaagaagggatatatgtagacacacacttgttcaatccaccttcagtttcacttgccatgagcttaagaaacattggagaaaaagctggttttgtttggaagagattcaagtcaatgcttcctcttcttcttcttcaactcaagttaacagtgaaggtgaaacaagtaatagtaatagtaataataatagttggtgggtgcccaatttgtatggtttgaagaatcctggtctagctttgggaaaatgggtacctcatttgtatgtaaataacagtgactacatttgttgctcttatactgatcctgatggagcaacagaagaagaagaaaaagaagaaaacaagggcaacattggtaaagagaatttgaggcctagagcaggacaaatggcagctaagctgtttgtgatgtctaagggaaaccaaaagtttcttgaagcacatggattggagcaatggtggtctgatgatttagaacttaatcttgctcttcacaacagtaagctcataagtaggcagctgaaatccttgtatagtcttccaaatccaaaaacacagggaaaggaaagcctagcctagcatgacatgacaataaacaacaaaaggtttggttgttaaaataactcatttgtgtattgtgtttgtctgcaattattatttattttatttattatacagtgtggatactttgctaaaattgatattggatgaaatgttgagagactagtctcatacacactttggtcaaagcattatatactatcaaccaagccatgatatagtgactgaatttgtttttaatttagatgttctttatgcttttgataataagtaattctatgttaattgcatacagattttatttttatatcgttgataagaataaaaagtgaaaatattataggaggagcaagatctcatcctttatccatatatgcaatgcaatcaagatcattctagcatgcctaaaaatgcttagattctttaataaccaagtcactgaatttaagacacttataaaataaatatataaaattcaattaaccttaaagataatattaaattaaaacagaaatttttaattcaatggtgaaaaaacatactaaattattatactaataaaaaaaattaaaatttgatatcatatctttcgagctaaatgtgtcattgttacctcatgtcatttttaagatgaaactgaaaaatagcataaaccaccatatatggcaccaagcacacaaacaaacttctttcataaaaaaaaagcacataaataaactaatttgtgattacaatagagagagagagagagag

SEQ ID NO: 243481 - DNA, 7953 bp, Cannabis indica
ataaaaacagggctcaaaattgtcaaatacgcgacctaaaaagataaacacaattgttgtaatattcgtttgtattaaatatgtagaattattagttgttatataattttatgttagttggttcacaacaaatataactgttgcataacagtttcatcacagctgtcttaaagttcttctttcctttttagccgttgaagttaaaatttttttcaggcaaagacacattcgacttcttcttcactggacgacgacgtcgatgattgggtgttttcctttagccttgttagctttttttttggcaatggagatggagaagtagagccacaggtaatagccattatatatacgaaatgaaagatatataaaaaagactgataaaggagacatttaaaagaagaagatggcaaaggttatggctgggaggtgggtttcatgggttttaaatgtgggctttaaaagggtaatggctggaagctactttggactgacataaatggatatgtttaagtagtattttggtaaataaaagtttattaaagataaaattattgtcaacgccttatggagatatttttgtaaataaattgtcaatttgtatttttcatgtaaaaattttgttatttaaaatttctcaaaaatatgaaaattcctattataattaggagtgggcatcatctaatccaatctaattacaaaaagttggatatccaatttcaattggattggattatatgctaaaagttagattctaattggatttgatcggttattgatgtcaatctcataatccaattaaaactgatccaatccaattacatttatatatgttaaaaaattatttataataaaaaatattaaaaaatataacatatatttattagaatttttttgtgtgttgatttgtaaaacttggttgtttttttcatatattttgttctattttattatttaagaatgttgttgttttagttatttaaaatttttggttatattacacttgtaacgataatgcatttatgaaatattaaatttaaataaaaggtgatacttatagtttttacgtatttttcttcatatttttaagttaatattgaaattaggtgtgtaattggatatccaattaataaaacggtccaatccaattagtaattggattggattttgagctctaattgaattggattggatgatgatttttcaaattcaattactgattggattagattgaatgagtaaaaaaatattagattggatcggctgtccacccctaactatcattataatgcacaccgtttaccgttttttttttttttaaaaaaaaatatgaggatctaatatctctaggtacaaaggaaaaaaaaatgccctcaggatataggtaaaaatgatgtccattctccctatatttgtatttcaaattaatttggatttcaaaatttcaaaaaaagaaaacaaattaaagtctgtgttgtacattatgtatgcatttgataattaaataataatttaagaaagtttggtttttttttttttttggtcaagaagaaagtctttgttagaatgctgtaagcaaagttattacattagaatagaaacaaatgaaatttgataataagcaataaataccatagtaagagatttgtttacccaaaacgcactaaatacaggaaaaacttaaattatttaaaatataagttgagtaactaattgaactttgagtttcttatagattataatttctatatataattgtttctttagttcattataacatcgttttcacaaatattgatttattttctgaaaattaatgtaatgtaggcttatcttttcaaaatatatatataaaaaaaaaaactagaaagcgtccaaattgcttaagtgatcactaacagtcattagattctccttttccataaaacactaccacaagagttggataagagaaagtatgcacggacatactcacacacaaaataaatagatttggaaataataatataaaaaatatgaggtcaaccattagaactaatactttgacaagtttaattatatgtacaaacgtgtggtgaaatttgctgtataaaccctaataatacctaatctttctctacatatgacaacaaataaaccatattaataagaaaatacatatataacaagcactattctctcccccaccaacacttttccttctttcttttccctctgcctaattcaaacaaacgcatttaaaatggtgcctatcaatttctaccaaccaaactcaacccaacccaaccaaccatataacatcttccacttcttctactattaccgaattccacccttttggaactttttcactttactatgtacacaaagcccaaacctcaagcaaagaatatatataaatatatattaatatctatatcataataatatgccataaaagtgggacaaatcttctatgtatgtgtaaatgtgtctagcagtaactcctttgttgcttaagaatatgatctgatcaatcccaaattgtatagattcctcctcactaagctcccaagtgataacaacactgccccaccaaccccaactgcctcatcttcacttttccccttgttggtttgatacaccaacggcaattccttcactttcaagttactcatccctatttttccccggactgattcgatggttttcgaatccgccgagtttccaactgcgtctgtaacatagaaaaaattacgagctgtttcaccagaggtagatatctcagcccttgtaacatttaggccattctccctgaatgtccttgtcacatccgctaatagactctgcctatcctctgtgcatagttctagcctcacaccctgaaataagcatatatatagcaaatgattaagaatgaatgcctaatctaaaattttacaaaaatatcaaatactttgtgtcaatggattcttttcaactgaattgatttcttaaaattgaaatatacctctgacgctcttctttgaatggctgcttgtaaacattgtatcactcgttgtctttctggctctgagtttattgggacccatctttatgtcttatgtaaaattcctaataacaaaattgaaaagaacctaattaagttgaatgtttaaacacaatagctacatttttttcaaaaaagtaaaaaaaaacacaataactacatcaacagaaagctaaaatgagaaactattattactcaccaagcagcctctgtctctggatgtgttgatagtagcatggaaaaccacataatccatatctgttaatgtacaaactacatcaaacaaaagcttgaatctatctttgcactggatgttaacaatcgagtaatccctttctgtccagttttgtactgtcaccacagggcaatcctctggaaaatgcaagatgggctttctttcgtaatcgcggtctgcaaacatcatctgatgaagtcttctctccatgtgtgtgacaggcatggaaactaaggttttagcgcttagaatatcgttgtctcctttaagaacattccttaacaaggcttctatcctttccattctctgtgagtcctcaatttggcagcccgaatcagtgtcttttacgtagataagggaagcaattctaccgttgtgtgtccacaccttggcatccaccacgttgcattgaagatctgctagaacagcaaaaacctcagagagcaatcctactctgtctgttccagttagctctaaggccgttaatccattgatttcgttggatttttggtagtgaatggtagcaagagactgaaacatgttcaaacagtttcaacatcattagtttctaggctacccaaatttgccataaaaaatatatcagcttattttgttaaaataattaccttttcaatgtaactaatgacattttcatctgttaatttatctccattttgatcagtcacatggaaaactgcaacaaatcaagcaaaacccaggtcaaaaccaattcatgaaaacacaaatcttcattctaaaaaatagatcttttttggtcctttttgggtttctctaccaaaaaggaaagcaaaaagaaatagtaaatacttttcttttactcaccatccatgaaccatcttccatctgaagaaatgtaagcttttttaatggaaaggttcagatccgtaagaacctgaacagcttcgagtaaaattccatgtcttctagcactatcaacctgtagaacaagtcaagaagaaaacaaagaggattagtcaatttttttcttcaaaattgaaattataagcaacttctggtgcacgttaatgttgttttggtggaagaagctaaccttgactagagtcgcagtggagcaaacggcattgtcgatcacgaccctgtaagaaacacaagcatagaagcataaaggtcaagtcagaaacagagaaatcgcttgaaaagtcttaatcccaataagcatgtgtgaacataagaaaagaataagaaaacaagggcaagagaaaagtcagaaaatactaattaatactcgcataagaagactaataaggcgaaaaagtgttgaattcaatttctgggtattaaaaaattttcaaacatagaagttgaattaaacaaaaagcccaaaaataaatcaagggattttgatttaaagatctgaacaagaggaatacataccaaaattcaagaaaaactttgtccctacgatagataagacttttcttttaaaacaaatgataatagaagagaaaaagactgaaaatttttgggggtatggaactcaaaactaaaacaagaaaaacttcagttgaaacccagaaaaatttggaggatgagaaactgacctgggagtgttcatgcggaaaacgagcttttcatactcatccaaaaaagtaggccactccatagctattattgtttgatgcttcaataatcttcctttataaaactcttgggaggtaaacgaagctaaaaacaaggccaactggaacaagactggtttttaaagctttttaaaaacaaaagtgagtaggccaatcgaagaagattcttccttatatattttagctgtattaaaaacagagcccaatgccttatattcttcaaattcccttagctccaattcagatcctcatcgacggattcgccattaacaatcttcaccaaacacatcaacctctctctttctccacgatgagtttactgtcactttctctatcttctttctctctcttactcaatttctaagcgcaaagcatgccttggtcttaactcttctttcttacttctctttatatatgttgcataaatatatatattcttaagaaaagaaatattaaataatttaattacttgaatcatttattatttaattattattttgaaaacaaagccttcacatgcgcgactaatgcttgccctgcccgcacaaccctgccccttgctgcccccaccctgaccaactctctctgccggtcgaccaataaaaaacagccgcgtcatcctggttccacttgtagtccacctcggatgccacgtggactccgtattttgcttgtgttccactcaatttctaatccaggggaaattctttgatgaattaggaagggttgtccacgtggctttctgtcaacacgtcccactcccttctcaggatgacttaaattttaagttggcttttcgccgacccttaattatgacgtcagcaagggacaaaccaccggctcatctccgccttttctcgtgtctttgtttcggccggtttatttcttaattttccaaaactacccttggctagtacgagcaatctaatggcaaattagtaaaatcacaatggtacggataccgttaatatgagaaaagtttgattcgaatcttgcttacgctagataccatcgtgttaacgtaaggaaaagactttttggagaaaaaaaaataacttaatgacgtggctttaagtgattagctggagtgggcaatgcattaaacgcatcgctttaaacgttaggcgtggaggcacgttttcggactcattatgtctctgatttaccgttaactaacgacgttaaatcattttgaatttatgataaatgaacacgtgtcaaacgcagaagcatttgtcgatgaaaggcaggccacgtggtcccacagggaaaactgtgtctgacaaccacgtgaaagcttccagactaaacacgttcgctggtttgccgctgtctttctgataccaactttctctttctctctcctaaacgatccgttaaaacttaaattccccttcgtcgagccacgtgtagcaaggagatcaagccacgtatctaagttggaaaggcggcatccgttaaaaacgacaggtgtggcggttgattgcctcgtttatggtttggcgggaaaggtcagctgcttcccgccagatcggatgagatgtgggagccaatttttaggtatatccagtatccacgtattatattttaaaaagaaaaaaaaataaatttgataattaattaaagacaaaaaaaaaaatggagaggtaaatactaaatagagagtgtctttacgtacaatggaagagccaagtacggagtgagagtggggaaccaaaagaaacgtgacacgtggatgacagctcagacgtcggttactgggtccctaccagctttttaattatataaaaattaaaattggccatgctcttgggaaacgccgcgctttttatctcgggtttctctctctcgctttttgaccgttaaaagtggtttatttggcgggaaattcgaaaagcgtgtgaaggcgggagtacatgctgagtcagcaggcgagttgcgttggttgtgggtttgatcctctacaacggcgccgcatatttctccgtcagacactctatgcatgtcttcgtaaacatgttcctttgtgctattattttattttatttttttattatatattaagttaaccaaaaaaaatctcaatacgaattttcgtccaaatcttaatctgattttggttatgttttaattttattttgggaacacgattttgcacttttggttttttaaataacagttttcatgatgattgtgggtcctttgtagaaaatagattagaatttagtcaaagtaatacccatgtgagaggttagaagaaaaaagtcaaaattttggaacacaaacattaccgtggactgtaatagtagttaatttgtcctttacttctaagtaatattatttctttagaagctagatgtcatttttaattaaatttaaatatggttattgggtattgcattggaattcatttaaatacatgtaaattaataatagtgtgtgaatggcatagtaagattttgggttttcgtgaatgttattgagtaacacaaggagcatgtgctttttgtgaaatgacatataaccctttaatttcacaatactatattgttttgaatttaaagcacaggtaggatgtgatttgaaattaataatagggtacatttcacatggattttcttttatagcaacatatgatatgatgtgatgtgataaatacaattcatcttccctttactgttccttattattatttttattaatgttttttttttgctaataataaacagtaaatagagaaacttcttagattaatatttgtatcacattgagaatgaaactccacatttgacactttttatttttatttctttttaagggtatttgacacctttaaaaattaaaccacattacatttatattatggaatattcagataaataacttttttcttttaaaaataaaaataatatatatctataattattattgttgacgctaaaaaaatagtcaactctgtatcgtctgataagggatagcagcaaatgaaaaaaaaataataataacttaagagagaacactaccatttatagtagttcattcctatatccagtgacggacccaggtttttt

SEQ ID NO: 243482 - DNA, 3015 bp, Cannabis indica
atatatatatatcttacttaaatgagcttagatcttagttgatcccacaccatttcacgatcagagctagctctaactttatcccaatgtaaaggcttcaactttggttttggggtgtcttcttcattgtccactgagctagaaattggtggcaactccattggagaaatggaaacatttgaagtgtttagaaacacaaaaggccttgaaggtggtgtaagaacaggtggtttagagataggttaggccagttggggttggcaagaattggagtttccaactgtctaacagaaaaaggaggcggcggcggcaacggtggcggccggtggaggaggagctgtaagaggctgttgctgcttaagattactggattgttcccactaaagactcaacctttttgtcagagtcattggatgttcttggtgattcatctgaattgtgaagaatatctctctctggtgatgaagtgggtggagaagaagaaagagaccgttgcctagtaagatccaaatcgtataacaaaccatctgaagcattagaacttcttggtgatgatgatgatgatgatggtgaagcatctgggctctttggtaattctctctctggagaggaagaaaccgaagttgaagctgaagtaactcgactattattatcatcagaagctgagtttgataattttgaagaattctttgtataattctccattacttcttcttcgtcctcagattctgataatgataaagaagataaagatggtgacggagacaaacgttttcgatctgaaccatcttgattattattctccacacctctcaccggagataaagatggagacagagatcccatatgtggattcaaatcaaacgcaagtgaaactgaagccaaaacatcatctgggtttttaggagattcttctgtgtaattctcaacaactctttccggtgacgatgagtataaagacgatgaacaagattgttcctttcgaccataagcagccgattcagcttctgggtttttctccaaacctctcactggcgacgaagaagtcgaagaaagtagtgaagactgtctaattccgtcaaacccatctgggtattctttcaccgctatatctggaacattagacagtggagacaacgaaggagacagtacattcttctccttctccacattggatactctctccggcgataacgaaggcgaaagaacattcgtattatgcaattctggtggaggagaaggagtagccggcaaatctgaatactcaggcgaaagaacattcgtattatgcaattctggcggaggagaaggagtagccggcaaatctgaatactcaggcgacttgaacgattctggtcttaaaggactcgacccaattgagtgtgaacgatcaggagaagctgaactagacgatgagcatgaacatgaacttgagccactgcttctaaccggaaaagtttcagaggccacggcggcgaaagctctcctcgaacccgatccattaccaatggagcctctaggagagtaaaactcttcctcttcttcatcagcagtagagcccacttcgccatttaaccccaaactctgtctagcaagcggtggaagcgggtgaagctcaggagactccattttccgagcaccgccattgttacgcgagtcaccaccttcttcgattctcctcgaatcaaccagagtacccaaataaagaaactcagagctagtagaagtagttctcagcttatgagctctattattattactcgaggtagtcgtagttgttgcggtaatcacattcggttcaagattcgccggaaacaacctattactattctccgatctgtaagtcttatcatcggggaaatcacggttacgtctccggcgacagtaaaagaaaacgacaatggcgagtacgaacagagcagaaacgacagcagcgatagataaagcaacgagcttgtgagaagctggttttggggaaggagtacgaggcaagatcagggaagatatattagccggaaaagaagcgaaagtagcgggagaaggaggcggtggtggagcaacgaaagttgggaaaaaaggagcgtcagaaggaggagtaggggtagtagaaaatgggtatttaggattcgaattcgaattcgatatcaatggggtcggaggttcagagggtgggatggagtctagaggtagaaaaggttggtgaagaatcctactccgacgcggtgaaacgagaatggtggtggttttctcagtactggtacggaaagagagtaaggaaaacgataacaagtaaaacaagaagaaagagagtgtgggcattgttagtctcgctctctagcttgagattgagaaatggggggttgagaagatgaagcacagtaatggcagatatgatttggtagggactgtgtgtgtgtgtgttagagagagaaagaagagagagagtgaaaaaagaaaaaaaacgaaaaaaaagtgtgtttaattgagaatggagaatggagaatggagaatggagatgagcttcttcttcttcttcttcttcttcttcttcgtcttttgcatccagctaagattctgctgttaactcttgttttagctctcttctctctctctttccactgaaccttaattattaatttaaaattctaatttcaataattaactctaactaatttttttttggaattattgtatattattttttaattttttttttaaattactgtttaggttgttttagtagttttgatagatcaattatatttattagtctatttggatatttcaatattttagtatacttttttaggaatcatctcatatattattttttaatttttttttaattttactttgatagttattatttagaattacattaaaaaaaaatacttaaaaatattaatattataataaaattatttttaaataaatataatatttatggatgtattttaatttgacataaaattattaattttacataaataaatttataaactatatgtatatatt

SEQ ID NO: 243483 - DNA, 2674 bp, Cannabis indica
cttacatattacacacaaaagaacgctaaagtaatttgaaaaaacaaaatgggtgtaaaagcatggacatgtgcttccaccttcaactacaatatcctcttcttacccgccttcccaaatccagtcccgcgagcttctctgaattccaggcgccgtgaacctcaaagacagccacctctattgttatgtttgggcaagaggaagctcggcctctcatctctatccttaattctaagtggggtttccccaaacttgtcaatggccatgtctgcgcaacaagaattggagcttgagaggtacattgattcaaaggagggtttcactctcctcaggccttcttcttggatcaaggtgttcaagtttgcaacccatccactttactctcgactgggttttctttattatttcagtttttttgcttttaattgaataagcttcttggcttggttgtggatggtttaggttgataaagcaggggcaactgctctgtttgaagaggctgataaggggagtactaacaatgttggggtagtggtgagcccagttcgtcttaactctctcacagagtttggtagtcctgaatttgtggttaataaacttatacaagctgaaaggcgcaaggtaattgaatttgatatttcagatactgctcttgctgttcattgtctcataactgtcgtaattatacgctcaaacgatagtttcgtggggagatagcttacattgtcaggtttcagtacatagaatatcttcccaatgcttaaattttaccaaaatgatatgtaaacagagaagaaatccatgaaatagacagaggatttgcatgggctatttttttttatcagttttttgtgtgaggtccatgtttgagtttcataagaagtctagagttttgcttaatgtatcacaccatctgctagacaagcccaggaatagatgtctttttggataagctgatatatgatacatttttattcagtcaaatcctatgcaaaacggtgatgatatgatacatttttgtgtattaacattatggagaatcttcaatctattagcgggaaccttcgaggccaccttatacaaaacatcgtacaaagatataggccttaaatcctccatagtaactggactcctcttttctggaatcaaaacaacagatgtatcattaagtcctcctggaaaagggctgtgcttgttaaccaatctaataacatctcccccaacgatatgcgattcacaccagtctaatcacacaatatgtaggctgcaacaactacatatttgtgttctgctgaaatagatggctggatacaaattcataatgtccctccaatctgtctctgtcttaaaacaagtctttaaattgccacacactacatctgaaagacctccctgacatgctccgaacgatccgtcgtcagagtttacggcgccccacaggttcgcttgcgaggttcagccaacaactcgagagcaacaacaatcgaacacacaaaggcaacaaaaaattaatgaagaacacaaagcataaaatgaagaacacttgaggcaaccaaggaaaagctcactaaattaaaagtagtgtctttatacaatgaaaaccagctaacatttacaaaggaaatgacctttgtttataggcagccacaaatatctaaaaagcataaagattaaccaagcctttggttttcctccaaggcattaatgcagcccacttgggcatatggggagtgtcccatcgatttggggtttgcatcttgcccacttagagtgacatcaccatgaccaaaaccggcagcttgctaacttgctccatattcatattgtttgtaccctgacgcttcctcgatcgcttgcaatcagcgtgctacaagcaggtgcaacatcccgggaaataaattccaagtagctcaagcagcttgccactagttgcttgtctcgaaaatactcgggacgtacctcccccactcaagcttgcgacgtccccgttgcttcaccatccttaaaccgaaggatgtgatccttgaattgccatagtagggactctggttcccaactcgcctcagcattaggcaagtttttccactttaccaagtattcggtgtaccaagggattctcttctttctgacttcccacgaagacagaatgcaatcgacttctttgtcataggaagtcaccactgtagtcggggcgcgcttcgacactccaatggaagggtcttcgacactccacgaagaaacaaaatgttgtgtctagatccaatgttgaatcagaatatagagctatgacacagtctgtgtgtgaggtaatatgaatttatcagtttttgactgaatgcaggtttaagacttctatttcagtaaaattgtggtgtgataatcaagttgctcttcatattgcttaaaatcccgtgttccacgagcaaactaagcacattgagattgattgtcattttgttcgcgagaaaattcaataaggtctgatctccacaggatatgtgaagaccggagaacaactaggagatatttttacaaaggctttgaatggggtgcgagttgattatctttgtaacaagctgggcatgattagcatctatgctctagctttaggggaagtgttagaatattagttgtaaagaacttagagtaacttgtatttaatagtttcttattt

SEQ ID NO: 243484 - DNA, 2199 bp, Cannabis indica
ttaaaaaatacacaaaaataaatttaaaattatttgatactaattttattgatcaattaatatttatataattatttaaccgtcgtacgcaaagcgcggcctgtttcctagtttcattaataaacataatgaataaattaaagtaagtaaggttgccactaatttataacaatttatgtggcttttaagatgtacccacgtgcccattgaataaaaattaaattggtattggaacgtacctatacaatgatctgagaggactttaagaaatggttgtaagtcaagcatttgagaggatcaagacctcccagaaccaagatcaagacctcccagaacctacatcacttatgctcattctcattcctcgtcacgtagtttgaaggaacactactacaaactgtactttcgatatcgattttaacctgacacttatacttttagtgtcggtttataaaactgacacctattccagtcataacaagtcaaatttttaatgtcagttctaaaccgatactattgagttttagtgtcattttataaccgagtatccatatatatttttttgttagtgttagtttaaaaccgacacctttaagttttgatatcgttttataaccgagacctaaagttttataatgccagttataaattgacacttaaaagggagctaacaaattaaaaaattactaaaaatcaacaaaaccaaaagaacttaaaaatatgataaaaatattatttagaataaatcaaaataaatttattcattacatttaggatttcttattggacaaattttgtcatcattcaattcacattagattatttagaagatttactatttgacaatgagagagaacaagttatgctcccgtactttactaaagaaaaaatttgcatgctattaccaggctaactctgaaactttaggaaaaacagtggaccatctgagtattccaccactccaattccttttcacaattttggggaccaactgagtcacctctttggtatcccttgaagtatcatcgttgtctgatctttagaagcgaacgacactgacctttctggatttcttgctagaatctgcattaaagacattagaagcaaagtattatcaatctgcgaatagcttgattgacagaagctcaccatcacttttttataattgtcagatcttcaggcttaaagacattataagaaaaggtaccaatactatatattattaactgtcttagtgtgtaactttaaaagcaaaaacctcaagttgtaaagcctcttattcatatcaagaatggttacaaacattccaagcaattgaagatgtaagagctcagtttgtgagggtcaaaaagtattatattgtatgtcaaaaaaaaataaaattaaaatcgaatatatacaataactgaaccctgtcgtcccctctctgtctctatctatatctctatcattttgtctctcttcaaacacaaacccaaaagaaaacccacaaagctccacaaccaccactctccggcgacccacctccggcctccgaccacccccacacgccgggcaaattggaagcccaactgccggcgacctcaccccccaagcggcgctgcttctctcgccgccgtaagcttaggatcgcaagtcaaagtttggggtttcaaactttgaacggattttccggtcatctccggtgtctgtttgacgaattgtcttcaccactaaacttagctcgtcgaggagaacaacttacactaaacaatttttcccggttcgctactttttccggtgacatttttgtagctccgcccctttccggcgacgcttcggtgacatcgtgtaccgttttgacaaacggttggcatgggtgtgatccactcgtcgaggtggtggttttgatatacactacccctatttttggtgacatttccggtacaccgatttttactgccactgattattaatgtgcaccgcttaggtgaggcttcggaactccaaattttaactatagtcatattatatgttgttggactcagttttgaatgtagaatgtgataatgataattatttaaccatttaatggtataggtgagagtaatatgtaagattggactaaaacaattggagctcgagacttaagagcttaagattgtcttttggaaaaagtttaactactccgaagagttaaggactcaacttgattattgg

SEQ ID NO: 243485 - DNA, 1574 bp, Cannabis indica
catcatcatcatcatcaagtttggaattggaacagtagtacttctccatctccattaatggcttctccatctccaatggcttattctccttcaccttgtttggaagaggtgggttccaaccccgcccaatattattccactccctatgaagcctcaaattatggtgtcgacataccatttgtcgagttgagtcgtgcattcgaacagtgtacatcgaccactcattcatactctcaacaacaccacggaaccacctgttccgaaagaaaaactccacatcatcgcctgtcttcaaaacacgttgctcggccggcaacaatggtggcgcgggcctaacgttgtctgcattcaccgtttccctaaggggatgatcatgatcaggagacgatgaacggattccgtactcaacgtagtacaggataacattgcccttcatcttcgctggagaacgaataacagtcgccggaaagtaagggccggtcgatgcatggccgggttggtaaacctctactcgatctcccactttcatattggaagccgccattaaattaattaattcaagatccaaatataacacacacgtaccaattgcttaattaattaatttatcaacttaatttcacgaattagggtttgtttgtttttttttaagtggaaatgaaattaatgagaaaaaaaatgagagtgggatttgtgagtgtcaactctccaatttatcacttatttatagcttctccataatcctacttctattactaataggcaattatagtactcggtcaacttcctacttcttttagtaataggaaagtttgttggttgtgatttatatttccaacaacattttattatttatattctaaataaaatgtacaattaatatatatatatatataaaatgaggtgaggtggcattcttatttttttttatttgttttttaaaatttggtaatttttactcactaatgagttcttaagtaaacatcccacatgaatgatttaaaaagtattataagtgttgtatcgtaagctatatatataaatgattattttctcaaagttagtgttatatataaaattaaacatttgattgaaaatattttaacttaatggactcagtcaataacctatcaagattttattatttatatcgtgaataaagggtaccatcaatatatttataaacgaaatagcttctcgatccactaagtatagttctagttctacttctagtagtaatagttgaattatatttaaaattaaacaacctacttctattagtattaggacacttttgtgatatttatattttcagtaaccaccaatattttattatttatatggtgaataaaagttgaaatatattaataaaataaaaattataatgaataagtaattcattgccattatataatcgaaactagaataaagactgaagttccaattaaatccaccaccatattcactcaaccttataaaatgaatatataaactgtagttaacaatacacatatatatatatagttacattaacatatatacgaatgttacattatcatataattaataacaac

SEQ ID NO: 243486 - DNA, 2339 bp, Cannabis indica
tctatatatatatatatataaacagaacacaatcatcgagttttcttcattcccaagactaaaatcgaatctttactaaaatgtatagatacagagaaaaaactccatctttctcgtcgactcttctggaaaaaatctaccgttcgatcgacgaaggtaataatacaacgatggccgaaacaacgaaatcagataatcagcatttgaagttttacagagaaacaacaatggcggcgagaaaacagagcaaagtgaaaatttacagagccggtgaaaacgaagaagatgaaatagataggttgagaagagcttgtttaatcgataaatggattgagaaaaaagttggaaataatcgaagaagagattacaacaagtgttctgaatttgaagatgggatttttttcagttcaacttcgagttcttccgattcaagctccggtggtttttcttcctctgattctgattcaatttactttaatgcccccgccaggtcagcatcaaactctttcccgggcccagcactaccaaaaccggttcgaattacagagaagaataaaacgacgacgttttacgaaacttctaaactcgaaaacgacgacgttttgattaagtcaaagtcaagagctttaaggatttacagtaatctgaaaaaagtaaagcaacccatttcgccgggaggaaagttagccactttcatcaactctctcttcacttccggcaacggaaagaagagttcatcaaaatccgtacaacaaacccatgaaacgacgccgtgttcttcggcttcatcgttttcaaggtcgtgtctgagcaagaattcttcggcgagtagaagagagaagagatcggtccggttctgccctgacgaagatatccgtaaaaaaaaaaacgaaaatttcccggcggttcgagtaccgacggcgtggaagatcggaccttcgccggcgccggtggagaaaagtcgacgagttgttagtgacgtggcaaaagagtttcttaaagagtacagacaaaatcaacaaaagggttttaaaaacgacaatgttaagagaggaaacgatgtcgttttggttagttccggtgaagaaaatgacggcggcgccgcctttgacgacggagcaagttgttcaagttcggatctttttgagcttgatcatttggaagagcttcctgtgtatgaaactactcgtgttaataataaaaatcgagtcatttcttttggccgataattaattaagtaattaaattataattattattaaattaattttgttgattttttaaattaataatgttatttatggtatagagtatatatagagaatatagacagattgttgttgttctataaataaattttagttttggcactccttttatttgtcttgtctttatattttattttattttttgtatataaatggtattgattttgtgttaacacaatatgacaaaattcattattgatatttatttatgtttataaatatagtttgttttggatacaaaatttatatgcaaattacattaataatatagttatagtatattatatttcatatattatatagcatctaaatatgttgttgtatagagatatgttgtgaaatgattacaatcatgggttatgaagcatagaagtccaaaatggtggctaatgttttgaattaaaatatatatatatttttaaaaaattattaaaaaataaaatattattgatacttaatttttttttattattaatgtaattaagtgtcaggttttatataaatttaaaaaataatttttaaagaatatcgtaataattataaaacatcacttatacaaaatactagatacgtccaatatcaattctattttcctttttatgtggtcaaattagataattgaatttacaaaattttaacattttatcttatataatgtatttttttaaaaaataccatttattatagttgaaagaaaactatattatagttaaaatttatgtaaatatatactaattgaatatttttaaaatatgtgttctattaaaaggttaaattacatatataaatataaaaaatttatatagtagactttcgttttagtacatctttttaatttatctattttggtatcacaaaaaaatttagtctaatttttattttcatgatcgtgtaccttgtagttatttagacttacttataaattttaaaaaattataaatagtttacagtactaaaaattaagtttaactagttacctactatgagtataagggaaaaataattgtgctaataataaaatatgtaaatcttatttttaatattattataaactatttaattttttttttt

SEQ ID NO: 243487 - DNA, 4176 bp, Cannabis indica
gtattggaccgagttaacacaacttagaaccaaaccaatccaccgatccttaaatcctataacccgaagaatagactccaaaaaaccccacttaacacgatcgtatgccttgctcatatcaagctttagtgccatatagcccttccttccattagtcttccttttcagatagtgcattgcttcaaaagccaccatgacattatcaaatatcaatctacacgaaacaaatgcactctgagtttcagaaatggcatggttcaaaacacccttcattctgttggccaccacctttgatgcaattttgtaaagcacattgcaaagagatataggtctcatttcactcacttgggtaggatttttctttttcggaattaagacaatgtgagtatcgtaaattgaatccggaaacttccctgacttaaagaaatttcgaacaaattgaacgacataagccccgacaatgctccaatgtttttgataacaagtcagggtcataccatctggcccaggagacttatccgggtgcatttggaaaagagcactcctaacttcgtcctccgagatgggaataagtaactcatcattttgttcaccggatatagatggacggatgccatccaaaaccgaacccaaattaatacccgaagaacgaaacaagtcatggaaataacttgtgatgacactttgaaggcccgactcccagtttacccaaacaccattgttgtcttggagttggctgatactattgtttcttttcctagaacttgcaacggagtgaaaatatttactatttttatcgccggagtttaaccaatattgtttcgacctttgcttccaaaaagtctctcgttgagccaaaacttcagctagcttatctttgccttgcttgtgttgttgaatagaaatcggatcacgaccccattttgaattgcggatttggcttttacattgtttaatccgatggcggaaattcccagttatctcacgaccccacttcccaagagcctccccacacttagaaattttatcttgaatacccgtgagacccgaactcaaccaacatccctcaataatctgcttgcataatggttcacgaatccacgcattctcaaaccgaaaagaataatgagtagttgttgggaaaatacctttaaaaacaaggagtaaagggcaatggtctgaggtagagacctccaaattgtacaggatcggctgtgtaaacattgacagccattcacttgtcaccagcgttttgtccagcctttcttcaatccaatcgatgctatttctccctttttcccaagtaaaaggataaccaacaagaggcaactcggtcaaattgcaatctcccaaagctttgttaaacccctcaatcaatcgctcagggtactttctaccccctctcttctccgtttgtgagcccaagttattcatatctcccatgagacaccaagggagactactattgtttttgatggagcggaagagattccatgttaaatgcctcagctcacgttttggctccccgtaaacccttgtaaaccgccaaggagaagaccccaaaagctgaaccgtagcattaatatgattgaaagagaatccttgaatctccacctcttgaacatctttccaaagtaaagccaatcctccactgtgaccacgaacatccactacaaaacaaccttcaaaccccaagtgggctctaatgctttccatactagttttgttacataaagtttcacaaagaaataacaaattgggcttcttttagaacacaaggttcgataagaattgtttggcccgcaggttcccaagcccacggcaattccaacttaaacaactcatacctctgggcgggcctggaaaccagaacccgccaaaggcccattttttgagaggcccaccatatcttgctccatttcatctacttttcttgaatcttccttattctgtgggcccacattgccacccacactagaatctggtcttctcctttttgagtcaataattgtagtaattgttgaatcaaaaaaattcccattattattgacatgcaaagtcatatcttcttcattgactcccctaatatcctccataacagatcacctctcattgagcaaatcaatgtgattgatatcatatccattatttctcccacccgatccctctaattgctccaatgatacagggatcaaattaatttcctgttcagaactgccaccagtgaagccctgccttggttcgtcccgcaccaccactcctgactggagccactgtgatccaaatgttgagtgtcttctctatagcgaagccctcagttccaggctatacggtttctcctggaggtgcaaaggttttaagaaaagcctggggcaaaacctctccgaatgcccgattattccacatataaaaatagaaggttggaagtttttcgtatttgaagttcgcccagtaccaagaggagttgtctgaactaactttcatccttcgctttattggtttgtcaacattgatccgaactctaacccgaagaaaatcacgccaaacacccacaaagttgttaggatccgattcaatgaaagtgccgatgaaattccccagcgctgtaactacactcagggtcatgttacccgattgtaagttgtgcaattgaacccacatatccatctggttgatctcgacaagccgtgggttatcgccctccttgagtctagtaaagataaatggcttccaatcatatttccaagggctttcgtcaataacacgttgtatatcgatctcgtggtagaattgaaaaaggaataaattcagattgagttccttcacatacattcccatacccggctgccaaagaaacgccatcatattctgaaatacgttaaaatccgagactcgccccgttaaaagttttcccaccaaacaccaacgagtatcaattgccatctcctctgccctgctttttggaatccgtagtacttccacctcttcttcatctaagctaataagtcccccactattctccatgtctctcccagcaatactcctagacgccattgaaaaccaaacaaatgtcacagccaactctcaaaaacagagagacaaaaaacgtatcaggggatacgactcaagactataattaaataattaaataatcaaacctaaataaataaaaaaaaacgatctgtaaaattaatttaaatattaatttaattataaaaacattaattaaaattaatacctatccgtgaatctcggcttgaccgatctccaattttgccgtcatctcccgttgtctccgtcaatcactgccgatctcgcgagatagctaagtaaatctcggtcatacaggctcatgtgaactcctcctctgccgccaactccgccaccgccacgaccatctcggatcccgccgttgcaccactctgcccaaagcaaacatgtccttgatttcgtcatttccaatcgaaaactccgtaatctccatatagctcttcaagtcttgatggctcagccatcgtctccgtccttctccataactttaaaagcttcttccaacactccactgccgctgtacaataggttcgtcgtgcaaccgaggactcgctcgaactcgtcgtactcaaacatgtgtctcattatataacatatgtacatatgtacttttattaaagttgaatatagtctgagctccaatgtaatttaactatccataattaacgattgttagattaatcctatcataatccaatgattatggagataaatggaacaaaattatgctccttttaaaggaggctatatgaagatcttgcctaaccaaactaaaattcaaagaaaaacttaggcataaggaggactaaacttggaatttgacttgagcgtgtgtgagtgggtgagctattattcaataaaaatgtatttgatgggcaataagagtaggcgagtcaggcatccaacttaagtttccgaaatatgaaaaaaaattattaatatataaataaaatattaaataataaaaaaatataatattatttgatttagtgataaagagttttactttaagctaaaaataaagatcaattatcaatctctacttttttattttttatttaaaattatatttcatcatcaactaatgatattttctcaatacaagacatttgcacaatttgaaat

SEQ ID NO: 243488 - DNA, 1609 bp, Cannabis indica
aatacaattgtcatgttccaattgatttgattttcacttgggaccagttttcatttgtcttatttatttttgtatgtctcttctctgcaaggtaagaagggaccgatttattatccaaataatgcacggccctatatctattttaggaaactacacttgcaaatacaaagtcaaactctaactttgccaacatgtccaaatatgcttgaaacatttgagttagaaatatatgattggttttctctatatttttatagaaaacaaaaaaggagtagaagaagaactcattcaagtcataaacaagctattgttcttatacatttgctcacgttttatcacaagaaaccatgttttagcaccctcaaataaagaaaaaatgttgttctgttacaaattttagtaaatgaaagtttgtaacgagctaaggatggctttgttgcatgtttagatgtttaccttttaggaacagtgatgctggtgtttggaatgggtctgtacgagctgtttgtcagcaatcttggtactgcaaagtcactaacagaggaaaaaggtccttacgcatcaaatttatttggattattcactcttaaggtcagttttgaactattattgggttgttttggattggtcactgcatatagatcattatcttgcattatttattttttcagttgggtaatcaatgtttatgaattgtatcttacaggaacgaccgaagtggttggatataaaaacagtgaacgagctgaaaacaaaggttggacatgtaattgttatgcttcttctaatcggtttgcttgacaagtgtaagaaagcttccatcaacactcccctggatttgctgtgcttctctgcttctgttcttctctcttcgggttgcctctttttactatctaaactcactgactaactatccataagcgatttccttgaagacatatttacttttttatttcacatctgaatatctctttctgtataagtataaatgttagcctttagatagcatttttgtttactaaatgtggttagtttctccgtgtggtatacaaatatataatacatgtgtacctgtatgtatattattcattacaaacataacactaatgaatcgcattggacttgttcgaggatcccataagcttccctaagaattctaattaattcccgttgacactattctcctatatatatactagtagaaaagtcacgtgccattaacagtatattattatacttttttgttttcaaatatattttgaaagttctagtaattccgaaagttaagtaattgattttggtatgaattttgatgaattaaagttaaaaagataaattaatgaacactaaatttacaagttctcattgtattggaaatcaaacaacattatctaaaatgatttacactacttaactcttcaatacaatcaagaacacggatctaagctcacttagatccaagaagacaagctccacttgctttcaccaagttgaaatctctccagcagatcagtctgaactcttttcagacattgtaaattcacactccttcaacctttaaagatccaatgaattacgatatgcaagtcataatcaaagaaaacagagg

SEQ ID NO: 243489 - DNA, 5163 bp, Cannabis indica
aaaagaaaggaaattagataccttgaaatttaagatttatttattttaaaaaaaattatcaaaacaaatcgaattcagttattatttatcatttttaaaagataaatttactaattacttaattagtatttaaaggaagcataaaaataattaaaaaaaatagttattcctattcctatcctaatatttatttgtttgagacctatagtatatatatttagtttttgagggtttcattatttagttttaaatttcacacaaaggatagtacacttacagtagttggacttgtggagcatcagaatacgacgtcgtttcgttctaaacttcggcagttattctacgccttggttggtccatcagatctgtttggtaactaggaaaatcttccgatagaaaagaaaaccagaccttggactagaaattagcttcagtctcgatcatttagttcaaacggcatagaaagaaaatgtaagtgagccaattggaatttttttattttttattttgaaaaatttattatttcattgaaatcgatccttgattgtccattttggacccaaattcttttacgtcttcgtgtatgttgtatgtgccttaaactgtttctatgtgactataaatttcaattcaatgtatactgactgcaatgcaatgggtatgggttggtatattttttttgttcaatgccttcatcatagtttagtatgtagtttttgtgtagaacagtatgtggtttgtgtttatttttcaggacccttttcttttgattaaatgagtttcattgttgataatctcatttaattcaatttaaaaaggaaagaggggatttttctgctggtgaaaagtttttttattgacaagtgactgtcattattgatattctatttgcatagattgtaattaaacccaaagaagcaattactaaccatagagatgttatgtttaactattttgtaatggaaagaatcgaggggaagtgatttaaagaggaatgagaaggaactagaaattggtaaacttgtttcttgaataaaacagggaatgcattattttcattctggtccattacagaattgtaaacatgaccttagatatataggaccacctaaaggtaatataacttagtgtttgccaactttcttatgtgtttttttttgttttctttctcatgattagtgagctggagataaaatggatgatagttgcgttgtttgtgcggaaacacttgaatgggttgcatatggacagtgtggccaccgagaggtctgctcaacctgtgtcattcgactccgttttgtctgtgaagatcgatgctgctgcctctgcaagagcaactgtggagtcatttttgtcaccaaggttagctagcgtgattgttctatttttccttttgggggaattagatgtcataaaaactagaaattatttatgtttctattaggggtttcgaaaatccaattataatggctgaggagaaggttaagtaatgttggcaagtttgttttgtttgtgagtcactgataaacttattgcttcaaatattggttgtttttgattctctcttctactccctccctttcaattcatatttccttaaaaagttatccaggctttaggatattctactttgctcttatttctttaattcttgtaacaatgatccaggctttgggtgattatacaaaggtgataaaggactttacaaattttccatctgattcaacggagggtcaagttggggaatattggtatcatgaaggaacacaggcatattttgacgattttgatcattacaagatgataaaggccatgtgccggctttcatgtagtgtttgtgataaaataaatgaacaaaggagtcaaggatcgaagagcacaggggaatttcaaaatgttgaacagctgaaaagtcatttgtttcatcgacataaactgttcatgtgcactttgtgtttgggaagtaggaaggtgagttagatttcaatggtacagtcgttcttgtctttgttcatatgtttcttatcaagagtggtattttagtatctctgtacataataccaatatatatcgtttgccaaaaaacaaagacaggtttattgcactagtgttctatgtatttgtttatattgatcattactgtatgtcatggacatccgctgagcttcttatcattttcttattatcaggaacattttattctggtatttgttttcatatgcatgcatatgtataatttcatgcatatgtataatttgtatgtgagcaaattgatattgtactgtgatatctgatgttgaaattatttaccaggttttcatatgtgagcaaaagttgtatactaaagcacaactaaatcagcatacaaggagtggcaactccgaggttgatggcagtgaaactgaaagaggtggatttatgggacatcccttttgtgaattttgccaaactccttttttatgaaaaaaatgaactttactctcatatgtcaaccgaacattacacttgccatatatgccaaaggtaactttattattactatttctctctggactttagtgtaggctttttttaaaatatatatatatatatatatttatacacttatttgtgcatcatatttatcttgcttaatgcaggcagcagattccaggaaattttgattacttcaaaaactacgattacttggaggtcagttgtgctctgtttactttacttactagattctatgcttttctaatattcgtttcttagttgaccccaaaaattcatcttacagaaccattttcgtgaagcacatttcttgtgtgaggatgaggcttgcctagcaaaaaaattcattgtttattcaactgaatccgaaatgaaggtacctttttttttcttcgtactcattttttttctttcgttttcactctctttggcctgtgcacaacttcacttatactatgatgtaaaatttgtctcacgtgaaacttaaattcttgtagaggcataatgctaaggagcatggagggcgaatgtctcgccgtcagcgctttgctgctctacaggttattatgtcactgaaaatcatgcctgtgaattattcatctacattcttgctacatcattagatccaaatgcttcaattttctttttgttatatatatattttttcctaccagattccagtgagctttcagtataaccgaagtaatgagcgagatcatcatggaagacatggtcatcccttgaacttggttaatcttgcaacttccaatgctgcgagtgttcgtgacacttcatccattgctggagcagtttccaatcttagagaaacaagcgatttggagtcagttgttgtcccatttgaatccttaaccacaggtgatcgcgagtcatcttcctctcatgctttaagacaaagcttgaggagtgcaccattggaagattcatcctttccaccactccctgtggctccaagtagaggtcaaaagaaaaacaaaaaatcgtctgcctctgcctccaatgcacgtcctcaggcttggttgacagcagattttcgccctagacctgggcttcctagccctaaccggctaaggcctgtcgcaaattctgggcttccgtcaacatctagatctcctattataatccaaagtgggtcgacaacaacaaatttacgtccatcaccatcttctgaaagcaccatctcagttagactgataaaatcgcatgaagttgcatcatctagcattgctagctcgtcaagaaattcagttaactccagtatggtcactgattctgcttcaacatggaaacttgtaggcagcaacaggtcttttgacaactctacatctagttttccacctattaatgtggcgcaaactcgtaaaatacctacaagcagccagacattgccaaagggagaagatgttaattctgccaacaagtctcttgtggaaagaattcgcattgctttagaccatgatgaaaagaactacgctgcattgaaagaactatcttcacggtttcgatggggtttagttagtacagaagaatatcttgcctttgtttgccagtttggcttgtcacatcttgttcttgaattagctaaactctgtccggatctggagaagcaaagagaactaattgagacatacaatttcaacacaaggaactgtggttctaatgagaatagtacagtgaatggcagtagccgtttaaagaacaagaaaattaccaagaaaggtaaagagaaatgtgaagagagtgcaagcagcactacttcaaaggaagccattataagcagtacgaacaaattggaatcaaattataatgtcttatcacacaatgggtttcaaacgaattgtcattataatgagaacgaatctattcatttgaagaaaacttcagagaccggtggtggaagcaagcaaccgaaaaaaactccaaagttcctcagaaaccgacttggcagcgatgctgcagctagttttgaacatggtagtcccaataatgaaggaaaaatagatgacattaaggatccacctgaagtattgccagttagaggagtttggcaaaatgggggtggtcggaaacttgtcgaaagtacccagagagatcgaagaaaacgttaagtgcaaaactcagtattgaagcttttcttcattctgttaaaaataccacacaatgtgtggcaatgcattggttagtttatgcaatgttatggtacttaatatttacattctctttatggcttgtacccattgttgttatttggtactcaatgcccaacattacatgaaatagtaaattaggaatgttaaaagggatgagatgtaaaatggttttaaacttgaaattaagttaataaatgtctttttttttttttacaaaaattaataaaatagctaaatataataaattagttactaaaaattatacaaaattattacaataatatataataaattatatacactggttttaaatttttattaaatatatatcatagtatttaatatattgtatcactaaaaattaatataccggagtaaaaaaaattatataccacaaaagaaataataacaatactaaattaacaatcaaaatatatatatttttttaaaaaaatacttaaaatatatattatgctaacaaaattatatatactactattaa

SEQ ID NO: 243490 - DNA, 5687 bp, Cannabis indica
ttattttggtaatctgtttccattagttacttttatgttgaatttaatgatgaattgattatatacagagttggttataccattaatggtggtggtgtggtcttgtactggtacagctacagtggcaactaactgaattattttgaatgtgtagagaagaatggatagacattgtggtgtccacttatgtcaagtcagcaggcactgctgcaaatccaatgccccccaagtacttaatttaccgctcaggacaaaatctatttatttatgtggcattttatttcatcaattggagaaagtaaccaaatatttcttggctgcaaatgagcaccatagggtatcaacccaagtcccacattggaagaataaacaagaattttcttgaatatataagaattcagaaatgggttgcattatgagactatcttttgtttgtgacctgtttcaaggctcaatgactcaatgctagagtttaattcaatcatttttcggactaaaaataatggattttttttctttttcaagattaattataaaaaacacctttagtattgttgtttttttttttttggtcgctaataaaacaatttaaaaagaatcatttggattgttcttgaggagacaattctcttcttggcaaatagcaatcatataaatttaattctgaactagacatgttatgtggcaattttgcttaaaaacaacaacaatttatgtgatgtttaatacagaaatgttaaaaggtttattggtgcaattaaatatggattaagaatttttatttgtgttatgaaaatctgagacagttcatagtttttcaaataatgaataaataaataaatagtcaagtttttttttcatatctgtatgtactgtctttgtcttgaaagtgcattgttgttttcttagctgtacttgatgtgatatacattattactataactatatatggctcttattttccgtgtgtatgtgtttgaatattgtaaaaaatccaaaaccaataaacggctaagattgttcaaaattgatactgatgattcttcataccctcaggattataatttgagtactgtaattgcagatccaaaaagaaaaagaaaaaaaagatcagtactgttatttgtttggtgaactactgtagattagatagattatgaaatttatatcattatagtcatattaataataaattattcttgaaaaataacaccatatatttagacaaaagtgtccagtagaatgggagaagacccaattatcatgtatccaaatagatcctcaaatctaattactagactacatagaatcaaattcatacattcttaactatgaaaccaacaacttcaacatgttgctaaccttggcaacaaaagccaaaatttataatcatacagctaattaaatttagttatttaagcatatgtgctctttatctcaagcctaaaaaagtcctaatccagaaattcatgattcaaattcaaacttgcattaaatctgtctctatgttttgtgtgtgaatttctttgtaaagctttcaacttgagtctaccatttcagcaaacattatacaaaaacaaaaataaagatgaaagggggaaccatagattaactgttaacaaaacaacaacaaaagtctttaggcgtacttgacaccaacaaacaaaaggaaaatagcacacataaggataaagataattaagttttcataacatgaaattagattcaaacggttcgaaccacattctagacccctttccatgacaccgcctcgcaacacagttttcatctttcatgcatttggcattggctcgttgattctcctctcaagctgaaacagatatatgtgaaattcataagaactaaataatgcagtgaaatttgaaattgaaataaaggtcactatcagtaattggtagaatgtgaatcgaggatcattacgacattatatctcagaagaattttggttagagtttcgtagctgtaacagatctattatcattatttggaaaaggaattaagcataacaatattctcttcttgtgtagggtcctttttcacaactaagttggattctaacagcagagatgcgcaagatgagaagaacctcacaaacagaaaaatctattaatgagtaatagttactcatattctacatccttgatgagtaaactagagtgagatagtttccattacctgacaaatgatatcaaacttgtcttgcagaacttgaaacagttgcttcatgtgatgtaatatcaaaatgcacctgaaatgaaacatcagattgtgaagatttgcaagtgaaaaaaataatggaacaaaataaatatatatatttttgtattattaacatagtgaaaaataatcatactgatgtcaatattgggtttactgcaaatattgacactaaccattagtataggaacaaaagaatagtaagatggacatcaatatttactaatattaatcaataatagacacataaaagaaacagcacctatatttctaacacaagaacatctcaatatagaaaacttggaatatattacagatcattcatcaaatgagaaaagttaaaacttctattatccagcattcgatgtctctgttagagcaacgaaatgagcacaaaaaaaacttaatgactactcgactcagacaatccatctctttcctatgaactataaatgtactttgattgatatattgcagatgtcattataatgattgtattatcttcctttttgatccagtactgccagcataacacatgcttcagatattaggcaacgagccaattttatccattacaaattttgtatgaataagttataaatatccatataactattaataataatataagggagttttcacttcaaggcatgtttgtccctgtatcattttcacctaaaactttacttctaaaaccaatggattatacacatatatcagtgctatatatttatttgggatgatgaaaatatacttactcttctttggatccacgagcaatagcattcatcatatcgccacaagcaagtgccatacgatgtataccaatgctggaacacaaaagtcaagacaagtagaaggctcaattaaattttacattattaaataaaatcaaagaaaagtacaaacagaaagacatagaaaagaaaatataaatgactgtgaaacagaaaaataaattaaacaagcaataacattgtggatgacataaggcatagcatacatatctccttaaaatgttactacattgaactttacttaaattttcacttttttaataaatgatcataacagaaatcatatttcatacataacattcctctagattgaaacaataggatatcaatttaacatgcattgattaataacaaccacatttgagatttctacagcttcactcaatggaataatattggtaagaagtcgtaaaaattatattaaatggaaggggtgaaagaatcgattgctggtctctgatcattcatacttctaagcaaacatgcttctctttgtagaatattccacaaaggccacgatcatgcatgctcgtgtatatagtagttagttataccgttacagcatcgcaaacaaccaacataagtgaatcataatgccgttacgatgaactccaaataagacaagagcatgtattcaatgaaaaagaaaatatatggaaagttaaagcctcatatcttttcacaagaacaacatgtgtggaaaactaacattccttatagcatcgcgacaatcaacataagtgaatcataatcatgtaatgaagatctctgcttaagacaagcatttattgaatgatagaaagaaaaaaaccgccgattgcttatcccatatcaggcgagcacaacacgtgtgacaaaataatagtctgatctcaaagattcaaaaaattatcaatgactataagatctgcaacctaataaaagcagttacaattgttagcttagtgtagggagtgtaacactcctttcattaccatgcagtactccctttgagcttgagacaatgctgttccaaatcatcaaaattcagatcttgttgctccctgtaaattaatatcaatgaggacaaagtatcagcaaaaaaaaaagacatacacaacagggtaaatgaaagttcatagcacatatacaacaatcatatagaagactaaatcatacagtgtttgtgtcatagctcttaaggtagcttgagagtcactgcgaaaattgttcaggagctctataaaagagaatggaccatccattctcttcactgagtaggaaatgttgaaatgaaaatccacatagccctgcatcaacaagatcagcaacaaaatcaactcaataatataatacatggtcactattttgtaacaagtacacaaagtcctatctttttatatacaacttccaaacctccaaatttccaaactgcaatcttcaagggacttataaacttatttacatagaaaatcaaaatggtatagcagacacacgatcagcagtatgtaagtgaaactgtcaacaaagcataaaaaagaatgcttcttttctagatccagttaaaaatatattccaaaatgtgttttctatgtgttcattcttcaccagcagccacactagtacttccaataccaacagaactaaacccacatcaaaatcttctaacattcatacaaaaagtttattcagtacatagatcaaacagtatctaagcatatacattgtcacaaatcacaaaataaaccaagccaaacaaacatgcatacactcataccaactctctagaaaagaaaactagaaaaaaaaagagtacctctagctccatggaagtcataaattcagagagctgctgcctgagaacatccctatccattggtaagagaaaaatgaagaaaacccagaaaggtttttggattcaaaaagggaaaagagtaactaatgttgggaaaatgagagtgaaaatggcacagccagtagagggtctggacacacatatatatagagaggagtagtagagaagtgggttttgaagaagaagctggttttggtggggagagtgtgtagagaagaatccattttggaagcaaagtgaagtgaaacggttagttaggaagagagagtggcagagcagcctcgtatggaatggtatgtgtgcttatctgtatcagtgtcatatttggaatctataataagagaaaaacgcttgccttgacagttacttaaatataccatatttatgaagagccttacaactcatttgattaataaaatagtaacaataataataataataaacataaaccaaacttttaaaatataaatgaaaaagaaaagcacccttttcaagtcttcaccataacccattcattaatttcttgttagagacgaactaataactcatgctcatgcatgctactcgtgccaaacaaacgttaatttcttccctttgtttttttttttttttttttgtgagtatttattgtgcctagactattataaagtgatactttataattagttagtgattatgtatctatcatgtttattaatgtaaaatatgtgagaccaaatactaaattatactaataatgatattacacaacatcacaagagtgttaggccctttttttttttttgtctttttaaaagagagagagagagagagagaga

SEQ ID NO: 243491 - DNA, 2559 bp, Cannabis indica
ttccccatctttttattattattgctaatttttggcacgtgccccaaataattatatttacaccggcaagttatagttatactcttttactaagtttatcccaattagacactattttttataattacaacccactcgatttactaaaaataatttcataaacctaaacttttactccatatcaaattagtttttcaataattttatactaatatatgcctaaaattatttacctattcaaattctatcccaatcaattaaaaaatcaaaactctttatctcactcccttttctctatctttctctgctccaagccatcaccaaaagcctcctttcaacctctattgtatcgaaaccccaaaatccccatttaccaacaaaacctagagtccccaaatacccttggacgcattcaagccattcgacaaaacctagagacacaggtcctccgtctacgagagtggcaacgaaacccagccagatgcccccaaagatcacctgcgagcatcgtccaaacagataaggccatccccatagaagacccaccctcaaagccccataatcggttggcaaaaaaggttagttgattttttcttattttctttttattttttgttagatgaagaatttttttagttgatttagtttgattgatcattgtatgtattgtaatgaactgcatttcttggatttctacgagttttttttcttttttttgtttgagaccagagatgatggtggtatggtatttttggtcaaattgtgattatcgttaggctatcgatatattctcgatggttttgtcttgtttataatgttcttaccaaatttggtagttatcgatagattatcgataaattcttgatggtttcatcttttttacagtgttctcaccaaatttgttagttatcaacaagttatcgataggtttttaatggtttattttgggtaagtattagatatttatcaataaaatatcaacactttgtcaatagtttctcgaagattgcttacatgttattttgtatcatttttcgtgattatcaatagtttattttgttagttgttgatagtttctcgacagttttgcaattgtttttttaagcttctttatgttttttttttttgtcaatatgggtctttatcaatagtttttcgacaatttctcaatgttttatcgatggtttattgttttggttttatttgtcaaatcttttttaatattgatagtttgtcgagcgatagtttttcgattatttttcgcgtgaactgtgggtttttttagcatttacaaatgtttccaaagcttatagtttcatcctccgagcattttacaagtcatgtgacatatagaggcaatagagtatttaataaaattaaaatgcagtttgatgcatatgattttactgatagggcaaaggaaagccctttcagccagttttggagggctaatactctattcgtttcttcagtgttatttcaccaattgatgttgcataaaatgttgagaaggcagaagaaatgcagatttacattggaaggaacaagatcaaatttggggtggtcgagttttgcactaattataggccttaattgaacataggaagccaacagatgaggaaaagagtgcccacttgagggaaaactggttgataaacctgtatttcaattggtccaatagttgaagacgaaactacttcagaatcagttcttatacggtaagactctagaagacgtgtacaagttagggttgtgtttatttgttgaggcaatgttactgggtcgtgagagtaacgctcacatttcgtttgtgttaacccaaaaactttctctggtgacatggacattaatgtttaacacgtggcatgaaagatgatgtcacgaagttgagtagacccaagtcataccagtcgacctgggaggggaccctagccctatgccaaggttgacttcaagatcccaggatggaagtttgaacttcaataaattgaatccaacccactatctttcagtattatgtaccatgaagagatggagtaacctaatctaaggctcgggagttgaaattacataaatctgcaacccggaagccaacttgggcacctaaggtttcacttggtgcccaagttgacatcctcaactagggtttcagtttttggggccgtcttagtgccgaggggtcaaaacttacattgagacatcaactagacataccacaagcatatttgaggcatcagaatcaaatcggagcaagatgattttgttgggatttaatgtcctaaataaaactcatttcaatataatcttatttaataaatagaagattagaagtcatttaatgtaacatgtgattttcatgattatggtttaatatacaatttctgataaatccataacatattgttattcacaattacagtgatgtcatcacagtagaaggtaattgtgattatatgtttcaaagcttaagtccaatgattcatcagtgcattgcatttacactgatgtgataatcaatgattaagtttacttacaccttggaaaagtgttatgtccttt

SEQ ID NO: 243492 - DNA, 2473 bp, Cannabis indica
aatgtagagtgtggagtttttttataatgactggagttaaataggctaggatccgtgtattgaaagggagttaaataaagttcttcaaatattcaacttgtcagaattacatctcctttccgggtgattttcattattaaagctaaactatttaacaataattatcaaagttaatcatgcaatgttgggaccgcccggtatctttcaagtgtagctatgcacatatttttaactttatagccatattatgtagtgaataaatacataacatatatacatacacacttttattctctttgtaattatctaatttcacatatagcagatctagaaaacctctctttttcctcgaggaggagcttatactttacaaaagaataatactaccaagaccaagaaagaaataataaggaattaaaaataactaaactaatagtaaaactaataagtaagttgagctatatagaatattgtataatgtacctgaaacatgacaatgatgaatatgaatattgtgtataatgacattgcttatatactgcagagtaatgcaaccaccaccaacaatgtgtacgttagctcctctcccatccaaagttttgtagctattaaagatgagctcttgggacagctttataagcatgttctgtgggaacacaatccacagtggctccgtctgaatgacggcataccgaagcgtcccgggcttcgggttgacagcatcgtcgtcagagctatcggtgacaatgtagtacttgccacctttacctccgacggcatattgtccaaacccgattgcgcaatcggcaaggcgctgccggttgttgggccagtccgggtcgcatttccaacaatcatctataggattaccggttaggcatgaagaatatgttgatgaggattggtctcttaaggatgtttgtagcatttcccttcttgctatggatgcatttactttcctgtaaaacagtgaaaaagataaatgttgagaaatacataacactgtatgttaagaaaaagaaatgataacgtggaaagtagagagaaaacaacaggggtctctgttttcaatacctgtgaacatcatgaacaacctgttcaggaaagggatgctggccgggaagagtgaggttaaggtatgcagcaccaaggtatgagaatgagctcagaataagagagattattacaacaatgcaggttctttgaaccatctttgaagttgcctactagtgagtgagtgagaatagtagtatatatttaaaaagttcacactacgtagtaagaaaaatttcagggtgttttctagtactttttaatgcttctaaaaattggagttaagaaagtaattagaatgggatgaatttgagcttcttcttctatgagtagtgatttagtggagaagatagtagctttgtagtttgtactacatagaactcaccacgctcttctctcactactaatctattttcttcttactgtgcttataagcattatcaatatcatttctagtctttatttataatcattgtaacggacttttcatatattcacttaacgaggtaaaagtataaagaaagggagagagaatggagaagtgatcccgcctgctctagggaaatggcctctctaatgacctcttttttgggtaatggtgggtttgtttataataggacaatttaaatgaccgaaataccattggggtttttttaataggacgtagtatatgatgacatggcagtatcccattaggccgatttctactaagctcttgtcatatggaggctcagagggtaggtaaggaaataaagttacccgttgtgctgatataaatttttgacttttttgacttagcaacagtataaagctttagctactatagtttgaagttaaccacactggtggttaatttgtagaaatttgttcagtgtaatttaagagctcgttgggttattggttttacaaaataattagaatgtctttttcttttgcttttggtgattatatttaaggcgaattgagtcccttttcatatgcttttgaaaaaaaccagtatatctaattagttagatggtcctacgtatagaatccagtttcccacgtacatacaatatatgtaggcctagctcagtaaccaatggaaatggcatggtgcttctctcctatcggcctgagaatccggggaacaaactgtcagttatttcatcatttatatttccctacctcctttttcaaccctaatgccccactcagaatttcatttaaaaatcattcagctgcattgatagggtataatgatccagtttactaattatacttatattttaaagataaatttgtggcaaaatcatgatagagtatattccaatagtaaaaatttagaggatgtttgtggacatattagagcatatgtaatggtaatattttggagaatgtttgatgaggtagaaagcttagggggcaaaatatagatatg

SEQ ID NO: 243493 - DNA, 4899 bp, Cannabis indica
ctgagctcaccaggcagctcttcaagtgactttgaagtgagtagcggttttccaaagacctaaaaatccatcatcacaactattctgaatgaatagatggcaaaaacttatggacatttcacttaggaatcgagccgggggaggagacatttccatctcaagttgtggacttacatcgtccagcagggtgtgcttgacattttttcatgttggataggcatcttctatacccagaggttgctgtgaccatccctcggtactctgagcaatatccaatcattgctaggactaagaagacatactgccaggtacctccaatcgatcctcatatagccacttatggcaagaggaagagcccaccatgttgagcaggctgaatagcttgaagccagccaagctaaagagcctatggccggtcagaaagaggattcagaagccgaatatgcttagcctacaatgaggcccaagactactcgaaggcatcctaaggattgtgatgtgatctaaggtaaacccttgggttcttacgtcgaggctgaaaggcctctcaatagcaggggtcaagcctcataggttggggttgatcacattaaggacgagaaaaccgtgtcgcggattctttaatatggagaaggggagagatggaaatctcattgatctacactatcggctgccaagcttaatagcattatcaagaggggacttgtcagtcaagtccaatgtatcaggcccgctccaggccatcttccttaccatccttaactgaactggatagcatggtctggtccccacgctgagcaaggggcagttctttctttgcacccatactttaaggatatagctaactttttcaagttgtgtccaactcagattacaccaaaaggtatagaataccttttaacactattcaacttgtatgttgaacaaggttggccgcaaccttttcctttcgaagtaaactattactttgaactaaaatctagtccaaaccagaataggattggatactttaatttgacccagcaaggctaccagtggttgggggacaccagtgatgcagccatgtcaaaaatcatacgacaaaagttattccatggcttatgacataaaaggtgtccactagttcttccatagagtccccacttatagccagtcggtccccaaactgaagttaagggtagagccaaccacatcctatctcttcctactacttgttgcaacatttatagactagcatgtgaggagaactttaggaagtacggcctaacccttctggtgaggatgttgaggctttgaacaatccttctaaggatccaagcaatgctcttggttagaagaagaaaactaagaaaaataggtttgcggctgaaaaataggcaatgctcggacgaagactaggaaggaccgagcccttcggaggcatcttgcatgaggtggcactattggtgatgccccagttctgattaagcctagggatatgggttagtgggacctgctcggcctgtgccagcagacaaaggcaaaggcaaggttgttgtaagtgaggacaactctaatgattcttcttttgaagacgaaggcccactggacaatcctccctaggtagattatcccgaggtaattgatggtagtaattcttttacatttacttgatttttgtgtttataacttgtatactgaccttattgcttttcttttacaaacatggcttctaggatttaggaccttctgaagaggaaattgggcagcccttcacctggtcagtcaaagcccaaggttttttggatagaggctacatcagatgtgactcaggccactttgcctccacctctgatcaactagcccgtgattcaagatccttcacccaaggcaatacctcctcctcctcccaaggcaccgggtaggcgtcttctaacaagtctgacaaggcgaaggaggttgcctagaaatacatggttaagtgtcttttttatgttgatgaatagctcgatgagctagatgttgactctctgaactatttgacggccatcaccttgaaaaatgtggcatttgtaagttcttttaatactttcttggatctttactcatgcacggtgcaaccttattaattttgttttttcttgatttcaggctctcttgaagcttttacatacccatgctaaggttaaggctctccaatagactttaggtagaagattgagaaaaaagacactgagcttgccaagaaagatacccaacttaaggagtagggtgtcgagcttaaggcacactgagctcgaaaaggagaaagttgatctagagtcgacaaagaaagagttgagggaggtgaaggaccaataagaaggtatgggctagctgcttgctcaccgcaattaggaggtgactaacctaacagtggaaaatgccaagttgaaggagttagatcttgcggagaaaacctgcaaggaaaagcaaaaagaacttgatgctctgcaggctcatcagactctcaaggatcaatatacagacttgtccattgagacgttttatgagtgctacataaacaatcccaagggcaacttcacgtatatggatactcatcttcgcaagagcctaattgctcaaggcaaggagttgtttgtatccaggctagtccaggatagcactctagaggcctctgccaaccagaatgaaagaattggccaagcctcaactgaggtgtttaccagccaaacaaaagacaacaggcaggtttctactgaagcatttgtcagccagggtgcaaatgaggcaccttctgcgtaggtttttgctgaggttgcaggttcagttgagcctatcttggaggcccaagttgataatgctcccacccaagagtccaagacccaatttttgtgagtttgaatccatctacacctcttactcttcctaacgatatctgatgtctttactttttcatgcttttactttgcactttttaatttgtaaacacatcaaatacgcctttagagactaatagactgacttgtggactaaggttaattaacacctgaaccacgtaaaaatcttcatctctttattttctacattttattatttctttagttcttaaatattaagtttctaaaaatctcaataaataaatgtattgtgttctaaatacaaaatagaagcttaaatgcatattatccatattgaaatatgaatttagtttatcaaaaaatcacaaaattacaagcctaaatcataaatggaaggtcaaaattctaattttttatatttttcgaaaatccccaaatttcttgaacacgaaccttaaatcctcaaagaatcaatcaaagatgactctaataccacttgttgtaattctttatcactcataaagtatatagtatcaagattaatttcacatataaaaatattacatattattagaagtgtgtataatcatatatccaaagcccttgatgattcaaagaggagaaaaaaaatgaatagcggaagcgtaccttaattctttgatagagataattaatttagtgatgatcttataggtagaatagatctttggatgatattttaagaatacaagacttattaggattctctctagttctctctcttgatggggaagatgagaatagagttgttcttgtttcttgaagatcactaccaatatataatcacatagttaggttattaattttaagtaattttaatttggtcccttaataaattaaaaatatcgcttaaggtatctacacatttagctcatgatactttaatacctaaaattaaaaattactaaaatgatcaatttatttaggttaaacttcaaataacaatataccaatatatataaacatatattaaaaattttaatccaacatataattggagcatcaataataaaactaattctctattttagctaaaaaaaattatatttactcatcattactttattttattttcacccatttctaaaatcaattcctccatattattttgggagacaaattttatcatagaaacaattcctacaaagtttgcatttattatccttagtactctcacaaggaaattccttcaaagtctgtttattgttaatatatccttttattttaaagaaattagttattttaaaaaagaaaatcacaattttctaccactattaggtgaaaaaaaaaatgcaactattataaacaataggccatatcctatccgtatgtttgggacggttttgaataaaatatccgttgatacgtttacaaagagccaaagccggatatgactatgagtgtgagatcgattggaaaagaaaccacctaattataacattaaacaaatattaatttatatatttatatatttcaatcaataattgcaacgaatttatcagggtgttgggtagctcagtgggttgggtatggttgggttactttgattatctcgagaaagcgaatctttgttcatatcataataaatttacttacgatccattccttccagtcccaactatgaattcaacttacggatcgaaactgcggagctgcagaattggcggttaaggtttcagatcaagctaagctctaatactggcgacaaactcagttcggctggcttgattgggttcaggtgagctacgtttcgaccaacccatcggtgcaaagtttattctctgcgtgtgtgtgtgtatgtgtgtcgatttgtgattggatggatatgtttacaaaaaaataactggaggaatctcgagcatctttgataatttcgctgagttgggatgaattcggatgtggattagccaacgtttaggatctgttttttctgggttttaatttctttcgcgggaacataactgggagaattctaagtcaaaggtagctcaactagattggacacgagaaattcactaac

SEQ ID NO: 243494 - DNA, 6678 bp, Cannabis indica
tatttatatatatttttttttcttgtctattgaccaccatctgtttttcatttttcaatctatttttttaaaaagaaaaatgagttgaggtaagatggaaaagatgtacaataattgctgaggttggagtttagttgtgtgtataacactaataacagtaataaaaaaagaaaagaaaaatgacataagaaaaatgagaaatgattgattgattgatgtgaaatattcaaaagagatattgataaaattttggtgaaaaataggggcatgtccatgcaagtgcaaattaatttagtccactcattttttagcaactctcattatctaagaagttgcccttttattactttatttattaacaattatttatttctaaaaaattaaaagttaattttaaacctttattcatgtgattgtcgttgtatctttcctattacataaacaaatatgcatatactaatattagctattatagcaaagactagttttgtttcaatatatcaaaccatataaatatttggtctccttttttaaaagagaaagataaaatttgagtaaaataagagtgcaatttttatagtaaaataaactcttggtgggcatgggcttgtatcatatatgtacatatttgaaaaatactgcatgtaggcaattatcaaactaattaatttgggtatgaaaataaattattttaaatactaactataaatttcactacctgtaatcatactactagtcatgatcccatgtcttttttatcgtgactcatgacaaaaacccaacaaaattaagccacatgtggggtcccaaaaagtgacaggagaaaaagaaaatgaatagttgttcttgttcacaccttgcgaaaggaaactaagctaactatagatataaaccttccagttctattgttatatgatttggttaacaacattttttaaaattatataagatcaaatataataatatgatcccgaaggaatggctacatatctattcattctcatatttatattacgagcattgctattaagcaccagtagtacttagcaccttttcgacatgtcgcgttgcgattgactagtgatacttcctaaaaattattatattaaattatatgagactcgatacttaattggatcaataatgatactgacacaataaaaaaagtactaaaaaaatcttgtgtcactatatgtgatagttctaggtggcaaaattatttgggtcctctaaaaaaatcttggaattgactgatttaattaattagtatgtgaagtcagttcattgagctcttaatttccatagattccccaactacctcttcaccaaagtcaagacttttggtcacttgggatgtctgtctcttcaccaaactagaaaaagaagtcagataataacgatactgttaggcaagtgtcaagtgtgtgtgagattatattggtttaaatttaaatcattaatttttttaaaaaaataaaataataaaataaataaagtcattttctttgtgtttcctctccacactttctcaagccatttacatctagttttatgcagattaatagcttattaaagcccaaactgaatatgaaattgactgttttgattatgtaaaaatctacttttgactttgagcatcccatgcaataaaagtttggactttgatcattattttgcattatacactcgttcattggctgacaaaagttgaatgaagaacaaattgtattaacaaagcactttgatttcaatattgcagctgaagatcttgaagctggcattcagaaaccgaaatttcgaaccgaacccacgttgccaatttatctcaaggtaaaaaaaaaggggggaaaaaagaaatagaaactaagaaacacttaatcaaaagtagtcatgcaacaaaattttgcttcccaaatctgcaaaaccggtgttgaaacctgatgtgatgatgatagttgatagttcaagaattttgatgtggtacttactatctatttggacaggcaaaaaggaaggagattcatctagacaccaactacgggaaccatagaacatggctagcaaatatagcaaatttgatcaggttcagtcttgtacatagtttcattctacatgactttagtgtacaagacttgcccttctttccaaaccaaaacacaaatgcttaacattagaatttataggacgaaaacagaactgcttttttttttttcaacaattgacaaaactagcttagaaacatgtactttggtttaggaagataactttcacttgttttcccgagccctcgaactaacggctctggaatgtagaacatagaagaaacatcaaagacataaaaatattggaaggaagggtatggaaatctgatccattttctcttcagagtcgtaactgtgttgcccttatgttatgttgtagtttcaaactattcaaagaattttttctttttaccgtaaagtactaaagaatgaagtttattattaacccttttgtccaaactgtgaatgcagttcaaagaagtaacatacaagataactataaaaggaatgagaacaagtgaagagaaagacatcttgcatgggattacaggttcagtaaatccaggagaagttctagccttgatgggaccttcagggagtggaaagacgacacttctaaatttgctcggagggaggatagtgcagacatctgttggtggctcaattacttataatgaccaaccatattccaagtacttgaaaagcaagtaagaattcaattacttataatgaccaaccatattccaaatcagacttgtaatgtcaatgagtaaccaaataatatgatacataatgcaggataggatttgtgacacaagatgatgttctgtttcctcacctgacagtgaaagaaacattaagatatgcagccctcttacgactgccaaagaagctaaccaaagaggagaaggaaaaacgagcaatggatgttatctatgaactaggattagagaggtagagaaatttctctttttctctgattttcaatttcactgagaactcggcatttggcattagcatcggtctaaccagaggaaatttacatatgcaggtgccaagacactatgataggtggctcatttgtccgtggagtgtcagggggagaaaggaagagagtttgcattggcaatgagatcataatcaacccttccctgctgtttcttgatgagccaacctctggcttggattctacaactgctttgagaattgttcagatgttacaagacattgcagaggtaatgatcacgtgtaaccactagctttaatttctatgaatagcaggcacaataattggtatacaaaattccaagagaaaaccaagttccatgagttggtaacaattacaacagaaaatttagaagcaatatggccacagaagatactaacttgtaatattttgtattgcaggctggaaaaactgtggtaacaacgatccaccagccatcgagcaggctcttccataaatttgacaaattgatccttcttgggaaagggagcttgctctatttcgggaaagcatctgaagctatggattatttctcatccataggatgctcccctttaattgccatgaacccagcagagttcttgctggatcttgcgaatggaaatataaacgatgtttctttgccatcagaactagaggataaagtgcaaatgggaaattcagataatgatacagttaatggaaaaccgtctcctgctgttgtccatgaggtaaaaaattctgaagcaacctctctagatttattgttccttaagcaaagctataagtaatggtgtttttgttgtaaaacagtatcttgtggaggcctatgaaaccaaagttgcagacaaagagaagaagaaactgattgttcctcttcctcttgatgaagagctgaagtcagtgtcttgtagaaaaagggaatggggggcaagctggtgccaacaatatagtatactattcaggcgaggaattaaagaacggaggcacgattacttcagctggttgagaatcacccaagttctagccacggcagtcattttggggttactctggtggcagtcagatggtcattccctcaaaggtcggcaagatcaggtaacgccatcatcttctcaacgaatataaatttgactagtaaagttgtaaaatgaaagataaagaaagacttgaatgaaaaagatgtactgttctaaagaatgggaattctaactgttttcaaaaatgcaggccggactgcttttcttcattgctgtcttctggggattctttcccgtcttcactgcaatttttgcttttccacaagaacgagcaatgctgaataaggaacgagcagctgacatgtatagattaagcgcttactttttggccagaaccacaagtgaccttccacttgacctgttgcttccaatacttttccttcttgtagtatatttcatggcaggcttgaagaccagtgcaggtcccttcttcctaaccatgctcacagtcttcctctgcattgtagcagctcaggtatacataacatacccttttcagattcactatatagcctagtttaataccacacccaatttatcaagcaaacaagctgaaacctagggttttaatttgagaatctccaaagcaaaaatgatcatatatgtatgttggaaaattaaaatggaataatgtaaattgcagggacttgggctagctattggagctacattaatggacataaagaaagctacaactctggcttctgtaactgtgatgaccttcatgctagctggtggattctttgtgaatgtaagaatccatttctttacttaacaatgttcaatccccaaacattttctttgacctgttaatattaaattcaaataaactcactctggaaatattatattgaaaaagtaacacttttctgttgttgcgaattttcagaaagttccagcattcatatcttggatccgccatatgtctttcaactaccacacatacaggcttcttctcaaggtacagtacgggcacatgacaccagccattaacggaatacaaacagacagtggcataacagaagtctgtgccctggtagccatggtttttggttaccgcctctttgcgtacctatctttgcgatggatgaaactccaatcttgagcttagaaggaaataaaagtttggatacagttgcatttactgtggaattaaggtctcatcttgtggaggccaagtttcatatcaactaaggaaagcaagaaaggatcactgaactagagcttctgctttctgtaagcttagaatttgtgatagtaaggatttgaagagttcaacaaattacatgggggagtttttttttttcctttatattgaacatctttagttaacaggtggtactttcagaatgaaatggtagttagtatatcaagtctagttgaccaaacttgattggttgttatgatttagcaatgaatttttagatttcactagttaatttcaaggtggaaaatgtatgaacttggaagtctgtatgtgctttctatcagctaatctaaacaaaagtaatgataaaagaaacctctttattttgtaagaaataatgttgctttttctatacacgtaatttctctttcccctttcatcaatcctcaaaacaagaaagaaatcaccttttgcaatcaactcctaattttctttttttatatatataaagcatcagtcatacataccacttctacaggcccttttccttactttcatcataggagatgggaaaactttgatgaaccaagttgaatcaatggcggaaattgattcattgattgagctcctactaaggaaatggagagtgcatatctatgtgcattaacaatttgtattttgctcttgcaagcaatcaatgcattacgccaacacattggattttgtactttcctgcataatattcaagccagtgacctcagccaactaagagttcgaaggagggcggcatccaataggggagactttttctcaagccctgcaaagaaaaaaacattcaagtgaaataaatatatcttcttttgtttattcatacttcgtttttataagctagttttaggacattaatcattagttttatcccccaaaagtcaaaatcataccaagaaagataatgatggtctaggttccaacttgatctaagtatgccttatgacacaagttataaaaaaaatcaaatatatattgagttagtctatacaatgttacttaccaatatcagcagctacacggtgagcacacattactcctgagaaggctacagctattacgccttgtccgggaaagcagctatcaccaacacagtatagaccatctattgcctgcattttttcatatttgtaagctcaactgattcagtatgctcaaaataactatggacagtaaaccatcaactagagttaaatagctcactgttgtattgaacggcattcctagcaagcctttcggagttccacgaggcattggtccataagtgccgttatcgcgagctaggtatcgtctgtgtgtctttggtgtccccacctatcatgataggatatagttagaatagactgctaatcattctcagaattctcaaaaagaggaaatggagttagtctaaagcaacagttaacaagagaagtg

SEQ ID NO: 243495 - DNA, 3351 bp, Cannabis indica
aatcctcttgaagttgagtcagctgtgactccaattcggaaactctgtttgggcgcttcttctgaaactcaagtcaaagatgagttagtgactaataagaaccaaaaacgatagatgcagtatgaaagatactcgataagtgtaattggtgaaaatagacgatatttaaccgtcactttgcaaaaacaatggtttgataagttttgaaaagtggccttcaaataatgttaagaattttcaataggatgtcaagagtgtgagtgagtcaggaagatcatttggcaaaacaatgtagcatggcagtctaaatgttattttaccaaacacccccattgaagaataataattaattaattacctcagatataggacttcgaggtgacctacgatcaatgactttaggactagattttggagtcttatttgccatatttcgagaggaaactgaatcagcatccaatccagaagtcgtgagtttgcgagcagttcgaggtgttgttgctggtgatcttctttgaggcacttccaaagaaccagctctacatgtattcatagagaaatttttaaatatgccattatgacattgacaacatattgcaagttggagtataagttaagaagggatacaaaatttggcatgaatccctcccacctaacatccaacatctaattaatattgctaaaagaatcaacagcaaagtagatttcacaacaacttgaatcttaagaattaagataatacacaaaatgtatttacaaatccatctcatcatgtgcattgccatatttaataaaccatttcatatacaatcttcctcaagtttgctcccaactcaagacaattatattaaaaacataacaaatttacatgccaatgtccaactaatgaaatcttagtttaactaaaacaatttagtatagccttatttagtatacaacatttgcattattctctcaccatatggctagttaattattcataacaaataaataagtacaagagagagaccaatgtacaaatacatacacacacataataatacatatatatatatacagagagagagagagagagcatagcaattaaagggaaaaagaaataaaacttactttgattttggtgtctgcattttctatatctccctcagcctcagtttaaataatatgtattgtacaaagattgattgagatgcctcaaaaaccccacctgacccaccaaaacctgtgtcagtttcagagaagtctttgggtgagaaagaaacagaaaatagaataggttatatatgtacagactcattaaggacggccacctcaattcaaatcagtagaagtattgagtacaaaacctaacaaacaaacaaacaaaacaagtcacttacaacacaccatcccttcaaagaaactccacagaaacaaacaccactaccaccaaccaaatccacaagaccccaaactgaaaaattattaaaaaaatcaaaaaagtattataaagaagatgtacccaaagagttcattgaatagtagaccattaatcacataagcccctcctttcaactttttcactaccccttttgcccttttccccttctttttactctagtgcttctactagtctccacaacacataattaaagtcaaatgggtcaaaaagaaatgccaaggggaattagagttatttgcatcaattctctttaaatactgaaccgaacagtttaatgtttcacattgaaggaaaataataattatactgattacgagaatacttgagggaaaagaagaatgagggaatccctcttaaatgttcattaagtccaactactttaatagaaggaaaaagaaatgttagaaaagattaaacctttataagaagtaatactagcattagtgtatttttaaggtaataatctacacaaattagtgtagatactttccaagaaagaaaaatggtctcaaagaaaagtttttcattctcgaactggttgattcttcagtgtgaaatcaattaaaactagatctactgactcacaatttgtaagcaacgatctgaagcagatattatatgaacagcacaaaaaaaaaaggtgaaaacagctctaagtatgaaaaaggaaaaaaaaaaaaaaagtcttttttgctctaacaaagtacattgaaagtaaacataataactaactcctctccaagaaaaaagaaaagtaaacataataacaaaaaggaactaaactatttgttatgataataacacttctaaaaacacaaacaaaaaaaaaaaccaaaactttgcaacacaagcaactttcccctcaaccaaagacctacattttcattttaaataatttatttaagaacaacaaacaaatctaaaaggtagagattaagtgcatgacaacataagctattcaaacccatttaacaaaaacaagaaacaaaacagcctatttctcaaaacacaaacaataacaaaaatcatttttcttaaacacaaagtcgaaagaaatgaaaaacgaaaacccagattaaagaataagtaacaacctttatggtcttacaaggaaagatctctcagcttgtgaagatgagttaagtcctagtcttggtcttggtgacttggtcttttccaatagagaaaacgaaagagcagtcaaaaaccctactttgagctatgtttagaaggcaaaaacagaaggaaaggtttcactttcaggcatagatagatagtaggtctggtccagcattggtaggagggttaggtagcttcttctgcaactctgttttttctgtgctcacttcccaagtgagctgagtgaggctcttctttctttctctgtttcttctttttgttatttgtcagtgtataaaatatggagttagctagctatacgttgcgcgtgaggatctctactagctcacgcgctctcctttccatttgggaaattcacatggtagcatggtaagagaattgctataaagcaaactcataggtattaatgtcgctcttggttcaattaagtatcggatcttatattatttaatataataatttttaaaaaaattcgctaatcaatcgcaacgcgacatgtcgagaaggtacttgacagttgacaccactggtacctaataacaatactcagtgtgataatgtgtatgttgggcctgctacaatggctaatgacgactaccaaaattgtttgggaaagagtaaaagctcacactagggccattcaaaaaaattaataaactgtccaacctgaataaattgtacaaactaaaccgaataaatcgacaaaaaatacaactcgaataactttacgaaaaactcaaaccgtctaatgaatatattgggcaggttga

SEQ ID NO: 243496 - DNA, 3288 bp, Cannabis indica
gataattcatgcaaaacatactaaataaatataaatcaaccataaccacaaattcacacaataaattaatatttaattacctttaatatataaattaaattaaatattttgacaactaatttataaaaaaaaaaataaataaattctggccacctcctcttaatttagctcaaagtttccttaagtcgaatagcttctacaacttccaattgaacaatctcatgcctacatcttttacaagcctcaaccaactgccaaaaaaaaaaaaaactaccatgataacaaaagtaaaactgtacctctcaaaatcaacaaacaacattatctaaggtttcttcctcttgcagcatctacttctcaagaccacctctcgtccagggtcggccctgaaacaaagtgggctatagggaaattttttttttgggttcaaaatcggtaaaaaaatatataattttaaaagaggaaaaaaaaattgggcccctgagctgggtggacactaggcacaagcctaacccgcctatgcccagggccgggcctgctttcgtcacaaatgagtccatgaagaataattttctctaatataattaccttacaaatcataaatatttgatgctttattgctagtagtttatggttcatttagtttaaagtattatttacaaatcataaataattacctatgtagatgtaatttattatgtctgattaaacaaatttccatttaccttgaaaaaaaaaagaaaaagaaaatcagactcctcaactctagtgtgagaaagcaagtagctgatttgcatgccagctaggcattactcataacacgcgcctttcaattacgagttaccaaaaaaatatcacatacacttgtggccagctcgttcacctgcttacaatgacgaaaacacccccacctgttgccacgcgtagcgcgtgcgaacccattccaaagagagagaagaaaaacagagatgtgagaaagcgagtgacgaaaggtgagagtcagatatttcgaaaccctaaaatctgaaaggaatttgggaaaaaaaaagaggaaaatttgctataccggtacaccccactcgctcttgcgcctcgcgtgagtcatccatctcagatcgaacgaaggtccatctccaacctcctccttcttccttacttggtactcttcacgtctctctctttgttacagaacccgatttctctctttgtctccttttatttttctgaattgttttttggggtggtgaattttatagattacgatttgatatgggtagatggtgaattttattggtttcttgatatttagagtgattatagggtttgattttttttttaaatttttttcctgcaaattaaatgcgtgactttttcccattagaggtgatatttacgttatgtttcgagttttagttaagattgtgagtttatgtaatagatgtaaatgtacataagtctactaatgtagttgtttttgtagtatagaagtttgtgggctatgtgtattttataagctaaagctaaagaagtagtaacattgagatgttctagaataaatgaggattacccagttgaacttgcctttttattttctgatttaagtcttctgtgtaaatttatttgataggttattagttgattacaatgttagttggttatgatttatccacatgaatgaattctctctcccacccttgtgtttgtctaggagtttgacattgtcatctcaatgtctctgattatatggttgattttaaagctggaagtgttgactattcatgaaagatcatcttttgtgaatttcaaatctccccattgttacattcttgattatgattggatattcatttccttgaaagacatcaactaagatttaatgtagcttaatgtagcattaatatatgttaatgctaagcaaattattgatgacaacagatcaagaatttccttcttggcctttagaaggttgactgccttttatgtttgcctttaagtactagttacaagacaaagccaaagtatgaaagaaaaagagaagagaaaaaatggctaagaaagagttttctgacatggagtcaggttatggatatttacaattcagggtttatttttattgtgattaatgagctgagggtgcaagtatctcctgctttagctataaattatcttagttgtatgtaaaaaaattctttccagactgttggtgatgttgcactaactttgaaacagtttgaaagtcacccagaatctattgagatttaattaacatgacattttgccttgaattagaaatgttcaagtaaagaactcttaaaaattgtagaaaagcttttcctatttttgcacattgtttgggtacaaaattgtttgaggtcttttttgtggaggcattgaaaaagaaaaggctatttatttagaggcctgcttctgttgtttcgtcattgatattagttaccaaatcttctattgcattacaaagtaagtcttctttgtattcaacatttgtaggtgaaaaaattgtgcaattgctggaatggcaatttctatttaacatgtctgttacccaccatcctattttgtatgtttctagggtggttctggcttacaagtggaaattctttggtagagttatttatttgtatttagctgctacatcactaggttttattgttactatctttgttaaatattatttattatttgagtaaaattcccatgttataatatggaatttttcttccttttgaagattgtaatggaaccttaagatttctagtgatcatttatgtttaatttattggatatagatcagtgacaagataatgaataataagattaaatcttccagttttagtgaaaggtccctctttctttatctgcttgggtttatatcattgtaatatttttgctacctttgctttcttgtacctggttttacttggggacatttggaaagaggcatttttacagctttgggtgtattcattcatttgcaatagaagttgtttcctagtttcctgtgttaggcttagttatagccttatatgtttgctgtgttaagcttgtttttgtatgtactagtttcttctgggtatattggctgggtggatgtataagtttgttgaaaataattaagtagattggagaactgcgttattgtttttattaactctgtttctagtgataggaaagattaccccttcctgggattcagaaggtgaatattatcgggaaaaaaaaaatatattatcgagataaaatatacttgtatatttctgtctagttatt

SEQ ID NO: 243497 - DNA, 3733 bp, Cannabis indica
tcctttacagccaagtcttaacttcctcaaaacgtcgagtactgacaatacaactgaagaacaagtgttaaactgtctcagcctctttcccacacaccaagtacagattgtaatcaactatattcctcctttgcaatttatcttttgtgtgcaacctgtcaaacataactaaccataaaataaacttgtgctttggtatgctaaacctctcgcaaacttcttttcaccaatctactttgctttgattttgactcaacttataatcccaactaatttgatacactttggaagtgaaggtttgggtgtctatgcaactcttaaactgatctttaactaatataatttgtttccattatcagttgcttatgactggggcgctgtaagcccactagttggtatcccccaagtacacattatgaatccatttgatccataaattgtcttgcttcgatgcaatagcccaaatatacttgacaagtggagctgtattccatattataatgtctcgaaaaccaagtctcccagttgacttcttcaaacaaactttgctccatgctactttttctaatccacattactttgctatccatttccacacgattgacttgcatatagaattgatttcttgcaacaccttcttttggtagaatcatgatttgggaccaataagtgtgaatagctactagaactaaattaattagagtaacgcttcctgcaaaagacaaattacatgtactccatgcatgctccaatccgtttaactattttgtcaaccaaaatctcacaaccagctctagataaatgcttggcacaaattgggacccacaagtatcgaaagggaatctcatttttagtgtagccagagtaatctaacaatcttgaaatttccttagcctccatcgcactataataaacagtggatttagtttatttacatgtagacctgatgaatcaaaaaagcgctgcaagccttgttgttaggtctatttttaggttgttttagtctagtttcaggcttatttttaatgttttttaagtttcattattcgattttacgtttgtttttgtttttacattagttcgatgtttgagatgaagagaggttcacttttttgatgaaaatatgatgtttctcgagtttcttggtgatgaaatgatcaacttttgcaaaaaggaacctcatgattgaatttcttgacttggtgaattttagaggatttaaaaattctaatttttaagattcagcatcaaaggtcgcaacctttcacccaaggtcgcagctctccaatctttagagaaagcagtttttggagagatgttaagagatgcgacttttgaagcaaagttgctgcgcttgactaattttggcaagtttcctatttcgacttaataatgattggagactagattttggcttctatttgactttggagagaaattctaagcaagaagtgacagttggaagtggagaacaccattggacgactctatcttgtgttttcttcatctatctttactttttcatgtttgtaattgaatctttgaatgttaggatgaggattatgagctaaattctctttcagggttgttatgtgattctcttgaacctttttgtggatggattaatgctgtatttgatttcttcttcatctcttgttcaatcccctgcaatctattttatttttgcaactatttactagccatttataattattattcatgaatcaaattgaaatatgaaaagtgaggtttgagatgatatgattttttggatgcaaattcaatttagaatgaaagtatctaattatttgcttaattttctgatttgttgtatccattgccttttttatgatttaactttgccataactatataacgagttatcatttagattgagtttataaatcttaactagattatgaactgctacatgcaacttgtttattgaataagaagaagagtatttgggttccttcattaagaagtaaaagagtggataatagatgagcataattatcctaattacattctcattgttattttattttaattttattattaattgttgttattttctttgttcaaaaattttgaaaattatttaatcaaatagaaataaaagattgattgactggtaattggtgaatcagtctttgaggacaatactcagttctaccaactttattacttaaagcgatatgtgcacttgcgtagcataaatttagcaacacttgcaacatgagataaatggatataaagtcccctttacaaaataagaaaacaaagcataagtagtttagctctaattgcaagcatctgtcatgaaagttccttttctcctgaatttttttcatgattctcgataggtattccattcctaattaaaccacagaagggacgtaggatccccctaccttaaacccctcttggccttaaaacaccaatgcatcgatccattaaacaccaagataatataggaatttaaatacataccataatcagcttaatgatcttggaaggaaattgaagagcagatattatttcttgtataacttccactccaccgtatcatatgctttcttcaggtccaatttgattgtcaacctaggcgttgggccctgtttctagggtctcgggtttgtagttttctctccgagtttgctttaatctttattatctctaatgacaaaaaaaaaatacctcgaacactttttcgagaacttgattagaaatggcccaagttgatttttaacaatttatgaaagcagtctatattgaattcgttaagtgaattttttctggcagttgcaacattggagtctttggagttgcaactaaccttgaaagttgaaaattaattaggcattttctttgtgtaactttgtatatatacgactctctctttgactcattgccaacactagaacttaaagaataccttcactctaatttgttttttttaactaactaaaaccaattagaaaacattgttcttttttttctcttttttattttcttttttctaattttttctaaaagaccaattagaaaactttggagagcatatttccattcaagcagggccggtcctgagttgaaatagtccataggcaaaaaaatattttttaggcccttactataaagataaatagtattttttaataaaattattaaaaaaaatatacatatttttaaaaggtattttttttatttggcccctaaaatgagtggccctagaagtgagcctagcccgtctatgcttaggactgcccctgcatccaagatatataggcaccttatttaattaaaaaataaaacaaatttatggttttttttaatattctttaactttttttttttagattgtaaagaggaggaatttgatcttcgaaccttaagtgttgaaccactaaactatatctatgattacacctttaactttttgtgttttaatttgttttttattttatcttgtcttcaaaattaattttaaaaggaaaataaaacacatatatatatatatatatttaatttttactttaacaatttaaaaaatatatttgtctaaatgtattttattcatatcacgatatcttttagaatatgaaatgaaagaaaaaataaaactactaaatatatatttttagtgaatctactaatacactttcttcctgttttttgatctctagataactagatttatttaaatatatttttggctaattagaatttt

SEQ ID NO: 243498 - DNA, 3217 bp, Cannabis indica
atatataagataaaccgaccaaatcaaccgatgtacaaccctaacatgaacatactacgtcatgtggacgaaaaataaaataacagtactaattttctgagtaaaaaaaaaaatattaaaaaaattatataaaaatattaaaatttgaaatgtcgtaattttatgaatacaacaacagcaaacaaaatgtggtttatttcctaatattccaataaaaaataagatgctatttgatatttcagagtagaaattggcataaacatgatttcatctacttattgccaaaccttgttgaaaaattaggatgtctataatatatgtcaatttgttttctttccttacaaaaatgaaacttctagaattgaattctgaaatatacccatttaagtaacttcatcattaacaaatatagcacagggagggaagaaatggcctttggagactgtcaagagaagtttacaaaaagaaactaacgatttttcaaaatcaagaggttatatgaactcctattatttaaagcttaaaacacaatccttgtccatctgcaaaagcaaagaacaaaattagtggcctctttcttaagatcaagaatttactcaaatataatactaggaaccccaaaacttacggatttgccaagttctttggctttctcatcatcaaaacctagggatgccaatattttgtgaccagctgacaatttctcagaccaaacccctagaagtagatgagataccgttatttccccttcttcacctgtattagacatgatgagccaatgaatcaaagtgtacatacaattcgacaaggcaacaaaatgccatcaatttttacagccaaccaagattccatttgaattcaatgaggattatgtcgaattggagtaaaagtggtcgacgagatggttttagtgatcaacttgtaataattagactaaaacgccaattcctactgaagttgagtggatatttcttatgcaatcaaaagtcaaagtacctgaacttaagcaataaatctataatgcaggagcttatcccatgaaaatcaatgaaaactgttttaaatagaaaagtatgaaggttacttgcatgatatatacctgagcttagtttctgatcaacagcccagtcaagggctctctgagctggttcagttaatggaggatgctcgggactgaaatagtacatatcagattttccaagtaaatttacagtttcttctcgcaccttgaaaagtgtgattccattttctcttaaaaattttgcagctatactcgttcctgtagagaaaagtagaaaataaggcaaaatagagcacaatagaaaactctggcacagcagtaaagcacattaaattgagttaaaagccaccagctgagttcttagcaagagatacctcttaaagaacaagattgaacaaatattcttcttcaaagtttgataagcttagtttggataaaataattatttaacataaaaaagttcaaaacagatcaaaggcctaagaaatagaaaatcatactagaatcggatagatcccaaggccaaatgcataaagaatttagctactagacactagacactaaataaatcggcataaactacagattacagttatctacatcagtgagtgggttagtgataataacatactaagaaacagttccccttgaagatagtatacaacaatgattaatttatggtttttgcttcactccattataaaatgaaagtttcaccacaaacttatgctaatttaaaactatgaaaacgagacagactaaatccacgctataaacgagcaaatatcttaacaatttgaatacataaaagatagtatactttgaaggaggagtaaactagtctagaacatttcaagcgcaattattaacatcaactatgaacatgaacatcccaagtgaagtagcttggtaaaaagaacgagaaggcaaccctcaaaaaacatataggagaattaaactcaaaaatccccatcagaaataaataagccaaaataagtaaaatgttactgaccctcgaccaaaatccccatcagaagtgcttctgtgccagtattgggatacttgagctttctcgcttctaactccgccatagcaaacgaccttatcgccctcgcggaccatctgacaaaaaaaaatggacaaaattcaatcagacacccacaaatcaatacaaacaaataaataatcctatgaaatgaagcaaatagcaaagtccaaagaaatgaagaactcactttggggatttctcctgaggagtcctctctggtttcctgaatacaaatataagaaaccatggcaaatcattctcaacgaaacccataaaaagctgggagactcagaaccaaaacatacatacatttataaacttacgcagttgggaggctgaagagcactgtggcaatagctggccgatgcttcgtagccaaatgcatcaaattggagggccgaatcgagagctggcgaccaataaaggaggtggataggtcgtatcgattcagacgccatgagaggaggggacaagaagctctatagtggctcccggaagaagattgtgaagttgaagatggaacaactacgacagcagagagagtataggacgccataacaagcccaattacgagaaaccctagaaggttttttctcttggcgggatattatcttaatctaatctctgtatttctgagagattatgaatgtggaacagttgtttcggtctctgtaatctgttgagttgttttgtgttgtgttgtgtaggcagagagagacgccaagttggaagttggaacaagcaacaagaaagacactccttcgtctctaccaccaaatgggcctcctggcctagttcaaccccaaaaaatgggctttattattattattattggaaaacttacataatactaatttttaacctaatctttacaaaagtactgccacacggcaaaaataacttatatagtgtcttagccaatttttttttatatatactataaataccaaaacaaaacgaggcctccatcttccacacctacggacagaaccaccacaggaacaccagaacaatcgaaaaacaaccattaattctggttagattgagaaaaaacagtgaaatcgacgtcaagcaaataatcatggcaaaataacactaaaacaaattaaacaaaagaaaagaaaaaatgatttaaaaaaactaacaat

SEQ ID NO: 243499 - DNA, 2821 bp, Cannabis indica
cgaatatacacattatatatattaatataaaatatataaaaaaatatatatataatttagattacaaatatatagtattttttatatatatagataaatacatattaatgaattgaattagatttttatttttttttctttaattttcaattttaatgtttttatattaatcttattttatcaaaaaaaaaaaaaaaaaagagtcatcatcatcgtccccaatttgtgcttctgaacaaactttagccgcataaccaaccatccacctccactgccacccgaacctccatcaccacccagttgttgaactctacacagccagcctagcacctccgtttccgtctatagccgaaccactacccaggttcgcccaggaattgccaaagctccacctccatttcgcacagccagcccgaagaaccatttccaagcacatccaccatcatctaccgttcatttccaaccagccgccccattctcctccattaacctagaccaccagcatccatcttcacgagctctgacaccactattcgtctccaccttcactgtccaatagccaaaacacgaaccaacagctctgtccatgcacaaccagccacacacccaagtcatccctatgaatttcaagctccaaccgaagcttcaacatcaacactcaagagcaagagtttgaagtaccatcaaccaccaagctcagtccaatagctcaacctcgaagccactcacggaggattgtacctaattgagtaacaagtcaagtagtgccgaggaatccaaaactacaaatttgagccaacacgagttaatttctagtttgttgaataacattgaaaatttacttggctgaattgcatctttcgtgatcattgttaggttgtgctatttgaaaaaaattattgtggtggtatattgatctgatttatttaatctccgagttatacttgtaataccctaggtttcagagaatggattagcaaaaccctaactagttaattgtgtattattgtggaattatattattatataatttattataagtgaattaatttgatatatgacatgttaagaccccgttggtgagccagggatattttagtaattatgacccaagaagggtaaaactatgaatttaatttaattgtgtgcttatagactatattattatatagtaaacttgtattgtccttttgcatgtgttttctgaccagtcggtgcggtatagtcacaatcgggtatttcgggccgaaccgagatcggggccgaaatacatttttggaattttatatttgtattttattaatatatgattaacctgaaatttatttgaggttgtatgtgatgaaaatgacaatgttgcaattaaatccatgcttatctcttatttggccctaggggcattttggtcttttgaccatttatttgatgtttcaagaaaatgaatttttggtggaaaattcaaggcatttactctggttttccagtcctaaaacccatcccctcattctctctatttctcatctcttccaatttgttaattcttgaatattcatcttcaatcaagcttggatttgtgattgttggtgcaagtttgttggaaaagcttgaggtaattgcttcacctctaaatttctatgtttaaaggttgattattgtgataaattcttgtgctcttgatgttcaaggtgattgaatgcatgttgtagtgaattgaagtgatattgatggttcttatattgtttgaacttgtggaactttgggttattaatctagattattttagagagtttttaaagtggtgattgtgttagaaatctgagttctggttgttttcatgcatgaattttagttatggtgttcaagcttttggataagagattttgataattttagctcaagtttggagccttatcgtatattgtttaaatctaaattttgatgcatgtgagctttgattttgagctttaaatgtgcgtattagctctctattatgatagttatattatgtgggaaatgattttgagatatatgcatgattggggtgagtttgggtgagttttgatgcattttttgagctgctagaatggagttccgagttttcaacccaggcgtcgcggcccagcttttgggcgccgcggcccactcgcgtggacaaattgcatatagaacttgttttgttcataacttttgactcgggactctgtttgggacgttctttatattgttggaaagcttgttccgagctatgtgattatcaggaatttgaatgccaattttacaattgtgaatcccggaaattgtgactaggattatcgaaacttggtcaggagcatccagggatttagaatctccatgtttgcgggacatcaggtaagacagtagtttttacgtagagttaagcgcggtggcgctcatattttatattatgattgtgattaattgagaaccaagattaaggttattaccttaaaatgagcggttatatggtccaggattattaccctagtaattaaaagattttgagtgatatgccatggttaatatgttggaataaataattatgcgcctaaggcataattaagctagactcggtaagctagtaccttgagtttaattaaatgcgggcgagggttattaccctaaaatattatgaaggtaagaaagttatgatgtatggtaatattgttaatctagtaaagacgtgagttagggttattaccctcaatagatgttattttgagcatactataatatgttaaatgagtgattatttagtatacaagttagggttatgaccataagattctatatgttatagtat

SEQ ID NO: 243500 - DNA, 6194 bp, Cannabis indica
ttttttttttgaatattaatctttattaacaaagctcaaactacaaagaatgagagagatcacctttacaatatttagctaaccactcaggaaatgaattgagaaaggattgagttaattgatactcaaggcttctcttagctaatctatgtgcaatctcattatttttcctgtttacaaaagtgaattgtgtacaaaaggggaaacattggtgacgcttaatcttgttaagaacaaggctgacagtagtaagaatattgccttcatccttgaacgcatccaccagcttcttacaatcggttcgaatctcaaaacagctgctggtgtcaatcggacaatccttcaaagcagccaaaacggcttctgcttcagcaagaatcacagagcagatatttgggataagatcatacctgctgcaatattgttgccagaccagtccctccaaataaaacccaaccccaccgccttcttttccaggatttagagccgcatcgcaatggacacagtacacacccttgggggggggggcgggcgacagccagcaactctgtttggtattaggagcaggcattaagctggaatttttctctctgtgacttacagagttggggtagctattaagcacccaatcaatcagtcgagccccatccataacaggcaatttattccacagcctgttcctattctcccaaatagcccaaaggattttgatcacctcttcagactcctctttacacagttggtgtcttattccactagaagatcaaacatagagcatcctttactttctcgaatctgattatagtaaggcaataatttccacgccgcttttgccttgtcacaactccataacgcgtgggggagagactctacgttctgaccacattggttacaaagaggatcaatcgtcatgcccctatgaatcaagtttattttagccgggagacaattgtggcatagcttccagccaaataacttaatccagggagggagttgaagttgccaccacatcttccaccaagcgttgatttgatccatgttcgaacaacgtgtagggcagagattgcttccacgggtcactctatacccactctttaccaagtaatgcccatttggagagaaaggccaaatcaaggtgtcttccacttgagtatcaacgggggtgcccaaaatccatgggatatcttctttttggaaataaagattaatagtctctttattccagtcgccctcctcatttagaagcttgtgaacggtggtatttggagctaatcccgaacgacgatccaggatggttccatttgcgcgggggatccacttgtcttcccaaattctgatggttcttccatttccaactctccaacgggctccttctttaatgatttggcaaccccaagtaattcctttccaaatacacgaagctcccgaagggcatttggcctgaaaaaaagaggagttaggataatagctatgtttcaaaactctagccaaaagagaatgggtttatggatcaaccaccacccttgtttggctaagagagcttgattgaattccgtcagacttcgaaatcctaaacccccttcttctttaggcttacaaagctttgcccaagtgccccaatgaatctttttattatctttggtatctccccaccaaaaattagcagctaaggagtgaaggctttggattagcttttttgggaggcggtaacagctcattgagtaacttgggatggcttggatcacggcttttatcaggatttcttcgccagcttgggagaacatcgttgacttccaactctttagtttgttccaaaccttgtctttaattatctcaaacacctctttcttccttttaccaataaaactaggcagccccaaatatttggtgtgttgagcaacaagtgtaactcccagtctactagcaagattttggcccatttggttggatatacggctttcaatacttacttccgatttctcaagattgatttgttgccccgagagcctagaatatcgatgcagaatttgtgacatagtatcacactcttcttcattaccatcaaggaacacaaagctatcgttcgcgaaaaagagatgtgacactttaaccccgtccctcccaaaccggatcccatgaatactaccagccctctgagccgcttggataaggcaagaaagtccttccgaacaaataaggaaaaggtagggagataatgaatcacattgacgcagaccccttgaaggtttaaaattccctatctttcaccattaattagcaccgagaaagaaacactagtcacacacctcattatcttttctatccactcctcatcatatccgagccctttcatcattgtaacaaggaaacaccactcaactcgatcgtacgcctttgacatatccagctttaatgtcattttccttccattcccgaatctccttgttttcatacaatgaaggctttcgaacccaatgatagcattgtcttggatcaacctaccccccacaaagacacttttctcttctgaaatagcttgataaaggctgcgtttcatacgccccgctagatatttagccactattttgtaaaccacgtttcataagctaataggctgaaaatttgacattcgggtaggcttctcaatcttcgggataaggtaaagcagggtatcgttaatatcatcaaccggcctcctatcatttaaaatacccaaacaaaccttggtcacttcatcacctatcctcggccaatagttcctataaaatagcccaagcattccatcacttcccggtgccttctgggggtgaatatctcccattgcactataaacgtcttccttagtaaaaggcactttgaggtactcatttgtttcgcacgatattttgttcggaactattcgtttgaactcctccaactcttcctagcctgctgggttagcttcaaaaagctgctggaaataatcacatgctacttgacccaccattttattcccataaacccaattttcgttgctgtctagtagacccaagatagtgtttttcctcttccgagtgtttgcctttctgtgaaagtatttggtatttcgatccctttcttttagccagagtgcacgactttgttgcttccaaaatttctcttctttatctaagaggacattgtttttccgctcaaggtattttaagtgctgccagtcatttgtgtttgtactcctggagaggatggctattttgtcttcgaattccttgagccgcatattcatctctttcttcttgaccttgttccatttttgaagagcaactcaacacttggctagtttaatcttcaagtcccttgtcgtggtactacttccaccctccccccaagtcttcgttataatctccgagcaactttctttttcagcccaagcactctcaaaatgaaaccgagagtgccatctagccccataatcattgccatggttcctaagcaaacattgaaggaggatggggcaatgatccgaattgacacgatcaagttgagtgactttggcttcagggaataaaataaaccactccggattcccacaaactctatctaatctttcaataagattgttttgtctcccattacaccaagtgtagcggcttccctcataatcaacttctctaagattacttccatcaagagcttttcggaagttattaattaagtaccccggttttggttgacctcccagtttttccttgctttgtaagatctcattgaaatcacccccaatcacccaaggccccgagtacatccttcctatccttgtgaggagtttccaagattcacttctttgatttggatccggatcaccatagaatcccgtgaagcgccaccattgaccctcctctttcctaatgaaagaatcaatatggaaagaggagaaagaaaggatagtgcaatttacaatgttggaccaaagtaaaataagccctccacttttgccctgagcttccaccataaagcagccaacaaaacccaaagacacccgcaaagccccaactctcactttcttcaaccgagaatccgaagtgaacaccaactcaggggtccaccgagtcaccagggattttaaagtacggaccgtccaagggttccccatcctttgaacgttccatagtaagattttcatggctgtaggcgaccctgccgagcagagtgcgcctcttcctcattctgtccaatttttgaatcccttgcttgagaaactccaatcggcataccatcggttttacacttcctgttctttgcgtctttcttcacatccacctttcttttttgtgcctttgggaatgtctgttgacttgggccaaagacaaaagatggacctccttcgatcccgtcagtctcctttgggaaagtaattggaacatcaaaaagttgctaactcccaattggaccataggaggggctaactgttttttggagtttgccaaaccccatcactgtcttatcctccaccattctccttttccatctgttttgttcttcattgatccccgattcttccaattgcccattcccatcattctgttgtgctaattcagtgtcattcttcttgctttcttccattaagtcactcacagtatcattgatcattagtttctcagtcgaacatgacttcctcttctccatttcttcaacaagaggattaaatgaattcgagaccctcaatccctgacttggcagaattatactcgactgttccctattatccttttgtaattccttccttgaacccctcattccttcatgaaagccatcctttatctcattgtccaccttcaaccataacctgtaagcctttgcctgttcccctgctgcccttgtaatttctttgaaatccaaggagcaatctttttgattgtgtccgattctcccgcatcgaaaactcatgaaaggtagttcatcatatttgtatgccacccaaacctttgatcccccacacggaagcaggtaaccaggccaaactgacttgttaatcgacatccaaatctgaaatctaaagaaaccattagtcaccatcttggaaacatctgaattaaggattgagattaccgtccccgccatagaagccaacctcaatgtaatcttttcagtcagataatcagttggtacccccattgctctgcccgaaatagggaaagctgtaagatggttcttccaagattcattagtattcaccatctttcccaaaatcaataacccattagataaataccacgacatcttagctaagattctcgattgggtttgttcaaaagtaaaagaaaacgagaggaacatacctgtatcgtatttttcctggatctttatattccaatctgcctccttaagcctccatattcttcccagtaccttcttgagaaaccccctgctatggtctacatttgaaactagtcttcccctcagattgtatttagcgatcgtagaagataaactctggtcaatctcccattcttcttcatccgagacatgaagttgagtggttttggataacaattcctccattgcaggcgaatacacaccagtccggtacaccggaagcccttcgttgccgagggaaagatgaacctccgttcaagccctagcagagaatatcttgcaaaaagattatgtcatatatatggcaaaaatattcagattaacaatttcatatttttctttacatctattttatataaagtgttgctatgtaacagaatttttggtctagatactttttgaattgctacgttaactttaacggaatatcctattaactaaatatttaaaaaaaatatataatatttatataaatttaaatttaaaatactttaaatattatttaatcatattttaaaatttattagtttaactttaaattaaaataaaaaaaaattatgtaaatattttatatacagaaatttaaatttaaaatattataaatatttttaactttattattatttattttatatcttaaattaaaatggttgtaataaagaattgattgctttctattttagttaatgtaaaccgattcatacatcatatttttcgtaaagtttgggaataaaaaacctttatatcaaatttatgaatccagcctatatataaacacactcaaatttaattatctgagttttggttaagaatatagtaaataacaatagatgcattatcaa

SEQ ID NO: 243501 - DNA, 4961 bp, Cannabis indica
atactgtctcatacaagatgcatctgattttaagctcaatgtattgcaggttgccatgtgtaattttcctactattaaggatgcagcgggtgtagctattgctactatgcattctggtatacaggtaagaatccggctctatgttatgctttgaatttcgactacatatgttaacaggttttctgttaattcttgcaaggtatcaagggtagagctactagatgaggttcaaatcaaggctatcaacattgccaatggaaagaatttgcctgaaactccaaccttattgtttgaattcatcggcacaggtgaagtagatattattgaattttctctattgggattaagtgtcaaatcttccttattaaaaaaaaaaaaattcttcttgttatttatactcaatttctgaaccatttctagaggcttatgctcgtgagcaaacacaaatcgttcagaagattgcttccaaacacaatggctcagactttgtttttgcagaagacccaaaagcaaaaaaagaactttggaaggtagcaaacttagacctttataacatacctttcaatgcctgtgtttatggttctgctgttactttgcttttttttctctcatgcttttttggggtgacccttttggactcaagctgcttggagtgctcatttggatcttttttttttccccaagctaacctgtctaaattcccgagagcaacttcgtctcaaattagtcacgtagttttttagtgaatcatattttgactttgcatgacttttggctaaacgataggtttcttggatggatgtaatccctcctcttctatatatatatatatttattcaatcttaaggtgattcagtcacttcttcaaaggggaaaagaacaagaattattgaatactttgtttccattcctgtgcctgttcaattgaatttggattgccttatcacataaagcatagtttataaagaatcagaaccagaagctattattgtatttggctcttattttcttttcactaaaaggtataccttgtcatttgaggtcgcgtcactggccagggttttgtttacaccaattattaatttattcagttaagttttggttatgtgcagataagaaaggaggcactctgggcttgttttgcaatggtaccaaattctgaggcaatggctacggtgaagttcgtttcccttttgttcttgacaaattaacaaagccgtgaaaaatcacagttattctaagaatttgctaaatatataaaattcattgatcttgtggctgattagtttttgtttagaactgctgtggttaattgaacatgactaaattgtcttatcaacattttatcttgttgtatttttagtactacatagttatccatgtttcctggattattctagcagaatcttacagctgtgctgatcactttttataaataaatgattccatttatgattcagccaaattaatctttcttcagccttccgttaaaagtactcatttttgtgcaggatgtatgtgttcctctttcacacctagcagaactgatatcggagtccaaaaaggtgctggctgcatcgtcgttgacctggtattttatcttctaatttcattcttctaaacacaagtacatgagaacaagtgtttttctggaatagctggttgaaatgtatgtccatggtttttaatgctttattcgtttgttcctaatgacagcacagtcattgctcatgccggtgatggaaatttccacacagttatccttttcgatcctgaaaaagaagaccaacggcaagaagcagagagattgaaccatttaatggtcaatgctgctttggcaatggaaggtacatatgtttcatatcttttagcaaccaatgtatcatcagggtaatttgtcctatttttctttatattggtgccatttcaaaatgccatcattctttcttacccctacataaaagtcctttgatcattcatttttttcctttctttctagtggctagtgtttctctgtttaggaagtaggtgttgattatacctcaaagttcgtttgttccttaggcaacgattgtactgacatgtctcatgtgtctttgacaactaaacaggaacttgtaccggtgaacatggtgttggtaccgggaaaatgaaggtagtcctttcatagctttaaattattcattggctaattgtgtcaactgttgactcggtcttgacatgtgtcagaatgtttttaggtacattcttcagttgagagactattctaactaaaatttgtttttatgtctaccagtatcttgagaaagaactaggagtagaggctttgaggaccatgaaaagaatcaaagcagctttagatcccaacaatatcatgaatccaggaaagctcattcctccccacatttgtttctaagatcttcctctctttacatgaatccaggaaagctcattcatgcagtccctttctcccctttcgacattacatgatatgtattgttggtctagtgcaatctaggtaggttcataaaccttatcaccattttcacttagaataaagatttactaaattacctggatctcagtaatcattccctttcgcactttactcactcccattgatgtgaagagttaactacttggatatgagaatggaatgtaaatctttgtgcttggcttttaatggatgattatcttcactcatacatcacacacaatatatatttcaatttcacacacaatcacatcacatcactcttcaccatcatgcctttatgcttttctttcattccttttcccccctttttctttgataggttatatagcctttcaattagtgactcttggatgattcgaatcaatacagaaagggacactaattacatttatttagcttaattgaaacctcatcataaaacacatgaccagatgggatatgcagcttctatatatatatatatacacgtatatacacgtggaataaaatattcattgtcacctcaaatattgatgattctgtggagattttcagcttgtattgatagtgcttaaccttttgctctaactttatatagattctagtctctctcattctctttttattatctatatatatgcaaaaaaacaagttggttctgtttgatttgacggagaattttaatttttacctaagttatgtatgagaaaagtgtggaatggattaaactgaattctatgctggccaattgggtgtgtgattcctggttttaagcgaattgtttgtagggtataggctgtgaatttctaggatgaacaaatgttaaaagtcaatgatgatgcaaaggaaaacagacaaaaacaatatgaggacaaatatgcaaaactcttgaaaagattcgtgggcatcttttatccttaaagtgcatttataaaagggctaaaatcttcaagattgtttggttaagatcttcaagattcttttgataaccaaagaatcaacttggttcttgaattgaattattgtttctacaccttatattttggtagctagggaatatcaattagaccactgtatatgatattcttcttatttatatatcctcgaaaataatataataaaacaaataaaaactaaatcagtacttgcatcgtatataaacatttttttaacaaccttttctttatgtaatacaagagtgattttattatggataaacatcacgaaccgttttcttttttttttgcaatcgaagcttatgtcacttcccaacatgatctatctatgtgtgtgggtgtgtagtttcccattttagatttgatttattaaatggtaataatactctttttaaagttatcacaaaggctgaccctgaatgattgccacaatatccacttaatcagattaggatatgcattatctactctcagctaaaaataatactttgttttactattaatataataatattctcatatttaggttgcttatctttttttttctttttctttttagtactactaattaatcttatctaatgttatacactaatataatatttcgaagttttcatgttactagttacaagtgcatccaacactaaaaaagaagattatgtataattctaattttatataggaacgtaactttgtagtggtaatagcaccattaatattacgtaggtaaacttggttgatcgatattttattattggcgccttttgtaattaattatatgtaatcttatcatcaactactctaaacctaatataaatatatatctttatataagaagatatatattattaaaccagtagtatccgcagccttatattttactgtattgagttataatcatgttcaaaagtcgaagtccactaactatatatgtgtggacaacaaggagtagtactaaatccaaattggggtaacattttccccttagataaatcaataatgtttgcttaattatcattattaaaatgattgacaaaaataagtcttattttattgtcattattataagaaaacattaattagttcacacgaaaagctgccaaaaacatattgcattcaatcctgttaaaaaatattagtgagctcactatatgctatcccactgaaaaatgagagatgtagaaagaacgatacacacataatggcgttattgaatttcatcaaataataggtaaatatatatatatatatatatttatatatatgagaaataatgttacattgtatccgggttatcacttaccagaaaaagccaatatcaatacatatgtacatgatacatttgtattttttattttaataaaatcaaactaaatatacaatcttattatgacttgataattactaagtttaatataaatatgagccacttgaggctagctcaagtggtcataggtgggtgtgtgtcttggaggtcgtttgagtctcaagtgaaacatgattgtaatatataaacgcttaaatcaaaa

SEQ ID NO: 243502 - DNA, 2625 bp, Cannabis indica
tctcaaaattttgtaaaatatttgaaataactaagatatacgaatatatatataaataaattggactggaagaaattcttttaaattcttctggatgtcgatataggtagagaatacattattacattctttttagggagtgcatggtaaaaataccccaaaacttatattcaaatatgttcctgttttcaaaattgcaagtgcatgaaaatgaagctatttcaccatgaaaaagaatagagaaaagacaaaaatacctgttgctgaacttctcaacagcatcagaagcataaagaagtgtttcactagctttctccagtaccatatatagctccttacctcttgtaaccctggcaataacccaagcactgtttcttgctctgatgctaatttccaattctttttcatggccagatttatcccattttgatcttgatttttccaaatcaacctcttctctaagcttattcaaagcaagtaaagattcctgcaatgaaggaaaaaagaaccccacaaaagagattgtataatgatgtttgaatacatttagaaagaaaaaggttggatcacaagagatatgtgccttttagtacctttgttaatgtggtaacttttccgggaggagaagcccttgatatgtttctatcgccatccaacaataaataacggtatccgccaacatgatatgcattctcaccaccccaaccttttgatagtttttcttcaacttttactatctttaccaaagcctggtaaatatatagtaaaatcagctaaacatactttaaaacttgaaggtaactagcagattttctccagaagaatgacaaatccgaattatgacataagtaatgactataaattgaaattcaatcagtatccagcataaagttgaatacttctattctaacaataaaagaacaactaaagaagttggcgtaaaccgagcagcagaaagatgcagtgtgtcaataataagattgtagttcattaagttgcacaatatatacttaagatactaagatgggtgccagaagacctgtttgctccaactaagtcattatatgaaaataacaactaaaaaagctttaccctttctagttttatgtccttgtatgaattaaaactctaattagtagtaaaaggctacactttaaatggattctaaacctctttaatgttttgaaactgttttcaaaagcatagataagtataagtttaactctacaatttttgccaacttttatttgaacgtgtcattcatatggatcctatcatccagtgttctctatttaatttgtaaagggaaaaaaatggcatcattggagaatgagcaaattagtaaaataagcagttcaaacaacagcagtatattcccagataagcatagagaactaacattttcgagaagttgctgcttcaccactgaaataccttgctctccatttgggatggaagacacgggaagaagaaacataacagtaaggtttttatgctgatgtgaacataaatacattctctcctctgtttgatgaagcaatactgttggagtagcaggagttgtactgccagcctccatgccccatatatcagtaacaagaaaaccgtccttcccttttgaccacttgccatgacgtaagggccgtataaccctatggccattatctcctgcaggagccggagtggtgttatgagagacatatacttgttctggaaaaggaccagtgtgggccatcataaaagcgctggacaggtgaggtgaagttcccttccctaaataggaccatgaacttactccagcggataaagcacgtggggtcatccttaaaacagcatacgtaaataagtttactgtatcttcctgcaaaggaaaaacaaaagtaacactcagtactattgaaggtcatatcccaagcaagtacagttcaataacatctccctccctaaatttctgactaatatgcaatagaaaatgatataaaacataaacgaataatgatcaaataggtaaggaaaattgaaccatacagaagaaagtgatgtagaaaccagcagatcctgaaagaaaatcaacgagtggcatagcgtgcttccaatgctagattcaattaccttgacaagtgactgcaaagtatttgaataaattagaatactgactacaagaattgcaataaactactttctagatcattaaatgagaatgtgaagattcagcaagagagtagtatagtgcgaagattcgacccaaaaaaaaggagcaaaagcaatcctttgtagacaaaagcagtgtgttccaaaagtaaaaattggctaagaaagcagcagttaagttgggaatttcgtttttacgatttaaatataaatatttgataagctaaggtccacaaaaggggaagagatgtttacaaaataaaataggatataaaagattatagcggcactctaagttgatagtttttccaaacaataacatagtattgttaaataagggcagagtcatgagaaagtagaattcttgacggtttgattatgttaaatacttgaataagtcatcaaggtcaaaacatagtcattcattacgcatctgaaaacaatggaaaataaatgggaagaaaaaaaaaaggt

SEQ ID NO: 243503 - DNA, 3788 bp, Cannabis indica
aattaaaacttatcttatatatatccctctcattttattttcatagacattattattatgttctaaggttttgaaacatagtagatgagcttctgaaaatgtgcctggtttcactcggcatatgcttattatcattgtttcatgaaactaatcataagtcaaaaagaagtgtagttccataattgttgacccaattaggacttatatattgtacagtgcattttgttgggcaaatttaataagcatgcacgccttttcttgcaaatcaggtccgtaatttatgacaaaattcccaactttattagacaaatttcctcaaaaaagcaacttcagaatatgatttcttttctttctttatttaggtactactttttctgttgtaggttttatttacttcaacttgaaggaaaaagaaaacagttttcactccctttaagataagagttaaaaccctttgttttttacttttacatgattattctcttgctttattttgttctgataagtcactgtaatttgtgaaaaatcactgaaaaattgaaccaaagagcatagattgattgatattgaagctgcttcattttttttttcttaatccaataaactcaaatttgccaaagctacaagagattgaaaattgaaatcaaaacaaaaagaagagagaattttgcagaaacatatcttcacttgccaaaaaaatgaaagcatacccatttacagatatgtgctgcatgcttttgctaaggtgatgttagcattataaaatcaccaaaacatatagaatcaaaacaaaagaaaagacttcattttgaaccttttttttgtgttcttttttctgtgagcttcaaatttgaattgaaccatcaagatgctgaagaagtgacaatcaaaggagaaggcggaggtcgagggcgtctggttctgcttcttcctctgcgcattgtggccccggaaggtgaagctgaaggagaagaagaggaatttgaagaagagtttaacacatttgactcaactattagtttcttcttcttctctcctccttcaataggtggtttattgttatcttcaattctatgatgcctaacttttgttgagtttaaagtcacaggaagaacacagttgcacataaaccctgcattgtttaaacaatcacatattattgcagagacaacttgaaaaaagaaaagtctttccccattttgacaaattagttcaactacttgattggtatttaactaaacaacctaaaagtgggtagtaatgagttgttatgggaaaagaaaaggtatatatgtatatgcataactaacatttctttacaattatataataacaatcaacataaatgttgtctcttaccgattctggctagtcgattaacccaacttgggattgaatttctagtcaatctaatacaagcatcattacaaaaatggttgcagtttttggtgatcaaattataggcatttcctttgtagacttctgcaagttcttccatgactgttcttacttcagaaggtcccatatctgttttgcctatcaatattgtctttctgaatgtaaatccctcacattttttaggctctccttcaaaaatcccagtacttgaatattcatgagctccaaatgcatactcaacaccatgaactgcaatacatccaatcaaagtattagtctgcatttttttttcccaatttccaattttttttaatacccagatgagaaagatgaagaaacatccatagattggttgaataacttgaattgaaccaaactccttaagcaaataattcaaagcccttttgagaattatcagaaattaaggcataaaagaaagtagataacagaaatgtaacatcattggattgaaatttttagatttaggtaatggaaaaactcgaataaaaataaaccatttgatctaaaaacccaaataacaaaagaccaattaattctccttttcctttttcgtattctcatcgaccaaccaacggaaaaactttatctgaagtgggaacatattcctttcaaacagccaaactcaccaaatccaccgaacccaatttgaaaaataacaactttgaatataatgaatcaaattcaaacacagatctagattgtttattagagaaaaacccagataagaaaaagagaaatagaagaagaacaacaagtaccttgtaccccagaatgataaactccaagaccaaaccagtaagcatatccattaatgggtgtcagatcataaacatttaggtacactggtacagatccattatccgcattgttacaagattttcggcacaacaatatcatcttcttctttccttttctgtactttactttttataatgatgataatgatggtgagtcatttagaattatatgacttgatttatctgccatgacaaccaatctcagcaaccaaaagaccgtccttttcagctacacagtgatgaaacttccattatagaagaagggggaagctcacacttctcacacacactctcacccaataatttaatgggaaaaatataaaaatgtctccttttctttttaaactaaaaaaagagagaaaaatgagaaatgggatttgtttaaatcgatattttgatttgaaaaatataagaaagaagagaatgagaatcttcttctaatgggttccaccggcggcaggtatagtgccgcactgtctattatttatacatatatatatatttatatttttatataataaaaatttagagtatagtttggtggtgatttgttcttctttaattctgggtttttattttttttaaaaaaaataaatgaaaaagaaaaaattttggggttggaattacatataatgattaaatatgactctatctgagttgtgtttaaatttttattcaatttaaaaattttggatttttttttttaaatttaattttcttttatgggagaaagtaacgtacactaattatggtacatagtgggtgtgacacatattttgagatggcctctaattagttgtgtttctttattttaatacatttaatatagataataaatatgaatgtttttggattcatgtatataagaataagtttatgaattattaaaactaaataattaatagactataaatttattcacattacgacatataatcttcttgaatcaacatgtatatttttatgtagattaggttgattgcttgctttttttagttagaaaaataaaaaataaaaagatgatgttgacaagagtgaaatggacattgaattattgaaaatggagtttgaatgttgtttagaagtggtcttaatcatatcatatcatttggaatagcctttgcaacctttgcaccctatactacacacactattattaaacctaaacacatgcacatgcatccaataatttttatgttattttattaccatttctttttaaccattatttactacaccctacactacattcaatattttttttattattcctttttactaaaaattatatgtaagaaaataaataaatttttacattcaactttttatttttaaccattactataatttaaaccactgactacataatataaatattttacatgcgaatatgctgtatgaacctaataaattaaagacatcatgataataattagcttgctttaatatctttaaaggcaccgtgatagtgaaaaaataaaataaaataaaaaatcgttaaagatagagatattctgagcctaataaccaagtaggcctaaggcaatagagatttctatacgattttttgtt

SEQ ID NO: 243504 - DNA, 2481 bp, Cannabis indica
aagagaatcaaagtccataacattgattctcatagggaacatattaggcttcaaagtttcataaaataatccagaacccaactcatcctccacttgaatgacaatcttggtctaagatgtaaatataaataacaattttataaaagtataacaaaaatacaagttaagctaaagttagattaagatttatctctccacacatgtatgacttacaaacaattttaatacctaagaaaaagagaaccgctaattttgtagaactgtcaataataaaatatcgattattatcatattggcatgaaatacacaaaatatacaaagtgtattgatacactattttacatgctgtagggatccagattctctgtggtgagaacccaaaaaagaaacattttgaaatgacagaatatgaaatctagttatctgctttcctacatgtatccagaatttcttaaaaaatgaaaaatattgaagtaccaagaccacggcataaatcagaagatttgattgtcctacatgtagccatctttcttgtcttgctcctcggcttctttgttagccacttgaacggatttgaaccacaaatacgcctacaccaaacactcattcttaggtgaagagaggtttaaatgaacactggataacatacatgtaagtacatatgtatatctctctatgtgccatattcctagttcgccaagcatctaaagctgatctcagtagaaagtatgtattgattgaaaaagccagtatcactcagattataatttcattaattgatgaactaacaagacaacttacagaagtgggaatgccagtaaatgcaaagaatcccagcagtggagcatagaaaatgctgtctgggttcactactccaaagactggtttttggtttgcatactcgaaaacggaacctatctgcgtgtccagaacctcaaaatcatttgaaaattatactgtaaacagatattaacttatgggattttaagcagtgattctctagtctaatgtatgcatctaaaggtggaacaagtgaaagcttagggaaaggggacttactgctgcaattgcagtgattgctgaggatagtaaataaacaaagaaaggaacctcaaatccattttctgatgcagccttttgcgtttcaccctgagcccaaggaggtggctcttctgaatctggttttgcccaagagggtactgtttcttcggatttgctagattctgctgaacccttggtgacagcatacacagtaagcttaggacacaacattttgtttccatgaaaacaatggccttgacttccctttccagtgagctgaaccagtattctgtgtctattgcctaggaatgatttgggatacaatggctcattctttctgaagccacgagttacactcaaactacatgaggtcaagacattcacagccataacaaccatataaatgtgttggttgctcttgaaatcaagacctccacttttgtcttctgttactgagcacacacacacagaacactcaacattagtggcaatacgaaatcagataaagaactaagaataaagactaaacagctacaaccaacatcagatgcttcagtgattctcaatcacatcatttttttttttcttatataaatatatatatgtagttataaggtctttattttttcttattatgaagttactatgttagcttgtcaaaactaaagcttcacaacactcttccttaccaaagcatgtatcatattcttacttaaagatttttacaatgaaaagttccataattatattcctttcaattttacgttctcatatgtaagaataactccaattggattcggcgtccttgaagtcctaacatttgttatgaactttgcaaaacagaaacaattatatatatatattttaaaaaacaaaaaacaaaaaaaaacaagaagagatacaaccgtacctgtgtgtgaagtaattgtttacccggaaccaatgagtgaagcgcaggtggtgctaaacccgagatcgacaacggaaacagaattcctactctccgatcaattagtgaaggaggttgataatctttctagagatattaacggtagagagaggacgggtgatggagagagaagttgtgctatgagcctgtgactttggatgaaaccgggttgagtgatagaagaagagggtctgttatcataattgggtttctcattttgggctttgtcaaacatacccacacttattacagtagaaattagagaaatttacggtgggagacgaaattttaaaattaataccatgattaccactttttttttatttcaatcataatacctttgcattttatttctttttaaaacacgtgtatacactctaaaaaatgagcagcacatcaacacaaatagactaattgcttccttgttcttgtctttcttttgtttattgctcttttttttatttgttaaatatgaaacacacaaatattaa

SEQ ID NO: 243505 - DNA, 1242 bp, Cannabis indica
atttcgcattcgttttgggcattgattaacgtattgagtgacaaaaaatatcttttttagtacatgagcatagttatttaaataaattaattcatcaaattaattaatttcaaaaattaaactaagatattacattttacatgtgcaatcaagaattcaatcctaacattaagtcatatatcgaccgtttgatatataatctaattatacttacttcattttctaagatatctatccacacaagcaactgagatcaaaatcacatgcattcttaaaatggtaaattgtacaaataacctattgatccccaaattttgcatgagtataaagagaacatccatttactctgatgaataaggcaccttgggagcctattagtaagttagatatatatctacgatcacggcaccaatgagccccatgcgacctcactgtcgttgactaagtgactcccttgagattattcgctcgcggcccaaacgaatgcaatggctctcggtccttgcacggccggggctcatagctcctcccttgcactactaccaattgcattcgtgagcccacacaagcctccactcgctcgtctcacaccaatagcttcataagggagccctcggacctttccttaagcgtgattagtattgactctcctacgaggtggcacaaaagacgtgtaggaggaaggaaaagctagaggtacgaccacgccacctataaagctttcaagattgtagtggcagtataattaggcataagtatagttggaacaagaggcacccacgactttgacatttaccaaagcctgactgccgagtacattactattatccccttttgaccacttgtactatataaggccagcggaggctcccctacaggataaggtttggaaaattactatgcaattaactctcaagcaatataatgctcattttcttcatgggtgctcaaaatattttctctaaggttgtccaaggttcatgtgtgttcatcactttttctttaaccttggttttcttttattaacttaaaataaatgttaaaaagtattagtggtgtctagtatcattttatgtggtaatatagctatttgtttaattaagttttaagtcctatataatttaatttaataactttgaagaagtatcattagtcaatccaaatgcgacatgtgtaaaagtaataagcactactggtgcccaatagcaatgctctttacttaattaagtgacaaattttgat

SEQ ID NO: 243506 - DNA, 2598 bp, Cannabis indica
atatttaaaattaagggtaaattttctataattgtaaactctctacaaaataacttacaaaataacaaaaaataaaactcaattaccatacaatataatgaaagaaaaaaaatgtaaatttgaaagaacaatgataaactaatatctatattaaatataagaacttagactcacacattaatgatatattacttaccttatacttattaaacattagtttttttttattctatacaatattttctttgacgtggttctatacaattctttttcttctatacagaattgataactactcttgcactgtatttttcattaataatatcttattttattttatttttcaaataaatgatcatctcatctcattataaaaataaataaataaacgatcttctattttgttgtttatatatcaaaatttgcaaaatatcatttctagcctctacttttcatccacgtgtaaatcatggacgatccagaacatgacacttgttatcaaccatggatagcccataacacaattcgcacacttgtcacattttaattgagtcatgttttatgagtggaaacatcatgcattattggttcacccaccttccttccttacttcctttactctcaattttcataacaagtttcgccctttataaatggccacctctcccaaactgtctttcaagcaacaacaacaacaccactttctcttaatttttctgctaaacaaacctccaacacaaagacaaaatatttcactaaaatcacgaaacccaacccagttctcaattactcttgtttgacaagaaaaagaagtaatggcaaagacaataataaagatggggtgtttggatgcttggatagaggtggccccagctcttctaattcctcattgcaagacttcaaattctcctcaattggaaaccattacagaagagttggagcttgaggagtacgaggatgaatagattttatgttttgtatttcaaatgtagagaaacaaaaagaagaaaaagattaaattgaagactattttgtcaaaatatttatatattatccatacacatatattgtcaaacttcttaatctcaaaacagtacttattggtttcaatcaatatgctaggatataatttaaagaattggaataagaaatataatatttcatgtcaagcaaagcgataatgatcatgtatttgacagtctcttaatcctgtagttagttcttaaacattttagggaaaacaaaggatttaattgaagactattttgtcaaaatatttatatattatccatacacatatattgtcaaaaatcatttccaactttttttcatcaatttcgtttatagtttttccacccaatttattttgttttttccatatgtttttcttaatatatatcctctatctcaatatgaatatatttatatctaatgtctctctgtttttttgaaagcagtatgtctttctctgttaattctggattttttaatagaaagaaaattctaaaaatggataatgaatggttagataggaactagacaaccaaggcatatggaatctgaggtctaaaatatgggaaagacaatatttgggacagcaactgtatatgttggtgtggaactcagttcatagtcttcccaatgaacatgaaattccttctaatgttcttctctgtagtagagtgtgacactattaaaatagtataagggtttaaaaccaatctcccccaattgaatccaattgaagttttatcttcttattctatatccattaataactacataattaattatatatttattggttatacaagtcccttgcaataataaattgtatttttatagtgtaaggcagctgttgggagacacccttaattattttgttactatttgtttgtttttaaattataagagtttgactgtaaagaatgaaaacaaattatacgaaagaagaaaagtgaaagaaagagtaaggttcaatattagacgattagtttttttatttgcctacctataaggtagatcattaaattaatgtattattaaaaattgctaccttttttattacaagaaatagtaaaaaaaaatataatcaacttactatagtaagagatgtaaaatattatgttcattaatactaatagcatgtcactgaattacatttgttgttatgttataatactaatagtaaaagatttaaatttatcttttgtaacaaatattgtaatgatcaattaactatgaattatgattattgtagatttcagtcaaaagttttgttttagtatctttttgaggcttttttttttttttttttttgaatcaaggatgaaatttattcaaaaacactccgaagatacaatatttttttagagcgctaggagcatcatgctccctaaactcacaatctgacaaataacaagaccctctagcaacacaatgaacaactttattagcagatcgtttaacaaaaattaaagaaacattagaaaaagaagaaagaatctcacggcaatcccgagctaataatccaaactgagaaggcataagaatagcgttattaatagcttgaaccaccaccaaagcatcagtttcaat

SEQ ID NO: 243507 - DNA, 1640 bp, Cannabis indica
atcgactattttatgaacacccctaaatgcattgtaaaatcacccataatgttatctttgggccagttaattggccttacgaatagtaatgtgaggcctaaatgggcattcaaataggggtacttttttcaagtcaaagtcaaacaaacttgtctctctgtctctctctgtcttgtctttagtatctaatgattcgatactgagacaaaacaaacacaacagtaaaactaactacgaagcagatgcttcaccattgtctcaccctaaacccttcgccgtctccgtcgccgtcgtcgcttcccaattcccattattactctcaatctcaaatccaaggtaagcttctcctttctcttctggtttcgataatttcatcaatagtatcatcattaaaggaacagtttttacaattcaaaacccacagctgattccgccgccgccaatggcgaccgtggaggaggagatacagctagcttggccagcactcaaccctctcccaatctatctcgcgagtattccatcgcaattcaatccaattcctaccaagagattcgttccacagtcgaaatccattaccaagatcaaaacgccgtcgttttagaacgagtccttaaccctaaccgcgattgcatcgaagaggctctccgttatgctaagcccaataccctaacaagactcgtctccgattacttcgatcacagcgagtacacatcccaactctgtctcaatctccagcacgccgtgttccgtgctcgcgaactttactcgcctctacacgaactcctccaaatccttccagaagattctgactctctatctcaatcccaatgcaattgggcctacgaaatcttcgtcaagttcgattcttttcaaaaccccttttcgtttgccgacgattcccaccaccacagcttcgatcacatccgcggttgtttctcgaatctcagacaacgtctcgatcgccgcctccgaaagtctcgatctttgattagtcttctctttgagactgctttctgttctagacctgtggctctcactaccagagctcttacttcccttgtggcctgtactaatgcattgcctatgaggaaaagggtttctcgctttgctcaattggatgctgcagctaaaggtacttttgctcttaatgaggatttgattactttgaagagccttgtggatcgtatgcaaacgaccattgaggaagataagatttctgttcagatgggtttgaattgtggtggagaaaggtatctcatacaagaagtggtcaaacagcttagacagaaccaatcaaaatttgttcatcagcttgatgatttggagactcatatatacctttgtttcaacactgttaataaagctagaactcggctcttacaacagatttatcttcatcgatcttgtaaacctctaactctcctcatacattgtcttgattggtataattgtgtatatttatatcttttctgtttgtattattctctgttgttatgttttcagcattgctaggagataccatacaaacggaaaagacttgacttggctggtggccactcaattttttatcaccaaatgtttcatttacaggacttgaatttgattactgttattcatgatcatagctttaaaagagaagg

SEQ ID NO: 243508 - DNA, 3197 bp, Cannabis indica
cttctcacaatacttttagtttaaaagcataaaaataactctataccatagagttatcaatgggatttcatccgtgctatgataaacacccttatgtattggtattcgtaactagtttttcattaagaaactagttttaattacaaggaagtaacatgtttatttattcattgccttaataagattatttttaactggtttcttgatttaggaaactgaatttgattatatagaagtaaattttttgtatgagtttttaaattttttatggtattctttctcatttgtgatgatttatattttaagttttttttcttctaaaaataccatattttgtgcaattaagtttgcatatggtatataaatcaaaactttgcctttataaaagtaacttatacagtgacagtatttatgtaaactcttggggttttttcagcatttatgtaaattccttttttttctaaatatttttttaagagcccaacgaccccattgggatggcccaatattattcgagtctagggcccaaaaaataatgggcctcacaatcctatttgcctataaaaggaaaattactaattaataattattatgttgtaataaactcagctcactctttttcgacccattcttctttttcttctcagacagtagaagaaagaattgtgaaaggcaatggctactctagatactgacgttcccatggttcccgccggcgaaccttcaagcagtgctggtccttccagcaggaaacccaagcgatttgagatcaaaaaatggaacgccgttgctctatgggcttggggtaatttctctaaaccctaaccctactttcttctccgatttcattttctttgaattgttattttaggtttttgaattattttatgtgatattttttatttggtgcagatatcgttgtcgataactgtgcgatctgcaggaaccatatcatggatctttgtgagttttctgttttctgattagtttgggtgatctctcctttctctttaaatacgtatatattttaactttgttacttctcgggtttattaggtatcgagtgccaagccaaccaggctagcgccaccagcgaggagtgtacggttgcttggggtatgtaaatgtctaattcatttgtttgttatttcatctgaatacaattatatgtttttgattgaactttttagctaattttgaattggggtttatgtttatggtaattgaggggaagtaaaggggaaacttttatcccgtacagtttcaatttagaagtattctatataatttaaaattttgtaaggaatgccattcttctgtgtcatttgacattgctctatccctatgtttatatttcgccaatttagagttaaatttggaagttgtgaaattggtaatgtgttttgtctattttcgtaaacggcatgggatgttgtattttattgaacacctgttttttaaccttttgtgagtgtgttactatgtaattcttcattgtaagtttgttattctttcatcaagttgctgttttaaatgatatcaggcacaagtaagtaaattaaatttaacttttgcttgtaaatttgatagtttctctttagttacatcactcgcagttgaaagataagttacaattttgtatgaaagatttagtagcttgtatcctcatacatcaaaaatattaatggtcaatggttgattaagttctcactgatcattcattgacttacatcctgaagctccatgcctgcctttctgtataatgtttgtgtggatttattctggtttaaaatgtccagattataatttttaagtggtatttggttgggtatactaggtaacagttggggtcaattgaactgaatccatttgcactattctgtactattttgtttgtgaatcaagatcaagattctgtttgaactgtatgaaattgcatacatttatcttatgcagtgtatcttttgcttgaaatcagtcaataaatctttacatatttaacctcgcatattccttatggttatccacattttggtgaaatttatatatatattttaattatagtaatgtggagtgccacatgaggctaaagggtctaaggatggactaacgtagggctatctttttctatcctttctataataaatatatatgaaattgtttatattgtgtgtagtcgcacatacaagtccttcaatctaatctcttggttctatctctataggggtttgcaaccatgcttttcactttcactgcattagccgttggctcaagacccgtcaagtttgtccattgggtatgttttatgccccattccatttttactcatgttttttcttcttcatcatgtagcacagacttatttttgtttttcatgtcttgttgaacacagataacagtgaatgggagtttcagaagtatggtcactagaagcttcacgtggttgtgtagttgtattctcattttcaagctactactggtgtgaaggaggattataattcactgtgctctacttctacaagatttgtatttttggctggattaatttcattagtagcctttttctctgttaattcggctggatttattttaattttgaaagctttagctgtgtttgaaaatcagtgttgtgtataacagactatcttgttttgttgtgaccattaaactaaaaacctattttcttgaaatggtgcctcctttccaacttttaagagctttcctgttcttttctttttctttcagattttttacataatacacaaaaaattgaaaaaaatttacaaaaatacgtttttttttattgacaattagatatattttttaattattttataacttatttatggagttgattattttttttaaagtatatttttataattttgaaaaattaaatttttatagctgtaaaaaaaaaaaaacctgtaggtgacaatgtaaataaaatacatgtgtatatatatgaaaaccatatttatgaaaaattctctttttctttttaagctcaaggtatcagtatcagtggtttgatgattctactatttcttattgaggaaattatactctataactattttattgtccctgttttaatttttaccttccttttaatattctttgatttatacccacttgtctaagttttgttcccgttatagccttaggttaataaaaagaaataaaattcaattaca

SEQ ID NO: 243509 - DNA, 2692 bp, Cannabis indica
acccggagctgaaccccgaaccttggacaacacacccggaccctggccaacgagcctagaatcggaccccagacccgaacttcggagcttagacaaatgaaccggatctcgaattcagacgcgaacccggatgcagactcggacttgaatccgaacccggacccaaaatctaaattcagacccagccccagacccggaccaggacctcgaacctagccccgggtcttgggtctaggttctggtccaagtcatggtccgagtttgggttgaggatcagggtccgagtctaagtttgagttcgggccggggtccagggtctaggtttggatccaggtctgtgtgtaggtccaggattcagtttgaggtatgatgagttcatgtcatgatattgttgtaggatattgaatgttttctttttagtaaaaaaaatctaaaattagttttgaaaatcctcacccaaacaccattaaattttttaaaatgaaaaaagaaacttatttctattcttattttaaaaacataattctcaacactgaaaactgaaaaacacatcaaaacaatattatataaaatccactaacttgttctctagccacatcgtttcatttattcaattgtttttcagagcagcccgcgagtgccaatgtaaatacatttgtataaggactcgttttgtaatttggatagataaaagagggacaatcatgtaaatatgtattatttatgagagtggattgtgtcctatataaacagactattgtatgtatatacgagttaaaactatatatatctgccttgctacatatatacgtactcatacattctcacatcagaaaatctccggcaatttggtttaatttatattacaaatgtcttccggagacgaccagaaaactgagaaaaccttctcaaaattttactgtcaccattgtaaaagaaccatctatttcgattcctctcattctcaacctcgttgctttcactgcaataaccatggctcttccgacgatcaaatcggaaacaccattgttcaagaatcttcttctccaataaacaccattgtccaagaatcttcttcttcaaacaccattgttcaagaatcttcttctttaaacccgttggtctttctctggggatatatccttctcctaatctttatacagtactgcctaatattaggccatggctcttccaagaaacaagaagaagaatcttcaacctccgcaatcgattatgaggagctcacagaaacgtgtcagagccggaacgaggtggttcccaaggaggatgatgaagacgactatgataaggaatacgaagcctttcttctgaatgaattggggtattatttttacgaatcacatgatgagacccttcgggcgatgaaggcttccgagaatatgttattaaattcaaactcgaatacgtgcgtggtgtgcctcgaaaagttcacgttaggggatcagattctggagttgccttgtggaaggcacctttgtcatcaactgtgtgcattgccgtccaacgattgtcccggatgctggtacgagcttcccccgtggaatgataagaatgtctttgccggtaccgatgacgataacgaagacgaccacgactatgatgaggaatacgaagcctttctccaaagtcagtcgagttctaaataaaccaaacatatgggtaataaatctccattcaattcaaataatttctttgtagaaatgctaagttcacgttaaaaaatgtatatattggtgcatttttatatcaatttacacatttttatttaataaataataagaaaaatcactaagcaataactataaacagtcacattgttgtcgtatataacaaattaagaaaatgagttaagaattagtgatggaaagttaaagatttctttgagagaatacgttctatattttgttgtgaaatacacaatatgaacgtggattattatcttggacttattatatacaatatttgacattaagtatttttttttgtttggttagaaagtacgttaattagtctacgtacgtactactttgttcatgggggataattttagttgtaagatgctgcaatttttgttcatgaattcgttttaaattagttaactacacatgatgtggaaagtttgatcttttttcttgaagtttgtacagatttttgtatgcctagaaactcgatctccactcaattaatctcttatgtgttacaccgtttaaaaaattatagataaattaaaataataatattattttaccatcatatatagttatgtgtaatattatattaattgttgttttgtttccatgcaggggcagaaaaaagaaactatttcatggtctgaacgtggaaataaccacatgtatggagcttcgaataaaaagcttttcttatatatatatatatatatatatatggtaattaataggaatacggccattggtacttataggatactataagaccatctttttttgtttaatatcaatcacacatctgaggataattgatattggtatacatagttttacaaactacctatttccatctgtgtttgtcatgttcccttttcacatctcaattttattctatattcttatatttgtattatagtgccttcatcagtgctcttacgtccgctacaaactctagtttattaacacaattttttatttttatt

SEQ ID NO: 243510 - DNA, 2552 bp, Cannabis indica
caattctatttactaaatttttctctccttaactcctctcatgtggatgataacgagtctatatatagcgcgtaatgggttggtctgaaagccgtcttaaaccaaacaaaaggaagaagaccttagagttgctttggcattattattgttgttctgacttcttacaataataatttgcagatattgtttgagcttctggcaaaaggcgggacagtgaagggaattataaaagaaaaggatttagttcaggtaagttaatctatttgtttttggagatcatatgtagttaagtaggagcactaatctatgcattagatgctgaaagttcaggagtgtatgattctacaagatgggattttagttaaccaaactggttttagctctgtaaatcactgaacatgaaatttgaaatcaaaaagatatgattttgtttgtagataataacgaagggtttttttcaatgaaaggttattggttataacattgcagttatgtacctaaaggaaaaagtttagaaacttaacgatcgttacatgacagattgtagaccctgccgagattgagaaaatggtggacaaggtgctttcggagaatccaaaacagctggagcaatatcgtggcgggaagaccaagttacaaggatttttcgctggacaggtactatagatttcgtgtttaacttacctttacatattttccatttgccttttacaataacgtttatacatttatgagttatagttagttaggaacaacttgtcttatgtgcagatcatgaaaatgtctaaaggtaaagcaaatcccgggattctgaacaagatcctgcttgagaaattaaatgccaagagttgatgaaaatgaaggtagtttttacatgatatagacaaatcttgttccctagtttagttgcatggcttttcatggatcttttctaagctaaagtgattattaacttcactaaggcctcaacaccgagctggctgagacctgtaaaccaaacgatcgctgcacgtgaatgaattttcttgctcatttctggtagaagcatgttgaaacctcttgctcttgaatttaagagaagttttttttgtttaggatttaataatagtgttattgattgtaagctttggctaacaattgagatgagttgtaattaaattgtagcttcatattcatctttttgtaatttataattgacttgatattcattgtcatcaagaacaaaatctgtggaaagggtaccatattttcaatacaatttgataatggagttcttggcaaaattttgttacatattttgtattcaaattagcatgttgaattgagaaataagataaaataaaatgtcttaaggccaatgttactgttttatcttgcaaattaataggggtttttgtcctaaaaagaagctaatttccatttggcaattgaccaaatctcaaggaatgggccagaaaaacatcttcccctaaatatagcatagaatccccaaaaagcatatacatgtgaatcacacatcaaagggtagctgttgatacagttttctattatggacaaacacaaacatgtaatgaccaattcacattttatgtccctttccatcttccattccaaaatcctcctcctggtgttcttgagggcaacactagaggtagaggcggatttctagctattcatggttgccatgggagatggatcagcacgcagggtaatggtagtggctgatccaacgagagagtctgcaggtgcgctccaatatgccctatctcatgcagttctcgaggaagatgagttgatccttctccacgtggaaaatccatgttcatggcgaaacacattgtccacgctccttaagtggcctaacctaccggttaactccatctctgcctcctctactataggcatggagggtggctcgaacgaggttgatttcctcgatgaaatgaggtatgcttgcaaacttgcgcagcctaaaatacgtgtacgtgttgagagatcaccgatcgaaggcaaagagaaggcatccaccattctctcacaagctaaagctatgggggtcgacattcttgtcataggacaacgccggagtttctcctcagccattttggggtgagttttttcaagctcattacattgcaatttttcttttccatggtgaaacgttatttatgaacttgattcattatataattatatgagctttcgattgcccaagttttatgacataagattatttaagaaaatcttgaaactagagagagaattcaaccatggaatacacaagaatgagcctaacattgtaaaccaaatagtttgtgcaaaagatttgtatcacatatggaaaattcagattctgaaccactaaacctaaataggcttcaatggcaaattttgcaataccatttctgacaacagttcccctcatttttctttgctctttttccatgcttgaatcatttgccttcttttcgatagcatgatttttcttcggaatcagtccgcgaaaagcatcgagtcagtaaataccaactataactaataatgctacaatg

SEQ ID NO: 243511 - DNA, 2790 bp, Cannabis indica
cccctctcattactttggtacttactctgttcattcttaataattagaatgactcaagatgagacaaataaaaaatatttgttgtactaggttgttgatgtcacaattcagcctcatttcattagttacaccacaacaaatgcatcatgaaattaatgaatgagagtatcaagtacggattgtattgtacctgaaaatgatatatgtaagaagagaacagaatcccaaggacctgaggggatcctcccaatacaccaaggaatgaaggcactttcccaattccatcattggaaagagtagttcctgcaagcatttagaaattttagaagtagacaaaaacaggacaggactcctcatattttgagagacagaaatgagttactcactaaaatgagaatttaacaaactatttaataatttatgtacttactacttattctttcacgttactctcacaataaaaagaataatctgaaaacgttataatttatttttattttcagagagattttttgtggtcacttcccatctacatgagaccaatcaagttcctgttgtcagtgcattgtttaaataaaccaaagccccaaaacaaggaacagggtatggtggggaagaaacatggaaagggcaactagttggaagctaaggtgacaaaaaggaaatgagaaacacagcccacagcgccattactgatctgaaattaccttcatcactgctaaatttgtatcaattccctcaacttttaccccatcaattgtttgttgtgctactacaaccttttcataatcatttttagattccttgactgctctttccaatgatgtcatctctcccacagttatctccccaacaacaagaccatcttcattgggattgttagagtttgtgttgaaaacaaagcccaagttagaaaccatgtctaaagctgagattgaatacataccacttccagactgagacttataacaatctatttcttttaaacttgacatatttgccagggtttctagtatcaagtctccccctggaagttggtcgcaaagattaaacataagaagcgattcataacgtagagggagcgcagaactaatttcttgaatggcttgtaatctcagaataccaagcacagcttttgaaactgcttcatcctgtttaactcccttgatctcgaacttatttataaatctgtggacatataaaatctctctgatgattgctaaccaataatccctacgcgtatggcctttcagctcaggaaactctattacaacaggttctgatctacataagagaataagagcagaagttcattcccaagaaatcagaggactaatgacagacgaaaagaaaaggaaaatttcagaaagctactaaacaaaatattacatcaagctcaagtgaaaaggcaagcagataacttacaatgaaatagatttatagaatacagccttatcgaaaagtcgagtaccccatggtccagtcaactcaggtttaacaatctgttttaaatcatccgataaatcatatcgctttgctttgtcataggatacaacccggagagcttcaaagtaaagtgcatggtctgtcagagttaaccgccctgattataagcaagaatacgtaagcaaaaaattcagtcaactagtgaaatatacccataaccattatgacactagcaacacctcatgttcaataaaaaaaagttatgcagcacaaaaatggagtcttgatgttgagaatttttttgttggaagctctttcaactgaaattatttgttttcttctcattggaaacatcataaattattgatgaaagcataagcacatacagatgtatgaaaaatgagggttctttagaaaagccagtaaatcaacaaaatacccaatcaaattaaaaaagagagctaataatatccttcaaaaattaatgaagaaaacaacaatagaaattgaagaagatgatgtgtaatcacttaaatatatcttactttaatattcatgctcaattcaaacaaggccgacttaaataaattagaaaacaatataaacaaagtttaggtacaattgaaaacaatttacagaaatcaataacccccatttacctaccaggccatgtagaaattcctacatgctctagaacaggttgagtagtaactgctccttccatttccagaattttctctccttttgatgaccgaattacagaaagaagggatgagtctgactgtgtcctcattttccttattgctctgtaagataaataattcaaattgactagaaccaagttcataactccaagcacaatacatttatcttctaccaccttaagataatatgtgcaatgccattgaaataaaattatagaaaactaacatgctacaaccacaaaagtttccatattcttaatgtcttagtgtgattcaaaatggcaacgagctctctctgatgagaacctgcaactcaataaacagcaaccagcaacaaaaacaacacaccagcagcagtaaaacacaaatacccaatacaccagcaacaagaactctcaaataaccagaacacagtgagaatgattcaaattgtgagctgttattgaattgaaacaaactgagatcctcttctacacacggcagagagctaaggtagctctctactgatgcagtagagaattctctattacaaaatgcataactcaaaattaacatccctttcccatacaaaaggtagctcactactaagtacaattaccaaaatacccctgcctagaccaacacatcattggttttacct

SEQ ID NO: 243512 - DNA, 4160 bp, Cannabis indica
caagaatatttgtgtacatgtgcattttgggatacctgacacctacacattacagatccttatctcgtgctttgtaaagacctcacattttgaagagtatctatgtgtcaaggtaaatcgcttccttccagaaaatttcttattgatcattgctaactcagttaccagaatatattgtcaacctgttatgcttcgacatgaactgcttcttttattgtatcaacactggtgaagatcaaactcattattgattactacttcatcaggaagctatactcttggatcttcttagagttatcagccatcaccgggccagacttgccacaccaatccgtacagtgcaaaaaatatatagtgatgcagacttggaaaatattccattcacagattcagtatttaaccgcggtggggttgcttctactcgcccatacttactgattgagcctccatacaaaattaatggggaagataaaccaaaaacccgcacaacgcgcacaaatggagaacgagatggaaagaatacaccgcgaccagcaactgataccaaggtagatgctaaagttgcagcagcacctgcttctgactctaagaccaaagaaacatccgacaacgacacagatgccaagactggaggaccaacaaatgttgatgccaaagaggatatcaaggttggtgtagcacccactgctgatttaaaaactggtaccaatgtaccgggtagacctgactcgaaaacagattctaagttaacagaggttgattcaaaatcagacaatggatcaatgggttcgttatctggtactataactccaaagtcttcaagcagcaataaacaacccaaggatgctagtttgggacgtcaaaagagtactaataattccacttcttcgtcggaagttttgggcactgacaaagctagtttttcaacagcatcttcacaagtgaaacaagaaagtgaaaggacaccaactccaaagcaacccatatcgaagcctgttctggaagaaaatatagtacttggcgtcgccctcgagggatcaaaaagaacacttcctattgaggaagatatgatatctcctccatctcatactgaggttgcagaaatggctgctcatcgcaatggacaaggggctttaagtactgataaggataagaaagatggccagactccatcctctcccagttcaccgtctcttgacaagtgagttaagttagaaagatgggttccaagttctcttatttgctttcactgcaaatacttaaaactactcacttcatggaaggttttgattttaggctatcatacaatgtagtcatgtacatgttcccaacatactatacttttattgttatcactgtctgtgtactgtacccttgatggtcctcatcattgagcaacatgcagccacaaatagaaatgtaaacttatgccataatctaatttagttaaagtgattataatatcttactgaagacaatgcagctttatcagttttataactatgaatatgtgcatttttatcaactttagtcataaaagaatacatcgaaatgaagaaaattaagattgcttcatacaaacttcagagtcagacagacagacagacagcgtaacgtagttttgactgctgtgtgtggtggactaaaagtttcaagtgggaatgtaacgtatattttgtcttgtcagttgtcactgaacgacagtaacaaaaactatcacgtgactttaagaaatgtgatctggtatggcttcatacatttcacttctaaaatcaaaacctttgactgactcaatctgttcttttttggtgctttgaaaaataaaatagaagatcatttgtatttaccaaatgttattgtcataaatgttaatgtcacttcccaaaaataaaataaaacgaaatataagtattaaataatcgaccgggttggaagaaatattggaagtgtggtgattggagtttatgaaagggggcacgcgtcaagctgaaatgacttcctcaacgacaccccacatgtcattagatagatcctaaagccaactaaggtcacatcacaactacaaaattgggtgcttagtgtaaaagaaaagaatcccattaaaactcagtttttcctatgatggaacattattggtaatactttaatgactaaaggctgaacaaactttggcaatttataaggctgtatatcttgttggctaaactaaataactttaccgcacattatggttaaagtaaggtaaaattatattttagacatgggtcctgattcctcaccactcaccagatggtataccttctttcttgactttagggctgaaatagtaagaggaaaccctttattaatcataggtaacttattaagtcttctggcaaaatgcataaaaagggtgaaaaggaaaaggattcctcaacagctggctgtgtggagaaaagtgacacaagtaatcagttggccagttgctactgtttcacattctttttgttttacttatttggtatgaacacattggtggaagttacaaaaaacagccaatcaactacagcttgcattcatggttggatgtggtgtggactaacttggctagttaaccatgtaaatccaattgccgaatttgacaatagagtatggtatatctcaaataacatccacacagatgggaacaaaaaaaaaacaacaaacacatcttgtgagaaccactgctttatgtatatcatcatcacaaccgtgttggtgtttcagtataacaattacagacaaataagtgtagtttcaaacaaataacacattgattagtagtagtctaataataatacatccatcccataagaatctagaagtacctgtctagttctatgactcagaaaaacagggactattctcttcttatttatcaaacagtacaaacaacaaacagtagttgtgataaacaaatttgagacacagggaagcctcctcttctcctaagccaacttcaatatcacattatattatatatctattaatcttcttaggcttggcacatgcaatcaggagcaggatatgtgtaaatggattgtttgggcttcctaaatctgatctccccttgtctgttttggtgcccttctatcactgattgctgaaattcagaccaactaatgcttttgttctggaatagctgacccattaatgccatgtttggcctaatggtctttaggttgttgaaagtacgatgtcccacctgttgacaaaattaaaactaagtaccattgattcataaagcatcatgttaactcacttacatggcagaatttcataatgactttcttgtccatctgtttttgattaatagattcggtttattactaacactagactatacaatccgaaaataggaagtcaaaagattaataagaaatttctgtgtgggagcacattacaagtactcaccatggcattgtgcatatttccaggagaagcagaaataaatatgtcactgtgcatgctaacatagtagtccacagcagctagcagagatgcctttccttgaatctgtgcccgttcttcccaagaagcaaggctcttcttgtcttccattagtgggaacaatgctcgtaaagttgaaattctagcttccccaccgtatacctaaacaagccaatttcacaaattaagaaccctgagaaactggagcatgaatttgtgtccataaaatgattagttgccaaccaaaaagccataaggactaaatagaacttaattccaaccttgtgggaagcaagatatagacgagtattgttgtcgaatcccaaagcagctagaagcaatccaatctcttctggagtcaaagggcaacgaccctgattcctcaactcctcatcagtgaattgggaattaaggactcttccttgccatatagtttgtcggtatttcgcgagagcaagtttttcagctttccccccaccaaaatcacaggctgaatgagctgccatgtcctgtagaataacaatatcagggacagagatagggaaagagaccatcagcagcagatatgcttcggacattctttaaacttgaatatatgattaatacatagtactacctgaatgactgaaattaaatgtttgtaaataaatgctagaaaccatgaagtctacaagctagtatatccattccaa

SEQ ID NO: 243513 - DNA, 3895 bp, Cannabis indica
ctgggtactcctccttttgatcatactcagagaaaacgttgaccctttatacatcaatgaagctttcgtttttatcttcgctggtttgacttttttagctgaatattttgttatgggaaaaggattaacgggtcttagtagcacggcttatgatttattaggagcattgacccttgtttgtgccggttgttcattctatttatcagttaaaccctctgctttttttgctgagtttttgctatctactgggttggttttcaaagggacttggattttgcaatctgggttgtctttgtatactgatacatttgggttcaaagggtgtcagaaagtaatggtcttgcctggtaaggagaatgctgatatgggttgtgatcttgaagaggatggtttcagggctgtggctttgatgagattattgttcactggtcatgctattttggtcttgcttttgagttttggattgtttggattgttgtcaaagaatcagaatttgaggtttggtgatggaggtggtcctttgctttcacaggttgattcagagaatatgctgatgcgaactagtgctgagcttgagattgagtgaaatgtatgtctttttattgtacataagtttaaagatgaaataacatttgtttgattcatttttttgcacacaattcattttcattttgtcagttaatttgttgttcattgttttatctgagatttctttagttggaacggataacctatgttgtgagactcaataatagatgaatgaaatttactactgaattctgattaaattgtgaaatgagtttttgatatttgtgtttgcagatttcaagttatcttaataaaataaaattaaaaaatgtttggcagagtgtcaaagtaagataaaacaagatgagcatctttatacttttaaattagaagaacattattaaggtcttgttacaatagatggaatgatgcatttgcaaaatctttgttgccatgcaatcttgaaagtacatatgtagatgctcttcttaggatcctagtttcaagttcaactctagaatttacatttagtaatgcaaaatataaactattctaatttggtatatccctttgaagaagaaaagcttggcattttcaatttcaaccattgtcgtcgaaagcgtccaaatccatgaattttaattcggaaacggattctcttgatcttcttgctgagagctccacattttcgtttgatgatattagatttagtcaatttgatcagccttgtcatgaacctacgttctgttttcaccaaaaattaaaaaacaagagtattatagttcaaccattaacaaattaaatcctctgaaaacttttcttatgagatatgccaataattaaatatttggttaactccttactgcattacatagtattgtgacaatcgtacctttaaccttgttagttttggtttctatttctcctgagctcggggtgtgcaggacctgcgagtttagtatcttaacattagcactaccatcttcttgtagtgtcattgccttgctcatgtctaacagtaattcaattaatgtaataaggttgatttgtttagtacctgaaccagtctttccaatcgatttctcattcttctttgaataaaacctctggtgctctgtttgtgaaatgttgtcagtcaaaggtttgatgtgagtgagtgtactttggtgcttaaaagctccaataaatgacatgacatgttacctttacatgatattttacataggcatagaagttcaataagctccaaacagttttgtctagtcgtttactctccacgtgacggggaaatatatctgtgcatcatcggagaaacatggtttttaggcttaaggaatgttaaaccaatatggtacatgcaaaccagactagggaagctttatttctattatagattatggccaaatgttctaatattctctggtgcttagccaaaggaggcattataatttgatgaatatgaggatatataccaaaagaaacaaatcctccattggtgctcaaatcattaaaagtttctcctcttaactctggaggaggaattggtgaccagttacaagaaggtgcctttgcccatttttcagaactaccaacatccatgagttcctgtctccagaaagagaaaacaactaatttcatcgctcgaaatataggaatggcaaggaagaagatgtctaatattttactttcgctgtatcaaccacaaacctgaaagaatgctgttgcaataatcacatcggaatcttctttgaaccgcattgggaatattgctatgattttctgtggctgtaaaagacatcaaaactctgtacttaactggtgtatcatacatcagtagtctgtgaatgttctgttgttgatatcaaattccatatgtattggctttttatattgaaaacaattttgagattaatgcaggagaagggtagaagattgtatcagacatgtataagaaagttgtataaactcaaactatcaaaagattacaagtgttctatgacatgtgaaaatgtttatggtactaacttttgggcttctgaagctctaaaagcatttttgcgtgggtaaacagtgagtttcgacattagtaactttttcaagaagagcttcctgagaagctgaagcctggccaaactggggacgaaaagttcatcgtggacgttttactaaaattattatgatgcttcggaagggaatagagaaatttgaacttacctgtttaatgacaaagaaaggttctcttgggtgatatattagttttatgggtttgtacattccttgatatgaatcctgggagttgacattctgcaacatctccttcaactgagaacttattattactgcttgcaccgccgaaatcttttcaattatcttttcagaatctggaacagtaagaacatccatcaagacacagttatacaacatgtctttcatgattttcaactcttagaagaacattgattaaccattattaactcacatgtttctcttcccaaacatttcaaatgcaaatcttcccttgaaaacatacaaaagataagaactttttgcttttctaatatgtttgtccatacttgatacaggtgactaaaactatagaaggattatcaaaccttttttatttggaattttggaaaagtcaagtcttaaagtaagttggtatccttgttttgcaggttcaaaaatctccacaacatcagaacagattccctctaccatctgtatggtataatgtgaaagcccaaatgattgtaacactccctgggacagtagcggcgtcgatattgacaagtaagtaagctgtggatctgatactgaacactgcttataaacaaagtaaacaaatcccattaagaaataaaaaatgtctgttgtagttgctacacaagaaacataatatgaatgctttaatacttagaatatatatattatacagttcatatagtgctctgatctgattggtagtacctgaacatggtattccactgacccaaattcatacaagtgatgatcaatctccatgggcttttgagcactgtaatcaaatagacagcattaacaatacaattttttttagattctgtgaccaaagtaaatttctctattattgttcctttatatctgggatttaatacatgaagttctttttaagtttgtttccttctttttcttttattataaactaataaataatagctgttattgaagttatccttagaaaatatggttagaggaactatgagtggggcaattaggcataaattgatatcgacccctcagaatttgataacttcaacgacattaacaacattaacaacaacttttgaattttttttggattacattcattatctcaagttttgaatcg

SEQ ID NO: 243514 - DNA, 4380 bp, Cannabis indica
taaaatatttccaacagaaagatcattggatttggacgaaggaaggtaatggccggttctcttgtaagtcagcatatcttatccaagccctcaagagaaacccccactgtcagggggctccagttctctggaacaatctttggaatagcaagatctttgagcgtcacaagattctgtggtggagcattctctccgaagcgctcctgaccaggtcgactctaaataaagattttcttatcgaggacacacatggcccaatttgtggaatgaaagatgaatcgactgggcacctgttccttcattgcaaccttgcgtatcacttgtggtgcacttccccgtggagaatcttttctatgtctgacaccgggattagagtttgtgattggattaagttcatttggaatcttcagcacaaaggtgtaaacccggacgaggtgttcctttatgcttctgttgttgtggacacgatatggagagtttggaatgataaggtacatcataaaatggataatgtgaagcaatgtattgactaaaattttcactcttttgcagattacaaatcttcctttatccatcctccttctccgagccgctctcttgcttggtgtctgcctcctcaagattggttcaaactgaactgcgacgtcaaagtaggttcgaaacacatgtgcattgcagttgttgctagaaacaccttggcgaggtgatttgggtgaccttagcaaaattggatttcgctgacgctctatacggtaaggcggcgtctatttgcttggttttagaggtggctttagaattagaatgcaaatttattattattgagagtgactttaagacagtaatcaattccatcgctagggtggactctaggtgggaaattgaaaatcactcctctttttgtaatagagtcatgtgctcttttgctagttgtttattttgtaatatttttaaaatttgtaattttatgacttataatgtaactaagtgagtgtttatctacaactaatttagtcaactttctatttttccatttttaagaatatattatgtaataactgcaaagtttaagttttatattttagttttttttaaaaaaaatcaaaagtaatataaaagaatgagaaaataatatgttatattttaaagtggtataggattttgtgacaaactttcaacattacttgtatgctttaaaatcacttctcttctgtccgttccatataaacccaatctgtacacgtgtcatccggacaaactgaccgtacggtcatttccacgcaaaggcgagtaagctaattaaaactgatttttgagaagataaacaagcttcgttgatgacacgtgagcaattgtgggcccctattgggcctttctaccagcccaagagagaaaataccatatcgaccagtagtacccacctcgaacaacaccaccatcgttttctctctctctctctctcccgatatctttttctcaatttttcttatcgataaagtccaaacatggcgcactgaacccactcagccataaccacacacatgcgcacatagtttctttattgattctctaatctacctctcactttcactttcattctcattcacttctattctatccagaatcgctaaactaagatcatcataaaccgttgattctgcatatataatatgtatatgtatatgtatatcagtatatgagtcagtgaagatattattaaccagaaaaaaaggagagaatttgagctaaagagatggggacggggtcgtctaaagatacggacggggcttctcatggaagcgatggaagagaaggggaaaatttagaccaggcaggtggtcaactttatgtgtcgttgaaaatggagaattacaagctcaaagaggagctcattcctcatgtctacggctctgttccgcttattggttcttgggattcttctaaagctgtaagaattttacctatatatcacttttttctcttattgctattgttggtaaaatggtatatatgaatttaaatttattgttcttggtggacgtttttagctttctatggaacgggaatcggcctctatgtgggaattgagctttgttgttcctcccaatcacggtagctttctcgtggctcttcttctcaattcaaatgctttatgctatgaatacataagactagcctttcctaatttgggtttttgctgaaatgacctatacaagaactcattgtacgactgactataatcatgctttgttcaattacgaatcttggtgttgtttacgtttactattatcttgtgaacttaggtttattcagcttcagcttcagggaaggggtttgttttcacgagttttactcacaaacatattgaaaatagaaaccaaataggaaggatgaaagaagtattaggtgtctttattattggattggattaaaatatggtcaacgttctcttgctggtttgacttaatagttcgtcaagtatttttttaatggttctatttgtgttttttctgtttatgatggatatagaatcattggatttcaagttccttttgaagccaaagcacagcagtgtgccttgtgtagttgaggaaggatcaaatcgtcgacttattaggggaaccttgcaaggggatgcaagagtggctctatttaagctaaatggagatgatattctggagtatcgagtgttcattaaagcagacagggtatcgccattcgatcttgcagctagttggagggcttatcaagaaaatctcaggccttcgtctgtacgagggattcctgatgtccgtatagattcagtgccagagatcagtgttgaggtgtgttaagagtcttacacttttcttgttggtgcatttctaaatttcctgtaatgtttgacccatccaaagtcttaggtcttgaaattatatgctgcaaattagggtgctttccaatcaaattcaaattattatttatttttgctgaattgctttgaattgttatgctagattaatattattcccgaaccctcctctttattacttgcctatatatgcacagaatggatcttcagctagcttggaccttgatattgaacattatgttgtcccagctccatcaacttctgccacttcaggtctggtttatgcagctaacatgacagagactcctaggtcattaacccttactggagtattttcaaaagctgatgggtctagcagtgctgcatatacctacaaagatggtgctggtgtgtctgcagatcaaacttcaccaaaaaaggtttgtttcagcaactcatattgtgtaaattagagctttagaaagttgtgtgcgcaaaagtgttatgttggatcatatgaggttcttcactgtattttgtagactttcgatgcttaagttcaccgtcatcataccaaccatgttcatccaaagcttatttatttttttagtaagtacgtaaattaatgttgaatcattagtttagacatgatatttgtgtatgaagttggagagcattttgtgatcaacgtgtgggtacgccgtactcgtgtgtttggaatatcctccaaaaaaagtagtttttgtagtgttctagattgaatgcattactctaatttcataccaggggatggaggttgttgtcccagacccgtccaaggtgtatgtatcttctgggatggtagaatctaagtcagtgggaacgctttcacctttgcaaaggcaagatagtcacaggggtctctttgtggacagaggtgttggttctcctaggctggttaaatcgtctagtgcttctactttctcttttgatctcaaactggacacagaaaccaaggtttgtgtagaaatacatttttcttttttttcctatgaatatttatattgcacttactgatttatttaagactttctttcaccctgttttctattggctgttagaattcaatgccagcagctgctggagctgttgcagcagcagcagtagctgatcaaatgcttggaccaaaggaggataaacatttggcaattgtcttggtactctctttcctgatttatgaaataaaataaaaaaaagaaaaaaaaaagattcaatagcagaaacattttctcacctactttttttgtattcttagtcataaacttaagaaagctgaagttcaatataactttttcacattccaaaagtcagaaatttgatatgctgccaatatcaccgggtttcagttggtgctttaaatgtaaattattagtttgctgagtgcaataatgtctaatcatgtttctttactccaggttgggttaccttgcgtcgtggtaaaactttactgcagctaaactgactagatacctacgctggctgggtcatgatacaaaacatttcaatgttggaaa

SEQ ID NO: 243515 - DNA, 2087 bp, Cannabis indica
gaagaaatcaagtgaattagtacacaaaagaaagccaaaaagagctgcaacgagctagctcccatagctgcaaacttgcagtccaagtcctcaactcaactcttaactgtatgaacaaagaattaatatatatgtttaaaagagacaaacgacaacaggagcctagcaatttttcaatcaaacgacaagaaaacacaaatagcttcgaagcttcaacatttgcccatgccaaagtatagtcgagttttctgtccagaagaagaaaaataaaaattaatctatctagcaaggtagcaagagaaagagagagaaagaggtttggctaggtcctttatgtgtttccttatgaatgatttttcctcgtctttattagatcaatcaattctcaactacaacatataaaatacaattaatgttgtctcagtcatcattatcaaaaatgtcaaggaactttttatggaccatgtctttcactgtttccttcgtccgccgcctcaattgtccaaataagactaactacactgcgttgaccaatgactcccatcgtgccaactaaccttccaatttgattattcaagcaccatttaaaaaagtaatataataatgcgagaaactaacgactttgattataaagctcgtaggacaacttttcccttccactaaaatcaactatatatcaaacattataataccgtacagtacaatacaataatctttttccaggccaaaaaagtaaaaaagaaaaagaaacacaagcagaatagtgtgctacttgggttcaatctttgttgaaagtgtgtatccaccactataatcaaaggcctcactatcactaacatccttttgaggcaaagcatcattactataaggatgtttaagagggccttttgcgtttccaacaaaatcggtggctgaagaggatgctgatgttgaattggtattgattccatcattctgtaaaatggtttcaatagcctttacaacttcactcattgttggacgatcagcagctacctcttcaacgcattgcatggccaaatccaagaacttgccaaagccaattagaattggagtgtttctaatcgttggatccatcatctccttcaagccgtaactctccaggtcgtttctattcattgacgttcgtacttcgcgtacaatatactttcctttctcgattggttgcttcgcagtaatgagctcgagcataacaactccaaaactgtacacatcgcttttctctgtcaattgttgagtcatgtagtactcaggatcaagataaccctgcaagaacagaacaaaataaaatcagcacgataaaattactttctatttcgtgttgattgagccatgccttctggacattttctaacggttctttagaattgctaaaatgcctaactttgacttttaattatgtagacaaaagaatgattgctataatgaaaaaaggaaaaagaaaaataacttgggtcacatccttttacttgaacatggattagaaatgaaaactaaccactcttagcattgttcctcctttcagagacacaataataccaagcaaaagtaggcccaaatgagttttttcttcatctttttattcttctttattttcctcataatgtaaaattaatattaattatccttgtaatgtagcttaatactcaccagagtgcctttgacttgagttgaaacatgtccttttccactgtctgagaccagcttagacaagccaaaatctgcaacctttgctcctaaagtttcatctagtagaatattggttgttttgacatccctgtgaattattggaggatttgctagctcatgtaggtaagcaagtcctcttgctgagccaagagctatgcgaagtctcctcttccaatcgagatgaataccagatttacctacagttcacatgacacagaatgcattgtgatgagttcaacaatatttgtcgtaactgtagaatgtaaatctgtgatatgactagtttaaatagctagaagttagtgaatatattttctttattcattcctcttatatggcgtttggttggaggtaatgaaatggaatggaatggaaaggaa

SEQ ID NO: 243516 - DNA, 1131 bp, Cannabis indica
gtgatcgcgatcaagttgatgatataataattaattgaatatgagtttttcatcaaaagcttaattaataacattttgtgactgagatcagtgaccatttaagatttttctagaagcaaagcaaatgtttggtactaaataagaactcaaattaaaataaacaaacaaagatattgatcaagtttcaataaaatgaattgaatcaacacttctacactactatagtatattatatatgaacaaaagaaagaatatcattatcaactacttgatcagaagttttgatatgaatcattatcaagaggtaattacctcaacagtggccatttctgaaataaagggtaatgaaaattgaagagagaaaaaagtgaaaaaatatgagaagtatagagtgagtatgtggagaaatattaatgctgattagctaaggtggtgaagaaaggagtaatatgagagctatatatagagacgttaagtgcctaaaaagtaaaaaaaaaaaaagagagagaatagttgaatgaaggctttgaaagaggagtggggaaatgaacatgacttgaagaatcttttttccaaattgacacctcatgtcactgacacatattaaaggacacaaacacaaacacaacactaatttgtctagttgtaaattgtttttgctccttaattatttttaagaatcagaattattttcatcaattattatagattagaatcgtattgtaaatttcatttgatatagaaattaatagaatcaatgagaaaagccatattatgttatggtaatggtaatggtggaggccatttttcgtataagcatcatcatatctttcttttgagttgggtgtttgtgcagttaatacctagctacatcaaaatcaaacacatatacataatacatgtgcatcactaactatcgtgctctcatgttactccattcatttctttttacaaaaattaatttaaagttcttatttttttttaacccactagctcattatatatagagctcagtcaattataaacaatctaattatgtattttcgtacaaacttcaatttcacggggagtttgtaattttattttgtaaaaatttaaaattaattacgaatttttatgcatttttttttt

SEQ ID NO: 243517 - DNA, 7313 bp, Cannabis indica
tcaaaagatgagctccttgtttttccataatcatatagtggaagtagagactttgagtttgagtttgaccatgaactgtttttgtctctccccaaactatatgttgtcgaaagcttcctctctattccttccctttccctaaccaaatcatctaacttttcatgcacttcattgttattattattattagccactgcctcttctgcagctttggtttggagctctgtaatgcttctgtcaaatgacttcttctggagttggagagagcgctgtcgtgatcgaaaatatggtaagaaaaatgcataagtagctgattaagaataaagaattctgaattgggttttccctgtcttctaattttcttttgtttattcaaaggaaatatggtctcatggattaaaaggttacccttttgtcaagaaagcgtccaaggtgttgactttggagtttctttttcctccaaaatatgcagcaaaatcgagctagtccagctagaaatatcaagatgaaggactcaaatagtagaaacaaaaatattgccctttcattccctgaaaaaacagataaggaactacaaagatcaaaatcttgtgatttatacaagatgttcaaattcatagcttcaaacttagtaacctgtgtaaagcctgagaagcttgggtctagcttgggagcaagtagaaataagcttctgatctgcataaagttgaaaaaaatcattacagagaaaatgcttgtgagatagcttactatgcaagcaagcagaaaaatgattactcacgtctggaacgacatgccaatggatttccagtctctgcatcagaaagaaaacaatgagtttttcaatacactagacctgtagaataaaagaccttttgcatgagtataaaggggtcaggtaaactgtgtatgtagttcatcatagattctcacttgaagcagcaaaaaatgcaagcagaatcctttcatccagcacataacggtccaagtcagtcttagccaatggaggtgaaaagtcacctgtaaaaccaaagggttaaaactaatacagagtgtaagcaacaacacatgaaaacaacccacattaccaggatatctttcagaccagtagatggatccagtttctgggacatatagggtgaagaccacactccttggtttcattgctgagacataagtgtaatcacctattgtgcggctagtctttccctccatttcagtttgagaaaaatataatgcatagccagaacaatcaagaactggactcacttggataacagaatttgctgcagttgacttagaaaattttttaagtgccccatttggcgaaaatgaatataagaagccgtccaatgaaccaatggatacccaacctttgaaatagtttaagtattagattgagttaagacaaatcacataaccaagaccaggcaaaacaacatgtgtttttttctcaattgacgcatatcaaaatcaagaaattaccattagtatcaacaactggtgcagagtttactgaacttaaaggtcctatacttccctgccatagcaagtttccagtgtaaacatcaagtgtgagcagaatagacttgtctggcacaacaacatatacccgaccattgtttccaggagtgacagtaaaaactttgccaaacaaactcaagtcatgtatccacataaagtgaggactcttagtagacagtgaatacagttctccctctgtatttgaaatctgcagtagaagtaaaatgagatcaaaataagactagtgtccctctcactatgctccgcaaatggtatgaattagaacaaaataagatattaatcaaggactagttaacacttacataaatactagcctcacatcgatcaatcactgggacagagttgaaataacattctgtgacatttttcttacatccttggcggtagccaaattgattgagcacaggtccggcactccacaaaagttgtctacgtgtagagtatgcaaagagtccctgacccctaatgttgacaaacatagaggaactcaatgtgctaactgagaatccaataatctcaccttttccttctctatctgctggttgaaaacttaggacaacttctgcatttggttcagaagttccaatctttaacaagttaatttctacaactctattctctgcagccacatatatctgccaatattcgaaaggtttttccttttcatgggtcataatgactataatggtactagagaaagctatgctatcaaataaggtacttgaaaaccccatatagtatattttgctattcttaattaataataaacatagacaaagagagaatatatgaacatgaactagaaggaagaaatcaaggaaaatggtgtaccttttcatttccaccataaactggagccatatcagcataacatgtgtaattcaaacgaattgtccatgcattagaaccattactctcaaatgcaaacaaatctttctcagaacaaatataaatcctcccatcatttccaattagaggtttcgaaagtctacgtgcaaattttcttgacactgcttcagctgtaatatgagaaagaaaaaactcagcaccaaaagcttatagataacaatgtatgaaactcattaaatcccacatttactttctttttgttctttatgaacatgccttatgaaacaagaagaagaatccttgtgtgtgtgagagagagagacctgaaaacaaagaagaatcctttgggtacttcggcaactcttgtggttgacaatgtatggaattcagtagaaccaaaaggaataaaaagaaaacgacatggattcttggcaacattgaagagtgagtagcagtgatcccaagttcaaaatcgaaacatgaagatgtatcagtagagaggtctctcattaccatgattaaagtaaacggttactctaaatctgattgaaacaaaatctgttgttctaaacttggtgtcccaatttggcaaagaagtagaagatcgtgataggacagcaactccatcaatgatccgcactgaaaaaaaaaaacgtattgggctcaaaactgtaagtacagtaactgttgtgagtaaagcaactgtttatccggcctagaagtgaaacgacattcgtcctctccaattaggaatgtcaagtgggacgggtcaggcccgacccggcccggcaacattttggcccgatctggtccggcatgacctgcctccttctcttttccaaaaataattattattattatttatggcaagaataatgatttaatttttctatgaaatatgcatttattgaaaatgaatttattgtcctattataaatttataatgaaacaaaggcttgatttagaggaggtttggtgtcataactttaaaataaattttaaaaactaatagagaccctttggcaaatttttttaacaacaattttttaaaattgagttttaaaaaacgaaaaaattaaaatatcaaaatgttatttttaattttcaaaattaattttttttgtctaacatattatattttatatttttgcttgcatactcaaattctagactcgaaaccatacctgaactcgaactcagatggtctcatgtcatggtatggtgttaaattattaattttttaataataaaaaatacaaaaataattttaaaaaatttgtatcaaacatcattaaatttttaaacttattttctattctcacttttaaaatacaattttaaaaattgaaaacacaacaaaacatgttcaaaagtttcgagaatttttaaatgccaattgcaccaaataaagtttaataattaaaacaaatctgcatagacatcaataatcaatatcctatcacatcccattctcaatcacaattaattaaaaaataaataatggtagaacacaattaaattacattctactttatattttttgacaatttttctgtcttaattttggagcacaagccaaaaccaaaacaaattcagcaacacaccaagaatatagactgaaagaaaactaacaccaacaaaaccagcaactaaaataacaaacagcagctaaacaaacaattaactatatcaaagcagtcccaatgaaaaaaaaaacaagataaattaatgttctctgctttataaaccagcgataagctttattaaagtctgaaactttgtacacaaattaacttgtctacttcttagaagcatggttatgaaaagaaaaaaaactcaaaatcaaacaaactaaactataaaactcattacatagaagactcattaatattttcccaaatcaaacaacccaaatataaaataaggccttaagccaatatgtattccaatacttccctcgagtgtacactctaaagtaccatctatatgtttatcgcacactagatttatttttctttctctttctttatttctcaatcatcttagctcttagtcataaactactcaagaaaagcctacacctaatttaaaaacaaaatcattgataacgaaacttcaatcaaatgttgttgcgtaacatatctccctagtagttgggaaacatgtcaatgagtaccaataataatccataattgaaatgagttcgtatctcaaacaaagccaacatttttaaaagatttttagttgcatttccaaacacaaataaaatccaaacacgagtttcaatgggcacgtcactaactaaaatagattaacaatatcaaaattagaatacggtccactttcgagaaagcgaaaaatgtgcgacttattaagaagaaattgaatgagagcaggaacttattgaaacaaaaatttaaatattcataatatgaaatcataaaatacacatagaaagagcgagagaagctaacagtttcccaataattgcgtggtcgacggtctaagacaggagtgaagtgaaagtgggcagccttataaaagtagcaggaatggttggagtaacaagtatattttcgaagaagtaacactaaaacctctgtgattgttcgaataacacagagaaaaatataaaactaaaatactgtacataccttagtgatgatgggaagagagaagggacttttgaataactgttttgagtaaaataactgttagaagtgaaacgacatttgtcttgtcctctccgaggttgataaatcgaagaaaaccgaaaaggctgatagagcgattggattggagaaagagcagagcccaaaatgaaacccacccacctacgtatataactgggcttaaaagaatacaatcacacccacctttttttctaataagagattttcagcctaaaatatacagatttctttttttaaattaccattttgtaaaaataatgtaaagaaataacaaatcatatttttgttttaagataaaaggtcaaatctaaaataacaactcatatttttgtaatcattttatttttttgttatttctgaaaatttatgaaaataatccttaactaaaactacccacatttctcaatataattattatatctatatattagatggatcttgccgagccacgcattgttagttttatttagagttcatttgatacgttatattacactgtattgtattgtatagtattattaaattgtattttatgcaatatttttatgtaaaactatacgtggaattaacttttagacacctaaatatataatattttaagaaaaaataaaatttaattcatagtattatagaaaaatataatatatatatatataatccaatttatatagcttagggcttgagggacttagaattcatgtcccttttcactttgcctaatgccttttatatagcttagggcttacaaagatctatattcaagtaagtaaatatctttaaaaatagaaaaaaccatcttttatcatatatttaagttacaaaaataactaactaatatccctaaaagataggtagatagtttggggttgaatccctactttcatgggttgtttgagttgtcttgtatttgaaaccgagtcatgacccgtctaggaggatggttgtggaccctaccattcaatcaggcttcctttaatgctctttatctgtgctggtcagcctaccttttgcttggggcttgcctgcatataggcatccttggccggccagggtatagtctgaccaaatcctcctagttggccatttttgtaacttgatcttgatcgtgtctttggatcccttgttaattgatgtattgtgcatggtgatttggctcacctattgacaccctatattcaatgtgaccctaatcttgtctacgtggacatgctatgtcatgtgggtaaaaattgagatagtactctacaatacttttgtattttccatatccaaatagttttagttttaatttttttttatatgaatactagttgttttttttatatttaaaaaaaaatgaaaattttggagaatgaaaattgaattttggataatgaggtccatataataggattaattacaccgcatactaaaatttttaacttttttacttttttactttgggacagaatttttttaaaaaaataccatataagttttatattgtatactgtgttaagttttagttattttgttttgtgtttcactgttgttttataaaaatacagtatttttgtaaaagttaatccaaatttgagtatatttgtaggtttcccatataatattgggctcatgaaggtcggcccggttgttagtttagttcggcccaatagtttttgtagctttgctcagctttcttcctcgtgatttcgcgtgcgactgactgcttcgaagtcgtacaataacaatattcttcccgtagtgatgggcattttgagtaaagggtcccgactactcacaacaacaactctcagactcagactcttcacacaccaccaatatcccataccaacacctcacaagaactcaccgttttcgcaaactttccatggatactgatggtgccggagctggagttgctcgcttccctttgtctgcctccacctctctcgttattcagagaggagacctcactaagtggttcatcgacggaacaaccgacgccatagtcagtaccactcactccatcttttctcttttttctttttccttaattgtggtttattagaaaacaaaagagtctgttaactttccggatttctatgttttaaaatcttttgattattgcaatattattgattattttgcttagatttcaactctgttagtatatccaccttaatctaacgaaatcaaattcttctatacataaatatatgtatattataggttaatcctgcgaatgag

SEQ ID NO: 243518 - DNA, 5378 bp, Cannabis indica
tcatattgtgtcatgccttaaactttactatttttttatatctagtcgtgttcgtgccttccaaactcgtgccgtgttaaaatgtctggcttgcatttataaccccatatttgagttgatccataaaattccttataacctatataattacaaaaataaagagaatttttttttactactttaaaataattttttttagtaattttacggaattttacacaaaaattactacagtaactaaccgagcaacctaaatcgcaactaaaatttacatagcaacccatataaaaattattagaggagaagaaaaattaaaaaataatatatagataattctctcgaaataaataacatatctatttaaaataaaataaataataaatctttacaaaaataaaaataaaataaaaaaaaaggtgttaaaccctacactcgtcgattccctgtgctgtgcgcctccctccaacactctcaactctcactacctctctctcccgttctcttcgccggcgtcgatctccacaaccctcctctctccatttctctatcgcctgtttcatttactcatctctccctttctcggcagtcgtagccaccaccaaccacacagctcctcttccctccgcagtcggcaccacccaactccggcgtccctctctatttttatcggcgactgcatcggtatgaatctccaacaggtattcaaattgttggctgccgttctttatttctttaatactcaatatctttatttttatttttaagcttgaatgtttgagtaagtagagttaattattttgtttaattttgtgttcactactgtaatttgttcaggaaatatatatgagtattgatatgcctatttaaattttcctgtactttgacccctattgactcaaaatagtgctgcattagtcatctgattctttagatgttctggtacactatttccataggagaatagaatgtgatcataattgggcttcctagaatcagattagcatcatgatcattcatcactaattgcagtttttgcgctatgtactttatctgaagctttattcacctgaaaatgagacaataatagaggatataagataagatggtttcacatgatgatagaatctataaataagtttactaaaagaagaaactttttcgaaaaggtctttttttcaccccttttccccaatcagtgcatattgttagaatattttacacacaatacctgcatgattaaggtcactataattcccatccaaaacacctgtgtaacacgcacattttgattttagctccgactgtctattgttcatattctttttataacagaaaaggaggggctgagttaattttgggtacttttgatttgatttgtttttaggatcattagcaagactttggtgtttgcgtctctttcagccgtttgggcactccaacaagctccaacaggtattcaattttaattttgagattgatttctctagtttgaagttgtttattgtttgagttgtattgtatctatgtatcggaggtacattttcaatatttagctcattcctgtcttggattttcttatgttgtccgtactctgttattccattgatgcatgttttgcatggtttgacttctgtattttctactgccaagtgcagttcatttcatcacttacggtctaattgttatgaacaattcatcaatttttgaatcaaattctccaatattttctgccacacaatcacagattggggctgtttcttccatttttcctcaaatcatggaacagccagtttttagaaagacatcaagtccgtagtttaaagtataatctaagcactaagcacaagtgaggtgtgaaagtgagaagcctatccaaagcaacattatagggtggggaaggagagtaattaattatatgtttctctataaaccctttttgttttttctttttctcaatgtaattttcttgactctgtagaacatgtactttaaataaatatgttaatgtgcatataattatttgtctcgcatatatgatgtttgggattgtgatttattagcccaggtatatcgacaaattggattgtacaagctaaatatgagtatgaatgatgccatcatataaatgtgttatcactcatcttgacatctttatataataaattaaatcggtgaaaccaatccagtaaaccagtacttacatgccttcaaaagcttaagttctatggatttggacatggtggttgactgttttgtacttgaactgtatggtggttgatttgaacttcggattttggatttaaactttagaacttagtttatgtttgtctcatttttacaattaagtataaaattgaatctgaaacaaaaaaaaaactccaaatgtcggtttggactgtgagaaagagagagaaaccccaaaattacttgaaatcattgattagattttattcccggttgacttctttttttttcctcttaattataagctgttttgctccccagcttgttaaattttcaatttttattcatttgtttccatgttctactatttaattttttatgggttgataatgtttgttgaattgtttaaaggtcagatgatttagtatttgtttgattttaatttggtgaaatattatgatataatggattatttgtttgttaaaatgcttaagacggaggatttagcttgaatgtttttcatgtaagtttgtttcattgtcattaattcctacatcgtaattggactaagaatatgaatgtagatttgatttattcatatgttggaatttttttaaggtctaaccttcttttcatttaccagtttttactactcagccaatgttactctaccgctctttagtcaccaaagcgatccacatccggcactatacccaagctgctgctgcggcactccaggtagagccgcccgagtcttctgtgctgacgtatctagaagggtttccaacacctgacccgaaatatgcagagacaatccttgcaatcccacgtgtttcatcaggtaagagcatctcagcaaaggagagaaaggcagggagagtccccagcattgtgtttgagcaggaggacgggcaacatggaggtaacaagcgccttatctctgtccgcacaaaccaaatacgcaaactagtcactcagctaggccgctcgttcttcctctctcgtctctttgatcttgaggttcgctctgattttgaatccgacactgaccttatcgagaaggtccgcgtgcttcctcgcctggtaatccattgctaatctttttatctgttttattccttcttgtgtatattattgttgattgttgaaaagttggttaaagttctttgattgccttcctctggactaaattcaaaggtggcaatttgaaaataagttaagtcacacggagcattttacattttttggttaggcaccatgtgccatgtagtataaagtatgatgctttgtttgattgcctgaaaacttatgaaatcgtagaaaggtgtagtagaattggttgcgatgattaaaaaaaaaaattgatcaaatcatgctctgaactgtcattcaataaacctttccaggttcatcttcactcggcatcggatgcaccacttaacgtaacctttataagggcaccttcacatgctttgttgaaagttaatattcctctagtgtttcgaggagacgatatttcccctgggctgaggaaaggttagcaatctaatctgttgtcccactttattgctatagtgtgtaaatgaatcaggtattgtcttttcaaatatactccttccaatggtttgacatttagttctctctttatcttggcaagccatctctttcataatcgcttcttaaggaagacttctatttattcagagaactcaatttatggtttggttataaacaccttaaaagaaagaggagtggataatgtttattattttggagctcaagacatttttagaccatcatgcatctcaaagagtgcttattgttttcaagctcactttcttagaccatctgtctttgctgtcaagttgtccattaccattttccaattatacctaaaaagtgacatctaatctattacatttatgtcaggagactttactaacttaatgggcaggcttacaactaatttgctaaactgtatagttataagaaataacatctatctaaggatttatttagttaatgtcagctctatattcaagttttcgtcatagtttccccacttgacttttctactcttgtacttctagttgcttggaatcacttcattcattctgtttagctgatttatttagtgttctagattctggtttaaatcatgacttaaacaactttacaggctcttatttaaacaccataaagagaacagtgaagtttctttgtcccgcggatgttgtcccaccattcatcgatgttgatctgagcgagttggacgtaggccagaagttagttgttggagatttgaaggtccatccagcactaatgcctcttcatccaaaagaagagcctgtttgtaagattgcaggaaccagggtttctgacacaaagaaagccaagtagttacttacatcttcttcttggatttgattattaagaagttctgttgttccattgccttcatgatgatctattgtgggagcaatcaaggcaggtttacgcatcttttaccttcatttttcggcactatatcgggtgatgagggatgtctgagaaactgaatgtagtgtggaaggaaaatattgttgcttatcagtcaactcttgaagcgtagagagaataatgcagaattttgttacataaagaatgtgagaaattcatataaaggttctatttcaaggcacattttcaattgctcattttttcttaacaatttgttctattcttatatctattagtattgttattggatactagtagtgcttagtatcttctaaaggtgtcgttctgcaactggttagtaatataccttaaaaaattattatattaatatgagtaatttgcggcataaatacctaagttttatgccaagtaacagataaatacctaactcgtatttttagcggtaaaaataccttccgtcactagtgtggaaggtccgtaggtacctggccgttatgtgctaggttagtgtccacgtgtcactatgtgattagtccagatcattttatttttattttttatttgtaaatcaaattaaaaaataaacaaataaaacaaaatatagtttaaaattaaaataaaataataaatatttaatattcatattttcattaaactaaattaaaataaattattaattaaaacccaaaaatcaaaatatctattcgtcatcctcttcttcttcttactgctct

SEQ ID NO: 243519 - DNA, 1097 bp, Cannabis indica
aaaaattcagagagcataatttacatgtcaaataagagaaaaattgctaattagcctaatatttatttagaatattgattaaataataacattttattataattttattagtatatatatgtatttttcaaatgatacagttaatatacatttatataattaaaaccttacctacgtacgcacatgatgaaagaacttaacagatagctagcacgagcaagaaagtagagaaatgattatttttaataacatcaattaatttgacattttgtcttcttattatattgaaactagtattcgttcatgggacaggagcaattgataaccaacagttagtgtattagattagttaatttatgttggtttagttttactgtcaaaaaagttactgacaaatttttaatcacaacaaaaaattattttgaactaaaatattaatatttagatacaagttatcactaatttaattttagtgacaacaaatattatgactaaaacacatttagtcacaataaattgtaattattatgactaatacatttaccacggaccttttagtcacaatgtaaaaataattatttataattagtcataatattttttacttttagtcacaaattttattatgactaaaagtaaaaaattttgtagtgtttgtatgttaaccaaatctgttcattgtcatattcttgtaagaatgtctcttttataaataaaaagttaagcctttgtttgagaggtttgttgccaagcgttctttaaaattctatgttctctttttctcttttgtttctacacttttatggtatcagagacacttatctttctcaatgacttcttttagcgataactcgtctccaattgggatcactagttctagtgtacttccagttacaacgacaactcaaccctggaatcatttctctctattacagaatagttttgttagttgtattccgttatgttttctgtttgtcctctgtcagaggttgttacttgttaactgttttgtaacaactctccctttgtaaattcttagcctataaataaagataatgagctcagtttgaggctcaagctttttgcaagactttgta

SEQ ID NO: 243520 - DNA, 2532 bp, Cannabis indica
tttttaaaaaaaaaagtttcacacgtaaatggcgcgtaaaatggatggcataattttcccaaatattggaagagtactatatatattgtatttgtatgtagcatttattatgattatatataggacggctaaaattccccaaactcacgagtatacatatataggctacaaatttatgttgggccgctgggtgacaccttttcatgcctcatttataaaaaccaccattttgtgacctattcatttaacactatttatcaaatgactttgatttcaatatggtttattcgtttttgataaagttttactctgagcatacagttataacttataagctggtacaattcacacattacaatttatattttctaaaaaaaattaacttgtaatataaagaattttaattagttaattttatttagacatattggattttgattctaaagaacactaaatacaatgaatatgaaatatgaaagagaaaatagtagaatgaaaatatgcaaaatataatcatattactatatgccgcaatttaatagtgaattatatattttaattaaataaaaataaattaaagattataaaacgtcactttttgtggttaaactattgatattaatgggctattagttattgtttatcctaattagcaatattctttttttttttgaaacatcctaattagcaattctaccatacagattcatcaaatttctttgcaatatttcttaaattttttaggcctggcacctgatgaaagaacatacatacatacaaactcacactttatagaacttaaccattaatgaaaaaataaatataatcagactccggggtccaaaaaacttccactttcgttaccaaaactttggaaaaaaaaatacataagtaatgaaggctatatatataatatatatgtgatcaagttgatcacatataatatcactcttggaaaacacatatatatccccatatatatttcatccatgcatatacaaaaaagtcgtaatgaccaactggctggagaggcagctttcaccaaaaatatagtgagttagggaggaaagaccctaattcacagccataaattaattaaggcttctttgggttggtgtgcttattgatggaggagcagccagaagtggcaccaagagtgtggtagttgacaaatcggctaggagccgaggcatgacgaaaccctttaggaaggcaacccttgaaatctctttccctgaaaacttgcttctgcccaggattcaaatggggcctcattgtcacataggcttgaacatcatcagtcgctaaaggcctcaccaccgtacttggagcacttgaaggaatggctctacctcccattgaaacatccaaacaacatactaacaataacaacactactaccatcactacacgttcatgattattattaacactcataatattattcatcttattattagctgatgacatatatataatatgtatagtatgaacaagagtgtttaagtacttagtttggctttgagagtaataataagaaaaagaaaaagagatagaagaaggtttgatattttgttggtgggaaagtttaaggaacgggagagggtctatttataagaggtagtttttttttttttttttttaattaataataataattaataatagtaataaaaatggttgagggggctgatgggggggttttcataaataggctcgtgagttagctgatgatgatgaagagaaacaggtgattttgttattgggtgagttgggttgggtgcggtgggtctgttaatgtattttttttttatacgatgtggggtgggattggaacccaaagtgagagaatgcccgtgaatttgtgttattacaattatacaaagttcaaaaaagttttaaacccatttgctacttgtatatcgtttggtgtatcatgattttcatttaatattgtaaccttttatctacatatatatgcatgctttttaataaatgcattttaattttatttattttggaattaatagtaacaactctgaaggtgttttaaatttgtattaatattttagttgttttgataatgtgttgaaagaaagctgggtttattggcgtctggtagtcttaattactaattaatttcccttggtgaaatcatggggttgagatttaatgtgggttctcatttggatgtaataaataatgatccaaaaccaaacaaaaagcaatttctagttttataagtagagtaataaattttttaccacgaatatttaatagtttatatagatacatatctatttaaatatagagaattgttgtgcactagtggtgcaacactttttataaatggaattttacaattagttagcaatattgtttaaaagttatttttttttagttatgtggaacttgatatttaattacatcaataactgtatgacacaaaaaatggtattagcagacccaaaagttatagtgaggggaccgtaattttttttgtaaaagcagagggcaaaaataaatttaaaa

SEQ ID NO: 243521 - DNA, 4819 bp, Cannabis indica
tacataaatatgaaagcactccattgccccattaccaatcacatggtgccacatgtccactatatgggtggtgttcatgggagagaaggcataatatatataaatatatatttatataggtggatgtgatttgcaagaaaatatgaacctacaattttaatcttcaactcttcatctttcacatcaacccttaatacttcttttccttcttatccgctccctttgagatcatggctttgttttggattagaatcaaattagaaaattgagttttggcttttttgttcataacaattggccaaagctttcaaaattttgtgcatttataaagtgtaagcaagaaaatgcttacttttattcttattattaggacacttgaggaattttacatcatattaaaataaagggtgtgccttaatccctaagttcactaattgtcaacatatttggttaggtattgatcaatgtcattctctctattttgaaacccattccattcttttattcttctttgcaatgttttctttggtttatttatttacattatatgctatgacacttatgatatttttaagttttgggatttgagattttaaagaattacttatagtatgcaatgagactaattcaggagtaagattacttctgaagtcagaattataagatagaaaaaatatttttagaataatgaatgatgatttaaattaaaactatgtaaaatgatatatttttctagtcaaagtaaaaaatttggaatgaaacaaaatatatgtcattagataagcatttaatttttaaattttcttatatctcatttttttcttcaagattttagacccaataattattgaaatggatttatgctctagttatgtaaaaacatattctaataataatttgatttcattaaattattgtaaaaaatatatctcaaaaaatgaaaattaaagtttggtcaactcactaacacatggggcaaaaaggtaataaaaaaattaatttgtaacttttttttttttgagagagaattatttgtaacttttattagtgttataatttaataaataacacaccttttaatttgattgggttagacatcatggacactatacaaattatcaataaacattttcaaccatagaagtttcaattttttttttcctcaaagtagaaaaaaaaataataattgtgataacaatttagacaaatatgacttaaaaatcatcatagatttgatagagaaattcatgttatcattttcaacaagggatcatgtacaactcatcctatatagacataaatgatatatatatatatatatatatatatttatatagcctactttataagcattgctatcatccattaaatttactttaaaatatctaatcttatataagatgtttaagttgccaaacttggtattattgcttattaaattattatgtttgtataagggaaaaaattgttgtttggtaggagagaaaatggagaaagaagaaagattcaaaaggcatattcttatgttcccttcaaattgaaagagaaaagaaatagaaatgaaaaaaattattaaataattttcacacaatattatttatttttgtgggaattttttttatttttatttttgaaaggatgtaattaaaattgttaaattataggatccactttactcatcaaattgaattgacccaattaataattaaattgatttccatcacaaaattaagaataattaatttctcattttatgtttgattctctttttgagaaaattaattattattcttccaaattcccctaatgagtaccaaatcttaaaggaaatatttttcttttttctttttgtgtgtgttttccttataaatattcactattccttttgtagttttttttaaaaaatagtaatatctttcctttatttaaccgacataatatgtataaaaaatcttctatttttcttagacattatttcactttttcaattaagaacctcatttattatttgtttaaaaagaacaaaatatttaagattttttgttctttaaatattcctttttgatcacattaagcatatgtagtgatgacaaagatattttttaagtgacaatgaccattctttcttcatagctttacaacattcaattgtttgtatatattaaaccatcaaatcacacacttccaaatcatcaaaaagctaatttatttattttattaaatatataaacaacaacaacaaatctttactttatttattagcccaattcctataataaatatttgtccatctataatggaaattagattattaagaatatactttagttaaaattcactaaaaaaaatacctcatttccttattatcttaccaaaatacaagttttaaaatatctttttgttcataaattacattattaaaaatatactattgttaaaatatactattcccaaaatatatatatttactattattaaaattaactaaaaaaaatactcatttccttgttatcttaccaaaacacaagttttaaatcattttgtttcccatttgtattaaaaatatactattgttaaaattcactaaagaaatacctcttttccttgttatcttcttaccaaaacacaagttttaaaacatttttgagcaaagtttatttatgatatgaaagataaaaagacacattaagtcaaaacacaagaaaaatattaagagaataatgccatccatgagatcaaatcaaaaaaacaaaaacaaattcacaaacttatatcaaacttaaaatgccaacaatgtcatgaaaaacagttaaaggttcaacctttaattattattattattcatgttaaatcttctttttttcgggttttaaagtccatgcttcgatgagctccatcctcgaattcatccgactcagttttctaatctctttccttttctcattaacacttgcttccacaattacttttcttgacaatccctttttgagactcgaattgctcgattgaccaccggtgttcttgctctttctcgggctttcttgagctttgccatcatttgtttcgttgaccaaggtgtcatctgagcttgttgttaaactcgaaacctctttgttcttcgagtgactagtttgattaggttcgagataggttttcgactcgagcactgtctcttcttcctcttcttgagaagtatcttggatgcaaatttgtgatgagctctcgtgtccattctcatcgaaaggttctaaatcacgaacgggagagggatcaactatcgattcttttctttctcttagctttagagtgatgagcattttgaggaaattcatgactttgactgcatacataagtgcagtcaaaggatcaagcatctgcaagaacaaaatgaaacacgaaatcaatcctcgagtcatgtcatgtcatgtcatgtcgtgtgaatttaaaaaaagaaaccttttatagactaacatgagtcatgttcggtgcaaaaatggtggcgatattccttgcattcatcctgtttacatcttcgaattggacaacatcggccatcaagttgatggcccaatctagtagagcagcctcgatcgggggaagaagcttaacaacttctgcacaatcatcttctgtctcgcattgaatcactttctcgggtgataaagaatctagaatcccagttgggagttctctaaaccaagcctgagttgttcaaaaaacacaaattatctcaaaactatgacagaataaaataaatttcgattgtcaagtgcaccatatgctgcaatttaaatatgtaatgtactaccgaaatacaaatcaagaagaagaaaattaaagcgaaaaaacttctctttcggttttaaatagtaataataataaacaagaacaaacacaatgttgaattgaagaagctggtttggaaaaccgaaaaaggaactaattctaacaaagtgatcaacactatttaccaaagctagatgggcaatcagaacaaacacaatgttgaagaagctggtttggaaaaccgaaaagggaactaattctaacaaagtgatcaatactatttaccaagctagatgggcaatcagaacaaacacaatgttgaataagctggtttgaaaaaccgaaaaagggagtgaatttcaaaaatggcaaaggtggtcttagtcctccttccaattaataccaaagacaaaccagtttcggtttttaaacatttttttttaccttaataagccctgccaaactgtgtacatcaatgtcttcaggtacaactcctctgtttaattgatcccgaacgatctcctcttcgatatttccaccactaattctaaagatcccttctgtctaaaacatcagaaaaacaaagaacaagtcccaaccgaaatcaaaatcaacattatcgaatgccttctacttagttttaaacagagaagtcagtgtatcataccgttaggcctccttgagcatataatcgacgttgtatgagcaagagaatcgtcggtacactattccctctagaatcatatgatagctgcatagattccgttgaaactccaaacacagttatgctacatttaaggaacatcaaattagaaaaaaaaccagtaaaaatttgagtaattaaacacaacaaaatcaccatttagaaaataaagcattgacataataattgtaattaagtcaattgaacattaagaatcaaatcaaaatcaaccaaaaatttctgaatcaacagaaacaactcacatttgcattttgaatcaaaatctcagcaattattatcaacaacaaacaaaagccatagaaaatgtat

SEQ ID NO: 243522 - DNA, 1731 bp, Cannabis indica
agacttcaaaaagtgaatggaaacttggtctgtggggttgttatgatcttttcccctttcagtataaacatctttcatgtttattttggctgtattcttatggctaactgtattcttgaccattttcagttatatcttgtttcccttgctgcttcttctggatgctgcagttgcctgcagatccctggagaaggttgattctggaagacttgagacattttatgaccctaaagtgcctcataaagtgagtgattctgtggcagaaggtgtgattcagtgtctggaggaacttctgattaagtgtcatcttggttctgtggagcaggtatatgttgaaaaatatcattttaccttatttgtaatatgctttctattggctgtattaacagatgattgtttatacattgcctttgggactgttgtaattaataactgtgttaattcatttgaagtctaatgtgctaatctccttcaacagatggttgtagtcttgaaaaaattgactaatggggctctactttctccatctgatgcttcggaagagttccgtgaaggaattgtgaagtgtttcagggcactacttttgagtttggtcccatgctctgatgagttttgcacctgtaaacaggcctttagtttgcctatgcttttggaaagtaaagatttgaaatttatgcctgttagatctgcaaattatgactcagaacaaggtgattgtttacttgcatttcttcagtctcaagcttcctcagctgctgttggacattggctatctcttcttctccaagtatgtgaaatttctctactcaacaattaattaacttggaaagttgattagttactaagttgtaatgtccttttcattttatgtgaaaggctgcagaaactgaggcggcccgaggacatagaggaagtgcaaagtttcgtattgaagcctttatgactctacgagtacttgttgctaaggtaatgttgataagtgataattcttttggagctttgacaatatttcattcttgtgcttgttctcacccatttgtggtttcattttttgattctatttcttagtatgattattcatctttcctttaaaacaaggtgcttccttgacgattctaagaattctttatctttgtggcaaattcataaaaaatttagtattctactctctaactcaaatagttatacaaggaaaagttaaaatgtctaattggaaagtgagtcacatccaactttttgatctgatccagaaatagggagtgtaagcttattgtacactagaattttgttatgagagtgttcctttttacctttcaaatattttatatttctttggatctagtgaattaaaatatgtaattcttaattatataagcttacccatcgtttgaagctcttaaatattttgtggaaattcgagttaatttcatttagtgtactgttacaggttggtacggctgatgctttggctttcttcttacctggagttgttagtcaatttgcaaaagttttgcatgcctcaaaatcaatggccagtggagctgctggaagtgcggaagctgttgaccaagtacttagaggtctggcagagtttctcatgattgttctgcaagatgatgctaatatgggtagccttaatgcttccatggatgttactactcatcgtgcttcaaccaagtctatatccgctcaatctttcatggaggagctccgaaacttgccagttaaggc

SEQ ID NO: 243523 - DNA, 1478 bp, Cannabis indica
ggcacatgagccctgatgaaagatgatgatgatcagatatgacccatttaagctgaccatgcaagtaatgtatgtaaggcattgctgtagagcatctttcctctgttatgctataaaatcagggccacagattatggtacatagatttggtgggacccaaaaacaacaatgtgaatgaaattatgaaatgactcttttgtttctccattctattctggctctaagggctcttgtcccatctattggaatcagaatattttgcttgcgtgttttgcaacaagaatcgccatacccatttaccctttcgaaatttttgctcattattctattttattttgtttcatcaccccctattttgaaccgtatgatgagttacatacctgttctgagtctttgaccatttatattggaaattatttttttgaactttgtgcttagattaaaatagtttttcatatacccgattgtattagatctccaacaaccaaaattttttaacaagaagaagaatagtatttttatgcacggaattttttagggtgtaccacttgttaataatacataatcttcaaaatataacttttagactaatataattcttccataatattttattcaattttattttaaaataaataaagtgataaatgatagtttataaatatatgcaaattaaatactttttattatttttacattaatgaataataaaataaaatagttttttttttttctaataatttatatttttaaaatttttaaagtaaaaatggtaaaatctatttaatttccatccatttaacaaatatccttcactgtatcacttattttactataaaaattatattttaaggaatattattaatgaaatatatactataaggaacaaaatttagtagtataaaaaattaaggaaaaaaaaaaattaattattctaaaaaaatgagaaaattattataaagactaatttcatgtattttcaaggtctaaattggtatttaggaaaaataaaatatccaaaatggtgtttaatcaaataataatgtacacgtgaatgagaggtaatggacatacatagtgatgattcaatattttgatgagctctactgccctagtagagttgagggaggtatagatatatagtaagataggtaatccttttgttatttaatagggccagtagcactatttgggctatgatgattcaccctttttctgcaaaagaaaagaacaaattatgttatagtgatgtactactaccactcttttatcgcagggttagatttagacctttcaataatggaccatcaattggcaattttctttcatgattgatctcaacatgttttataagagaaatttgataattcatgctaaaaataccatctctccaaacagttttttaactatacttttcttttatttttaacccaaaaatgcccatctcttcaaatccaaacaaatctctctctctctct

SEQ ID NO: 243524 - DNA, 4926 bp, Cannabis indica
caaagattttgatcccctcttaaaattgtgcttatttttctaactcccattttcctccttcttccgcccttcatccgtccaacgaaactccacactacactgacctataacccacaccccacaccacgtagacgacccagacccacctgccaccaccgccaccctagttaagaaatagctagacccacaagtgtgaaccacaacaaggaagacctatcactaacaaaaaatatcttaaggtaatatcttttacggcttatttcttaatttttttgacaataaatcagatggtataattattcgggttagaatgttgaatctgtggtagtttttttagggcttgatgaatatttgcatttagagattttgggttgaatgttgacattatgtcatgttctttgttttttttctttctattgtgcttgatggggttcgatgtcattagattgtgttttgatatgtttttgtaattttagggtttaaaggttgaagataattgcttgatggatcacatgtcagttgttccctaggcctttgttttggtttgatcctggtttatttgttgttcgatatctttgctcaattttttatgtttgcgaataatttcttcacttgctcaattgctattcgatcttggttcgatggttgtttggtgtaacgctcctgcttcaagcttctgttgggtcttccctcacatatttttggctcttatacacgagtatgtcactctggttgcttcctggactgacgattggccctacaaaacaacagaagtattttcagcatgctttgtcctcactcgcacgtgccgggtcaaacatacttaactttggagttcttttgtgatggactaccagaaaataaaatgcatcttgttaatataggtagtaccaatcaatccatttaaactctcttcaactgcgtagttatatacctagacattccctaggcgatgtaggattgcacaacttacttggtatttctccttacagatcacgaaaatactgactgtcatatttggtggttaaattattgtttatgtttccaatttaatcgattagtgctcaatttagttcgattatttgtgtttgtgaatttttatttagttcccaatttgtttgattgttgtttgatgtttgtttgctagttaaattattgtttctgttttcgatttgctcaaatattatattgtttgatagaatttgatgttgtttgacaaatttcggcagtttaaattagacttttttcttattatgttttgcatgcaaattctttccaaattgttagttccaatgagtgagcattttattggactaaataacttacaaatgcattttctatttaaacaaaatcaaggaaggatttaagaaatacaagttattagaaacaatgtctattgcagtggtgattgcggcatgtacgcaatagaacacgttgagcaaatattggttaaatttctattcgataaagtagtagatgtcaacatgttgttgttcgaaaacagttcgtgagtgaacttattctactagaaagtataatttttttttatttagaacaaatcaaactatacctaaatttattttagatgatacaatatttttgaaaagtatcccaacatatttggataacttatattcacttttatagtttttttagataagtacatatcgagcatacatcaaacaactatggagagataagttcaacataaatacattaatatctcacaacaacatagtagattggagattccccaaccattacaatttttatctaattaaataacaaattttgctaagccatgcaccactttattagtatatcattttacatgaaacacttttactttagggaaacgaaagaagaataaaaatatcatctactaaatcataaaaatctctacaccctttaaaggactgtttcagttgactctctatctgcttcgacatacaggagaactttttagtctaatttttgttatgatcgtatatgttatagttatttaggactacctgtaaattttaaaaatttgtgagtagtttacaaggccaaaaataaaaattacatattttgttgcacacacgactattttttttatacatgtggtaatgtttaaactttatttttgaaactgtaaactattcagaattttttaaaaatttacacgtagtcttaaataattacaacatatgtgatcatgaaataaaaaattgaactgaaaaagctctcctaatgtcgaaatagatagaagatctatcaaaacgaccctttagatatagtaagggtctagtgcaaaatttttctaaacaattagtagtcaataataataataataattttagttttattaaaataaactctatattttctaaaattgtacaaataggaccctgaactgatttttcgtcaaaataaatttaataataatctgatctagagatattatgataaaatttgttacattttctgtatctgttcgccttaaaaattatcttaaagttggttataataaaagataaaattattaaaaattaaacttagagtcatatttttactactttaaaaaatataaagtctattttatattttaataaaatagaaagtacaattaataatttttataaaatataggtccaaaataataataacaactcacaacttagaattcaacttataaattaaaataaaaaattatttatagtgttacataaaatgtttcaatctcacaactattgtttgtgagaagatccatccacatggattctattttatttttattttttttctaaatgtcacttaaaagaaattaaaacatatttatataactatatatatttttgtgacaaaaatagtggtttcatgaatcataccacaactatatatagaaagccagctgttggaaggcattagatgaattaatgtatatgtgttcatttttgttttaagaaataaaggggaaataatttaattttttgatgattatccaaacatgaccattattttgagattattgcactaagcaccatttaagagaaaagtggatccattgatatgcaagtatatagtattaaaagatgtagtgggatatttattgtccttatttgaaattttgatgatgattaactatatttaatagggatttatttttgggataattataccacatattgaaatttttaatttttttttatttttatattgtatggcggaattttttaaaaaaatactgtttaagttttatacagtatactgtgttaagttttcactgttgttctactgttgttttttagttgttccactgttatttttagttgttatattttgtgttccattgttattttataaaaatacagtatttttgaaaaaatttccgtgtgacagtattttttgtaaaagttaacctaaattctaatattttgtaagtttccttttatttttttcataagtacacctaaaataaaaaataataataataataataaaaaaaaaactatataaacaaccctcaaagtaatttaacaatgaaaacacctcaaagtggccaagggggcttaggtggtatggattgtaggtttgaaacccaacaaatgtattttttttttttttaaaaaaataaataaataaaagtgtgtttagaagtaattgtataattactagataggataattattagagtgataattacatagtttaataattaaactatatttaaaaatataatgtgtatttgaaaatatagtcatttttgtaaatactactgaggaatgctaattataaccttttagtcaaactctccgctcgaaattacatgtcagaatattttttttaaatttttttcatagcagtatttgatataattacaatattgctataaattttttaaaaaagtttgaatagtttgcagtactagaaacagacttcctgatattctaatttactacgcatgttcaaaaaactttaaacttattttcggctatgtaaactattcgaaactctttaaaaacttatagggatgatgctgtgagtataacgaacaccgctataaaaaaatattgcagcatgtattttcggacataaagattaaaggtaaactcctcctttttcaattacaaaataatatttagacatgtaaatctaaatctttgtattaataatttatttattttttaacaagatatcttttatatattatatatatatataaaaatgcatttgctactcccaattacaagtttaccgtgtaattttcaaatttcccaaatattgaaacataaacatataaaatgaacaaaaaaatatgataaatttgggatcatcaaccggcccaagcccaacccaaatccaaaatagttagcccaaaacaaagcatctggtcccaatatatatttcttggatcaatatactattatcatttttatatatttttcttgagtgaaaaaaatatgacatgatttctaaaaatgtcgattttttttacattcttgtaagaaagatacacactatacacattcacaccaaaactaacagcaccaggcctgaatgatactctagttacatgtataaagaattgaatcaatctcttgcttctatggtattttttgtatctaataatccattgattctatacttcacattctctttcacttggtgaacacacctttgcacattttgcattttactattccataaacagtcattttggttgcttcagatttgataaatcaaagcagccaccactgctgcataaactttccttctgaacttggatgttttaacccgagtaatccacctgatcatggctgttagaggacaatctgatttttgccaattcaaccatgttttgatctcttgtagacacctgttactgaaatagcattcaaaaaataaatgatctattgtttcaagctcaatgccgcataaaaggca

SEQ ID NO: 243525 - DNA, 1701 bp, Cannabis indica
aaagatgttgtaaaaccgttaaagatggaatatttgctttcctttctcgtagctgctatcgaactctgtacgagatattatgtcggcggtgagtcgggtcatgtactcaccgatttcgaattcggttcgacccgagtcaacttctttctctagtgtttggagcatcttcttagtgcattccaccatgtaccccgcatagctctgattaccaaataaaccaaccccatttgtgaatctttattcaaaataaaaaaaataaaaaaaatatacatttttatatttatgtgtcgatcccacacagtactaaaaatcaatgatgatggtgatgatgagtcttcattattacattgattttatatttatataataaataaaattgatcatttatattagaaaattataccttgagcttgtcacccatgaatgcaggggcaatgatgtgacgctggtggtaccaatctctaccgttggccattaataagccacgcccaataaaatgtttggacccttgttgttgctgccacgatttcccagatatgttactgtattttgataacagctcttttatcaaatcagtctccgttaaacacatccttggctcaattccattccaatatataaaccgtttccctgtttcattaataattaataataattacaaaaaaaaaaacaaaaattatcatgtagcatacagattaagagtaccatattgtttggaccaggcggaataatgaggtaatagacgcgaaacgacgtcgtgattgatggaattcatgtcgttggaagttgatttttctatgagagcagccatgtccaagatgttaccgaggagaaggcgaggtttgggcccacgcactccttgctggtccatgatttttctgatgcgtctcgggtttaaccaatagaaccacacggtgttgtacacgactctaatcatcaccaccattactgctactactatcgccaccatcgccatctttattatacagaaagaatttaacagaggagttttcttatgtaataataatctgaataatatatcactaataagcactatctctactaacaaaatacagagagaaagagagggttggtaacttggtatgagtgagtgcatctaatttataggatatgattttgtaatgtattccgtggtacattgggtctcagggtacattagatgagtatcactgtagtttttacattttaaccttaattatccctagatcaatctcagtcgtcagatcaaataactctctcatctgacggctaaagtacatcacagattacaattcgtgaaagtacaataatagaataaaatcatcctctaattttataatgcaggaaatctcacgtgtcactattattttatttttccaaaaaaaaaacggaacaaatatttaaattactttaaaaagaaataataataaagaaggggaaaattgtctgctggaaataaaaaagtgtttcagagaaagaaaaaaaatggaaactgctctcaggcattataaaatttgtaatatgattatgggttattctacaatgtattccttaaaagaaatatactgatgcacccttaacttgtttcggcatccagaagaattttttagtctaattttttttctacattcatgtacgttgtagctatttaagatatcctacaaaattttgaaaaaaatcggaataatttacaatatagaa

SEQ ID NO: 243526 - DNA, 3817 bp, Cannabis indica
ttttaagtcatctcttagaattatcatgttttcttcacaatgtcttcattttcttttattcttatgcactgactcatcattagcctcctatataatggtgctaattatccacatggttttatgtcttgatggaaatagttttgtaagattatttaattcttcgtttctcattatgtttcttgattgttgctatggttttcgtctaccatccataagtgaggctttctaataaaattgccaatttcgctttgttatcatctaaagttcattctatgtagtaacagtaatgatatatgtgactgcatggattgattactctctgactgttatgatttccttttgttagataagttttatgccaatttcatccttaattcattggacaaagttaagtgtttttgtgattaatgaataataagtttgctcagttttagtatcttgtagctaagtgggagttgtattaattagttgtgtggctgcatggatgaatctgttaaccattttctgagtgttgttgtagttttgttagttggttcggtttcataatctcttctcttcttcattggctttgtaagatattttcttgaatgaatctggtatttcttgttattgtgttttacggttgtttcatggctatttttcggagtagccgttattttaacttcaatggtgatttgacgacatccgttcgttaactaatatgcacattttcacgaattttgattgtgttaaagctaaaagtatccatgtgtgtagtgtagttcattcatgtgtaagtaataataaagcaattcagttagttagtggatatttattttttatccttgtaattaattgtatggaatgaaatgatggtttcataggtttcatgaaaccatttttgtaattttggtctcttgtaatttatgtagtctagttagttattattgaggccatatcattaccagtctataaatatcttgttttatagaattgtgttgatctagtgtgcatctaaattcgatgtttgtgacaacatatatatgtcttgtgttaaattatggttaataatgaaattttttgctaatgtgtttcatggttgttcctgtaatggtggaaccgtaattgctcttcttctatttttattttagttattattgtctggtcatgtgtttgtttcaataaattagcaattgttagtttattttcatttgtttcattttcatggctattttttgagtagccattatatttttacttcagtggtggttgggttaaagacatccttttgaattttggtcatctttcatttgtgaattaatatgtgcgttttcacgaattttgatcatccttctgtgtagtctttaatattgagtttggtttttttaaaacttgaagtatgtatgttgattatatttcttggttcttcttctttttccctttatttaatatttgattatgcttcattttcttaatttaattttattctttctgtaaattcttattcatgttcatttggtgatttcattttatctctgtcttgattggatgaagatgttttgtttggttcttttggttcattagaaggagtttctctcctttaaagtataacctagtaagtagtttaaggaattaactacatatatttgattcctttttagttttgtaattgattggatatatatgtatgaaagttttgttgctccttcggttcatttaagagagtttatctctctcttagttctcttacaacttaactatcatcaattgctacaaatattgttctgttattctattcttttgttcctttatttgtgctcaattctagtacatttgtagttcattctagttagcctaagagttgtattcgtgtggttgtgtggatttttctggcgtgaaccaatgtttttgttctattttggctccatggcaaataaaattcatattttattttccttttaattatggagtatagccaagtggtaaggcatcggtttttggtaccggcatgcaaaggttcgaatccttttgctccagattatgaacactggatcggatctgtcaaggacgagctggtgtttccattgcttttttctctggctttgtatgatgtcttgttgaattatgattgattcggcattttctgttaatgtgtctgtggctttgtaagatgtgttgttgaattttgttgattgaatgatttttgtaatccttttgaataatgacatttgtttgacaatggctttcctttcttaagtgttccttattcttattgttgttgtttactaaccaaattgccattgtaataaagcacattattatgataagtacaaagcctttgtacactgttccttagtcgaatcgaatgggctagagttacaatgctctaattccaaccacttatatattgtttgtgttgattcttggcattttggtgatttagatctcctactttgaatcaagaacacatctaatggttgatcaagtcaaaccaaaaatgtggttcagagtgaatttagtgatttcacaatttgatttttttttttccgttatggaaaatattcttcttatttattttttttaattcttttcttatcaaatatatgattcctttttgcttcaaatgttgatcaaattccccaagtgagatgactacgcttttgttctatatctatttgaactagaaaagtttatgaccaattcctctgctcttcctacatattttattgttatcatattttctatctttgtaatctaaaccaatgatgttagatcaaatggtcaaagaaaagtgcttctcatcatgaggaagcatacattcttatatttatgcttctaatgatttcttagataaatcagaactttagttagtggattattgttaaggcatcaccaacctataatggtgctaattgtccataatatgagttttgtgctataattgtcctttttgtgcatttccaaactgaaattttgatgctcttttgagaaaaagtaatctttacttattgttatcacctcatctcatgtttctgaatttggttattgcgattagtcaataatcttcattttcagactgttgtttcaattatgtaaatataattaacatggttgtttcatagtttcttctttggtgtcctttattttttgtgttgtaatggcagtttcttgctatttttgtaataattttatctactttagttagtgaattaaggctaatcaccaccagccttataatggtgctaattgttctcatttttaatgcgtgctgtagaagataattttgcatcctaattaggtgcagtagtgtctgtctccttagcatttttaggcttaatgtgctgaattgttatattagcatttctatgtatatatgcaagcagaaaccaactcaaaagattggagaatgccatcgatctttatgctggctagtggaagtaatctatccttaaccccattgattttggatataaatatcatctggtgttgatagttgtagaacacagtataaaggtgttcattctcaccttaacaaaacatggaggattgatcataatatgtgaaaggactaaggtgtcatgctcaccttaacaaagaatagaggatcgatatggagcagcttgggaagagttgaagtagaaagtagtacggctgaagaaagagactcaaagggatggaagattttgttaactgtttgtacgggaaaagactagtagaaaaagtagtacggcgagaagatgaggctggaaaaggaaagagagtgcaacaaacttggaagatgtgagtgcttatgaaactaatttagcatttggaccaaagaagaatgaagcaaacgaat

SEQ ID NO: 243527 - DNA, 2599 bp, Cannabis indica
acaaaaaaaaaaaccaaaaattaaagccctcacatctgccaaataattcttcttatatcaattgcttaggcaaatgtcaatggaattataaaaaattcaaatttcctctcactagttcatcttttttgtttatattccatgactctctatgagttattactccgcttctatatattttttccttttctcacttggttttatcaccacgccaggcaaggggcaaagttgacatttagtgaaatgtctactctagtctaccatactataattaaccatgaaatgaagaacttctaagaatttgttttcccaaaaaaaatctcctccaaatttatataaataaaaaccaacaaagtgttgatgaatatcatttcagttatcacatatactgtgaaagaaatagatatgaagacacctaatttagttacagtcaaagtttaccttttgaagaggaatactaggcatccattgagatatcatgtaagagaggagtagagggatacctttgcaataatcggcggtttggttcaggaaacgtttcaaagattgcagagcgcattgcactcactcgagcttcctttctatcaatttctgaaaacgaagcaaaaaaatgcaaagccacataagcaaatagatagtaattcacctaaattcacatgtgcaaatcctttctttttttttctttgaaacgaaactacttgtgttattaatcatgagttaactagaaatgaggaataaataaagattcacccagcaacaaagagcaaaatacaatagccaaactctacaaaataaaattgcaatctctcaggaatatcttcaaacccctcttcataatgtattcataaagccacaatttgtttggttttatcacaaattgtaaaatttaacaactattaataaagcaatgcattttgtcaaaaaaataaataaataaataataataataataataaagcaatacataaattataaattcttaaatcaaggattaatacatttaaggcctttcttcaatactatgttcttgcctggtaacatgttttaagaataaaatgagaagatcttaaaatgttgggataagatgaaaagtatagaaaataaaataaggtaaacaaaaacaataaaaattaaatattttattgctgataaaccctaataagaggaagtaacaaattctaccaacaatcaataaaactattctaaagttgaaaatgccgtatttttaactttcctttagttcatttgattaatgtattttaattacagtaccttcctattaaattgccacttggaaatggtatacaaatttatttgagaagccaagaacttcagtctatcttttttcttgttattacaattttgttttgagctattatagaaaaaacataatagaaacataacatgaaacataaatataaaaagaacaaaaaagtaagaacttactatgtgcctcgaacaaggcagtgttttaagctactataattttgttttaagctattacaagaaagataacatgaaacataaatataaaatgaacaaaaaaagtaagaacttactatatgcctcgaacaaggcagtgcagcaaggtgctgatactggagaagaaggtagctctcgcagaacatactgccaacgggacttggtgattattgaaatcaatggataaagcataattgtcacagatagtattacttgaaacaaataccttaatacagtcaccaaccacatgagcatcctcattaggatcaaattcaatcttgcctacaaacaacaaaacattgtacaatttcagttaggactgtatgtttataaaaaatccaagatcataagcaaaattagaaacaaattatcaattcttgaaagatgtttttaatgttcttgcagtcaaacaagagatcgtggaaatattgtagccagcctgaagcaaataccttgttcgtattcttgtactcttcgttctacttcctcaacatctgcacactgtcgtaaaattccttcaactttagtacctgttgcttatcaaaaaaagagcctttggtgactgttgaaagacaatagtaattctatgatcgatcaaattgaataattcaaaaccaaaataactctctcaataagctaaacacagctctcgtatgagtaaaacgatgctaatcaaaatggtaaagttcaatttttttttaagtatgagaatagtagttctctttcacttatggttatgaagccacataacaaaccaatgaaaatcacgcgagcaataaacagcatatgagaacagtacaaaatgtttatccatgtcagtcttggcttggtgttcaatttttttcaagtacgagaatagtagttctctttcacttatggtcatgaagccacataacaaaccaatgaaaatcacgcgagcaataaacagcatatgagaacagtacaaaatgtttatccatgtcagtcttggcttggtgttcctaagttaacttcctattgaacagattataattatctaagcgatatcccatatcgggattttggattattctttacatctttatatttacaaaaagttcaggaaagttacagaagctaagacagagagagagagagagag

SEQ ID NO: 243528 - DNA, 4605 bp, Cannabis indica
agtctttttttaattttttttactgtaaattattaaaataatcaattaaaaataaccgataccaattaaatgatgtttcactacaaaaatacggattagatcaaataaacaaatataccttttagttggagatgccctaatatacctaacacgtttcttagatatattttatgctgtggatgagatgagataatccttcacagttcacacgagtcgatgagtcaattccacgtaagttctgtactctttctaattatttccctgttttataatcacccaattccacgagtggatgtgaaaaacacaacagattaagaactccacaaatcagttctagttctaaaagacacccaccactcaattcgtttttgcttatttggcagataattatcaaaatacaaaatcttccaaataattaataactgataagtatatttttgtttactttcccatgtggcaaaaaataaacaagtatcaagcgaaaatgaaattgatcctgaagaaaataaacaaaaaataaaaacaaatctaatttctagaccagaaattttttttgtttaatattttatttcctaccacacacagaaataaaataggtaaattatttccaaaaaataaaaataaaaatactcctaatatttgaggcttaggaaagacagatggctcaaaagcgaacggtcttctcgttcgttcggtgacttgaccaatgcttaactgacagaacgcctacgtttcaccgcgaaaaatgaagccacaaccccacactcacagtggcttcgaccttggtagaccactctacaatataaattataggaatctcagagaatttgtcccggcaaccctattttctggtcgattttccggcgtgaagctgcggcaacataccattcgtccggttttatgttgccttaaccaacctgaaaatgagaatttctccagtggatcttcccggagtgaggcgtactcgagacgacatgtgctactcgctccgtctctggcgctcggaacgtggtttctgcaatcggcgatggcgagtggagaggatgcactgccgaattcgcagacgccgcagccacagctgcaaacgaatgtgacggaagtggctccgaaaattgaggtggaggcggagaagaagaaggaagaggaggagaaggttatgaatgcaaggatttacgatgcgacggcgattggagaaccgatggcggtggggaaggacaagaagaaggtgtgggataagctgatgaacgctcggattgtgtatttaggggaagcagaacaggttccgattcgtgatgataaggagttggagcttgaaatcgtaaaaggtttgagaaataggtgtgtggaaattgaacgccccatatctttggctctggaagcttttccttctacaatgcaagaccaactcaaccagtatatggacaaaaggtattaaccctgccaacacgttcatattatatttcttcaactgtatcatatgtgcatgcgagcttttatgacttatttggttgaacctttatctaatcgtttttcgtggagtggagtcatattcaagatccaaatttagtaaaaaataatgtctcaattattagtcgtaatcgttgatttgaagccatgaagtatatgagctatataatacagcactggttgggttgaccttttcgaaatggctaattgatgacaattttcatatcatcaatttgctaagaatgcccagcttgtgattttactctatttaatatattcgttcttgccttctcttaatagaatagatgcacctcagcttggactattagttggattgttgctcaaccttaagacctctatacttgaaccaatgatgtcaccttaaaggcctctaactcggaatgaaatttaaatattcacgattattttgtttatatgctgttaattattgcagaaaccttccatttatagttaagttctgtataaataggattattaacgatctcatgtcaacagtatttgttaaatacaccaatatatgaacaaaaaattgtatactttttcctctatcacgtttcttgaaaatcattgcagcatagatggagaaaccttgaagtcttacacaacacattgggcacctgagcgctggcaggagtatgaacctcttctaagttactgtcgcgataatggagttagacttgttgcttgtggtactccactcaaggtcttttacatttcccatataaggaatagacactagaaattattaaattactttgcatgtgctatggtgggataaattgttatctgttatcttaggttgtttaggggctcgccatctttctgctttgcattcatgtattatgattttattatgtctgttgatccttttgttatttagggtagagattgacaaaatactcattattataaattaagtaggttttgcggactgtacaagcagaaggtattactggactttcaaaggctgatcgcaagaaatacactcctccagctggttcaggcttcattgcaggctttacttctatctcacgtgggtcactggttgatttaaactatccaaatcaatctattcctttcggcccaagctcctatctatctgttcaagctcgagtggtggacgattataccatgtcccaaaatatcttgcaagccatggtggatggaggaaccacaggtattatagtagtggttacaggggcgagccatgttgcatacgggtccagaggtactggggtgcctgcaagaatttcaaaaaggataccaaagaaaaccaagtggttgtattacttgatcctgaaagacagcaaataagaagagagggagaagttccgattgctgactttttgtggtattctgctgccagaccttgcgacaggaactgttttgaccgcgctgaaattgctcgagttatgaatgctgctggcagtagacgagatgccctccctcaggttacacattctcagtattcttgcgatgcattactgccaaaattgcaactactttacacagcagtttctactatttagtctgtcaaacttgaaatacacatcctggctattacaaatgacatcatacatccatttggtttgggtccaacatatgcttactgaatcatcttataattctcatacattatctgctgttatttatcttctgcatgcataagtagatacaatggagatatatttcctggaagtaattgaactgtgaggagttgtgtaagtcctaatttaatctgttcgttggactttgagggggatgggtagatgtagctcttggtaggtgagatttttgggtttgtatgttatgaccgcctgctattcaatcccttaatgaccttctcaaaagaccatattctgtcatgatttcaggaccttcaaaaaggactagatcttggtttggtatctccagaggtattacaaaatttctttgatttggagaagaatcctcttatgtctgaactcactcatcgcttccaggtaagcttgtttctgaaaacaaaagtcacttgtgtatgtgattttgaagttaaattgtgttctgtgaaagaaaaacctgcgcatgtctaaactgtgttcatggtttaaatttgatatgatagatgtagtgctttatagcacataaggtgacttacttttaatcttctatgcagggtttcagggaaagactgttggcagatcctaaatttttgcacagattagctatagaagagtctatctctataactacagctcttatagcacaatacgaaaagcggaaagaaaatttctttcaagagttggattacgttattacagatactgtaaggggaatagttgttgatttttttacagtatggcttcctgcgccaactctatcattcctttcgccagcaaaggaaataaatggccttgatagcatggacactattacagacctccttggatccattcctgataatgcatttcaaaagagtcctgttggaaagtactggaatatcaatcatagaattgcatcagttgtttttggtggtttaaagcttgctagtgttggattcgtttccagtattggggctgttgccttctcaaatgttctgtatggatttcgcaaagttcttaatccagaagttgtcaatatagaacaaactaaaagatctccaatactaaaaacagctgttgtttactcgggctttcttggaatctcagcaaatcttcgctatcaggtacaatagaagtttctgtgggtgcctcagttgttattctgttgtgcattatcggtattgtgttcactaataaatcttactgtttaaatcatgagttttttttaattatcattttttatttctgtcattattaatttatacaggcacaagaagctttttttattattattcttttcttttcttggtaaaggctagacccattagtattctactgaattaagaggttgtgttttcatagaaaatccaaaggatgaatgcatattgttgccctttattttatgggctttaaatttcaacaaaggttttgtgatacggtaaataagcatctatgttcttaaccatagcgtccgttttcttcaaatatacaggtgactatatgctgatctctactatttctaatgcagtttatcgct

SEQ ID NO: 243529 - DNA, 3145 bp, Cannabis indica
acctcgttgaatgttcgaaaacaagtaacttgcccagatttcaagtaggaaagaagatccaaagaaacataagaagtttcaaatgaagagatggttcttttggacgtggtcgacatgacgaggatggtaatcggtaactgaagaaaggactaaattaaggccaaaaatgcattgagttttcttgttcactggttagataaaatagaactcaactggagaactagcagcaaggggcattacgttttgtaattttattattcttgtcgcattccaagttcagcatctacttttctcaatgattattccaatttgtaatatctatgggcccatgtgtttaattttccagtagagttggtagaataaaagtcttggtcgtcgattaaacttgaaaatatcaaagtatggtttactgccttctaggtcaccatatgagaaaggctaaaaaagtttgtttttgccatttaactagtcaaaataatcactttcccttttttttccatgtattttcctcacaaatgttgttttcgtgcactaacgaagaaagaaattaaataagctaaaatttctcacaccagtcacatctagtaaagactaaagagtttattgtcattagtagccaaagagaaaaattacaagctaacaaaaacgtggtaaaagaaaagtgaaaaacaaaaggtgaacaatcatgagaagatcaaaacatttctatgattctaaattctaatcatcctcttcttcttctcaagtgaacgtgaaatgggtattcatcttgatcattgaattttaaatcttactttgctgccaccattttcgttccatcttgcactttttgctcatagaactgagttcccaaacccaaatgattcataagtaaccaagtaaaagtgagaagctcaccacctttactaggctgctgagcatgtacagttggtctgcaatttatggcagcgtaggacagtaattccacccacactcgactcattaggctccattggtttgtgcccagatctttcgcaagtctagaagcatcaaacaatacagatttgcttatgtttcctttcacaacagcaggccttaaatccgtttttgtgccaatgattttcttacaacattctgaatggagtactaaatggtgtttactgaaaaaactcttggcttctgcgcaagtatcctgaaacactatgtgccagtttcctaaaactggagccaacaaagacccttgagcgaccaaaagagaaaacatgtaatctgaaagtagtttacaaatatttctactctgatctccctttaaacttggactttcattgtaacagagttctgtagctatatgccataaaagaagactttctgcatattgaaactctccaacactccatttaagcttaatgtaattagaagtttccaagagagcccaatcacctctttctgaacacgcttccatggcacgcctcaaatcccgtgcaacgctagattttgttctcagctgctcaaaaataaaagtctttaaatcagtatctacagtttctgtggtagaataaaaccagaatttgacccggtctagaatcccccttatgtaaagatagccacccagtttgtagacacaagatactattacttggcgttcatgttggcaatagctaatcatattgtactgggaaaccatcccagaccacctttcacctctcagggctattttggcaacaattgttctccaccaccaccagttattgactggagcaataagagtccactcagagaatatgagtttaaaaacagaaatgcaatcaataccaatggctccaatcagcaaggaatatgaaataacaacatctaacggaccgaacttgtgtttctccacgaaaaagaagaagataaaggccccggccatggataacagactgaaaaatctcagcaagtagccgattttttgacgcacaacgaccactttggtgtgcagaacttggtatatgaagctgagctcatactctatcaacataaaagcttcctttggttttcgtttgagaaaacctttccggcttgattctcgttctttggagcttagaagtaggccaacgataagccctttgaagcttttgaaaaaaacatgtgcttcctccacgagcttaatcttttcatctaaagagtactctttctcattttcaaatactctgtcttccttgggataatttgcaacatttggtgtctgatctggacggattctcaccagtactgcagtctgttttcagtataaatggctgcagcctcttcgtaatctggcccaggattcggctccggcaaaatggtctccgcaaaatggtcagaactagccaaatacagagcaaaagttttctctccaaacttgatagttccaaccacgaagattaagagtgttggaaaccataacttgtttttgggaagagtcagaaacaagctgtaagcagcaaccaaaacctgtaaaacgagtgcaatcaagtgtctgagccagaactcattatcctcgagagcaaatgaagtaatggtatctggaccaccgaggtggataagaagaaaagatgcccagaaggccaaaacgtggtcatctcccttgtccttacaagagttgctctgagttttgatgattagtccgatgcagacggtggcaacccaatcggcgagtaagtaagataaccagatgaaaatcagtagcaacgagcttctggatcgttggcgccgagaagcaaacaacatcaagaaaagttggagtatgaggcttagtagaattcctgccctgagattccattcaccccataactccttcgcccactcggggatcggtagttctgccatgttatcaactgaatctaattgagtttattgtgtctgtatattcataaggaccgattcagcatctgttgaactattggtattttttatttgcgtaaataggcggataagtaattaaagttttgagtttgtaattgtcatacatttaatgattttttaagtggtataagtaattaatgtttataaaattatagtgtatgtttgtcatcataactaaaaaattgttttttgcttttaaaaatagaaaattattttttgaaaacaatttggtttgtttgaccctgttttttgaaaacagttttcaaaaacaaagttacaaaaa

SEQ ID NO: 243530 - DNA, 1749 bp, Cannabis indica
ttttgccttactagtcttttctttacacatcagaatgaggtgaaatggctgagcaaaatttggcaccagaacattatcaaacttttgggatattgcattcataacaaaacaaggttccttgtctatgaaatgatgcaaaatggatcattagaaactcaattacatggtaagaattttctattggcaacaactgaaaacgacaaggttgaaataaagacttttgaataaaactttataactatatattggcattatgtttgtttgtttaattctttagggcctactcaaggatcagctctaacttggcatctcaggttgaaaattgctgttgatgttgccaggtaggtacttccacaagactaattttaaccgaaattttcgaccgtttagtgtattaatatgcgttgaaccaccgttgttgatgatgttaggggactggaatatcttcatgagaactgtaatcctcctgtggtacatagagatctacaattgtgtaacattcttctggattataattttagtgcgaaggtgagaatatatcatatcagtaaccttttgatgcttgattctttaccccctcttttcccttaatgagatattgatttgtttttcccttttcttgatctagctttcccattttggaattgctgtaacttctgggtttgacaacaaggacaacattgaagtgtcagaaacttcagcttatgtagctccagagtacattttggatggtatgtttctttcattattaacctgtaagaatataggaagcattttcctttacttattttcttactcattgtgtttttatgtatgcatttattgattttggattttttctgggattgttaagaagaaaacaaagattgtttttgtctgtttagtatatctgctcaggcctagcatgttgtggtcccatgaagtgtatatacacttaattcataataatataaatagaaataatgtcataatatcatttcaggaaaattaactgataaaagtgatgtctatgcttttggggttgttctttttgagctcctcattggaagaaagcttgttgaatataagataccagatcagaaccagtctctagtgaaaagggtaagaagcatccttgaacctccaaaactcatggccctcttccaaattttctttcggctatgcttggaaattgaattttagtatcgaaagaaacgtgtaaggaaaatgtttccatatcaaacatgtgaaacatttttttcttacctttttctttccccatccccaccgaaattcattttccaaacatagccttaaaatctctaaacataattttcgaaccaacttgcaggcaatgcctcagctcacagacagaacaaggcttccaaatgttgtggatcctgcgataaaagacaccatggatttaaaacacctctaccaggtaaaaattcctatcgaaatcaccatttttgtttctctttctttctgatattagatgttaaattagaaaataaaatgtggggatgaaattgaacaggttgctgcagtagcagttctatgtgtgcaaccagagccaagttaccggccattgataactgatgtgctgcattcgcttattcctcttgtgcctttggagcttggaggatctctaagagtaacagagccaatctctgtctgttccaatccttatgatcactgatttgaaaagaaaaaacttaaatatgtatgtattttcatgttctattcccaccacagaatatatttatatat

SEQ ID NO: 243531 - DNA, 5655 bp, Cannabis indica
ctctctctctctctctcctgcttatatatataggcagtcgagtttttgtccacaaccttagctccttttgcaattgcgatttcaccgcttcgaatttcgtagatctcccatggcgtcctcctcctcttcgcagcttcggctcatgtcagatcttaaagccatcattaacgaacctacaggggtaattctccttctaacttctaacctaacatttcttcaatttcgaatttgaattaaattgggttctttctttttgtttttagggttgcagtgctagtcccttgtccgatgataatattttcgtgtggagtgctaccatttttgggcccgatgagaccccctgggaaggtagatctatttaattttaatttattgttttagtgctgatttatttattttatgtgaattttggctgatttaatactaattggggaaatttataattcaggaggcgttttcagtttgagattgacattcggcaataattatcccgaaaaacctccacgagttcgatttacctccgaaatgtttcaccctaatggttagtttcatcgatccttttcccaattgtaacttgtagtctttgaatcaaatcttttaatcttttatgtttttttttgggttactgaatccgtctgaagctcaacgatgacctttcatttgaatctttcaaaatcttggtgaaatcgagtcataaatgaatatcttttcttgcttattgcagatgattcgaattattggttgtgtggtttattaacttctatcatatgccactgtcaaaagatttcattgcattttatatcttggttagagggattctcagaagaatcccttaatatttatttatattacccattccttagtttttttcttcattatcttcaacttcaagtatatgttcccagttgatacaaggaagacacctatgatagttgatagcagactctagcattgaatatttggggttatttatgcactttcacaaattgacttagcatatcctttaccagagaagaccctgctatattaataatatatgtgccacatcactgtgtgtgtgtggtgttttggtgcattactctttaattgttcaaactgtggaggagaatagatcatgatgaattggtattactatttgatggccacggtaattagcacttggatattagtccacgctgccatgacatctatgaccactattagtctttaagttgctaaccaagattggacatgcctctacaagaagtggttgcaacgcatcccttttagcatggggaattttggagtgaagtattttgttgcatgactttcaacatgcgtaactgaaaaaaaggacaacaaagacatagtttgtaatgcacttaaacctaaacttgcctctaattgatgactctgttattgataataaatttgctgaaggttaattacaggtcatgttctagcttcctgccttgtatttgtgggttttgcaaaattttcctctgctattcccttccctttagcctattctttgggagatcactgttttataacatataccaatctctgcttagaaaagccatagggagaaacagaacacaaggcaaaacatatgatttatagtagtttagtatcgatatgagagctcgtccacttctcaatgcagtttctcattataatgaaaaagaagatgaggtgatttcgtttatgtagcattacaaaatgattttattctgacattcctaatttcctattaaaattgattcacaattattctttacatcgtaaaaaaatatcggggcaacttttcacctgagagatactcattatacacttaagttacattatgattagccttcttacaaggccacagtcattatcaagtttagtgcattaagatttatagggcagtaggcatggaacttccttaattccaattttctgtctactttcgaatgtcttttgatgtttgaggggtgaggaaaggaagtcctcaaagcagaatcatgtttaaaactcgcaatgatgggcgaacatgtttagacaatgatccctttaatctcaatttttggtgtaatttatttcttcctagtatgtcatttcagaaaactgctcatacattgtcttgttcagcttctttttgcttcgatattattatgattcagtttgtgttccagacaaagtattcaagttatataatactttgacagatttcttctacttattaattttaatcactcgtttttgacattggcaaaacagtttatcatgatggtacactgtgtatggatataattcaggatgcatggtcaccctgccacaatgtctcgacaattttaacgtctgttcaggtaatattccaatttcaaaactctatattactgcttccaaccaaacctatctctgtgttttcactgcatttgtatttgatgctgtggtgttcactaattcatttcttgcagtcacttctaactgatcctaatcccgcaagtcctgcaaatcctgaggctgctcaactgtatcaacatgatattcaggcttacaacaagtatgtaaaaagtacactaattggtcatattctccttaatttcataatttaattttgctaaaactaacaacaccttgtggaaatttgcaggagagttcgtcgctgtgctcgtcgttccatagaatcttcataaaatctcaatgaaattcttacgctgtctctgcaactgatcgaactaggcttgctatggtctgatgcctaccctcgtctttcttctcttcatctcctcacaaaatgttctgcttctgcttcattgttttaatttttattaggttttttccccttctttccctttccctgttacattttgctttaatagttacattttgtcaatatcatatgagagagaatgtttaattgtaaattagaagatctcttaatcttcacaactgataataatataaacagaaatttaaatttactctctggactgtacaagctaagctatggtcttcttgttaaattttgcgggtttcaagaagtgatatagctagaagtcttcttgtttaaaatatcttaaatttaaacgttgactgaagatgcatgttttcccaatcttaagattcgagacttcattttttccatctcttaacatgaggttgtgacattgtgtaattttcagtgtattttttaaagtttgttgctagaaaagagaatagtttagctcatattggtcaattgggctacgaagtgtggtgcttcctatgctggtttgcttggggacgtagacccttatgtggttaccaatttcgatttcaactaacccctaagccggaagtttattccgaaaaaaagtcaaagaacctaactaaacaatgtcaatttttactaacaagaaaattcataaagaagattacaagcctccatattgatatcaagtaggaaagttgatactttatgagagttggattggaacttagaagacatgaaaatctcaagtaaggagaagaacacagtactgatgttacactaagcaaatatcagcatcttattagattgctgtcagacatgatttcctaagtcattaatgaaacgtattgagatgtggagctgttatggaccatctaagtataaggtggttatgatatgcacatcatcacaataatacagcagcctcatattaacaaatggctgttatattttctcaatccatgggcatgtgggcttgtccatggatttgtagctctaaatttaaaaagacaaaaaatcacagcaaaaggctctgtttccttttttggtgaatgggataagaaatgtacttgaagattggagggatcctttcattgtttcattagctatccaatgaacccctttagaaccccacttgaataagggttttatttttgggtgggtcagtctctgacctctgtttttagtttggtacaattttaagagtggtgacagagaacactcagttctgacaaatatttgaagctataaagggagaaccaatacttggccaatgaatggtacataatttacttctacaaaaaataccacaactcacattcattcatacataccatctggctgatgttgattgtgtaccaaaaaattgaagtttatccatggatgtccacttgagcttgatttttattttttagtgtttgtgtgtactgttgtacaacttaaaaatgaactatttcaagtgttagaagctctttcattgacaaaaaatctacagttgttatctaatggccctataggattgctcttgaatcttgatcagtaaaatagacatcaagtactgacatgttaattgcacaataggtccctcaactgaagggtaataatgatttggtcacttagcttttaatatttaccaattaaacctatttaattgcaatctgttaggtattaaccatcagcaataaaaaagatatattactttttttccctcctcatcaagatataccggccaagtgaaaatggaggaggttgagattttttagtacttaaaagtaagtttaactgtaaaaaaattatgaacccttaataattcatgatgttatgtacatgaaatccatgtcaaaattatgttatcagcttgctgtgatttgattgtggattgtaaagtaaagagtttaacagtaaaaaaaataaactcaatagggagaatcgtcacaagttcaataatggagggagcaaatgtgccaccatttttgacttgggacaaaatgaagaatctaacagtctgattttactttctttttttttgcaaaagaatctgaatattggattaagagataacattcaatagtaccatgtgaaaatcagtgatttcagatttgatgaggtacaaaaaatccagaattgacaatagcaaaatgtattctaattggagtatattttgctattgagaatagtaattaccaacattttccaatcaatattttttctcattctattgatttaagactatattcaaaagtaggattagattgaaaaatataatgtcagagtagatacaagttaatcatttgcggccaacgataaattattaggaaaaaataaattggatgaaagtggtaattttttttttcgttctttctaattattgaattatataaactgaagatagaggatttgataaggtaaaattatagaaaaaaaaatcaataggattaagttattccatgctaggggatcattttggttgttggggttaatttttttttttttttcattgccccccttattttcacaacaaattaaatcacagaataatttaactttccaaacatgacctaaatgttacttctacatattcatttgcttagagaattattagttgtaattaagaatttttatttgcttgtatattttgatattatttgaacacttaacattatattttataaatgaataaaattcaatcaaattataccccaacatttgaagaaataataataacccaaaaaacatttgaagaaataattagtttcatttatataccaaatgcaaatttagatatataaagatttttttttgtatcattgatagaggccgactcttaccctagtgagccaaacagttgaaaaaaaaagacagtgagggaggatgtttcaaaaatcattttttttttgggttatttgcggcaaaaccccttaaagtaggcaggtttttgc

SEQ ID NO: 243532 - DNA, 3547 bp, Cannabis indica
tttttttatttatttattttatgaactttggtttatttcttattgcttcctaaaataattctataatttaaagttggagattgaaattccttttatactttaaagcggtggaaatgtttaatgtgctctcaatatccagaagaatgtaattctctcatttgaggataacagatggtagaatattaattaattccaaaatatttttcatgactttatatgatgatgtatcttgtagtggcctttttcagggtactgtattggaataatctttgtatggaaatgacattgtcgacttcttcacttgatttatttgtattctatactttaaaatttctatggatgtaatttttttatataaaagagaaagagagagagagaatgacagtagtgtaactttttttttcgatttcttttttttttttttttttaatttttttaagggcaaaaagaataggtggttttccaagaaggggaaacacaaaaggatagtacatagtacgataatagaccaatcatccaatagcatccactcactgaatatgattcttcagcagcctttgtctgattcgattccaaagccagacttactttgcattgcatatatctcaatcttattctggactttgttagttattactactactactcacttacacttactctttccttttcttacacattacattacaatatttacatgcatgacatgacactttcacacttgcattactcattcacccgacccgattacccgacccgaccccacagtcaacagtgacttcaggtaataattttttgttttctactgctagttttttttttcccccagtctttctcactgcctgcctgcactgcaggacaaatccacagaagatggtgttttttcttttgaattcctgtccatactagatccaatccaagtctattatatatatatataaatgtagtgtcaacttttacctttgtttttttctttttagttaaaagaccatacaatgaaataataattgaggtaataagagttgtgcatctcagctaaataaaaggacactagttaagtcatggctagctaattcaactggcatggaatttaaagaagaaagtaataaaagcctcttaaagagcctatattgtccttaggttctagactcctacctatatctccctctctagctactctctagattctatcaaaacatataattagatatgatcatatgatactaattaatctgttattttagttaaaggctaacctcctattttatacttttttttatatatttgtataatatattaatacctttttaaaagcaaagtgttagatgccaatatgataacttacttaaatcagttatatatcttctctttggacatcattgattctttattgataataggaaagttactttcattttagaaagaaaaataaaaaagcagagtttatcatcaaaattcttagtccaagatttgtgtaaaaacaaagtaactaagaaggaccattatattaaagaagtgtgtttaaatgatggaagacaacgggattcacattaagagtgggaaagaaaaaagagaggattgaatgttatacaattcatgtaaactgaataaacagaaattaactatggaatggataatcaggtataattaacaattaattaaccaataatgcattatccttaataaaggggtgagtaatgatgattagaggcaaagaaggaaaataaaaaaggtaattaagatgttaaataaggcagtgggtggagggggtggggaaatgttaatgggaaatggagattctcatttgtttgtttatgaatcaagacaatgacttgttgacagattgttctgtaatatgcactatcatcaaaggggtaattgatatttgaagcccacaaagaggaaaaagagacagcaagtgggccatttcagttaaattatttatttatttttattttttaaaaaaaatatttgggtttttaggggaagtgcctggcaaatgtttacaataatggagtctctatgaatagctactgatttgactatacagtgctagcaacacaatgaaggcaaaacaaaatctcagcagattttagagcctttttatgatctcaggggattgataaatattgtcattttgatcaaagtatataactatgttagattatacatgtactttaactttaaatggttatgaaaatccatcacagtcaactattaactcaactctagagggacccttttttttatgatcatcttaagccattgattagtctcaccatctctaatccaacgggtgggactaaactaaatttaatgtggtagataaacatgtttggacagaagtatctgttatacacctaggttgttagtgttgattgtagacagttattttctgtctctactacaaataataactacaagcgtagtgtagtgtagagaaagagttttaagtcgtttttatgagtatgtgtctggcacatgacatatacatatatataatgtgttagagaatggggtaaggttattaaaagggtcagatcaaaaggggtttctttctgcaaattatcaaagcaatcagataggcacaacaagcatatctaattctgtccgagtgttgaggacaaatttgattaccattctgattgacccaagttaaaaacaaacaaataaaagatgggaccccaagaattggttgctctgatcctatttcaatgagaatcataacacttgggccatcttattgattatccacaattttgttataggaggagtattagctagctattatatgatccagtaggggtgcattggagtaaatcatttccaatactcaaaatgttggagatgttaggctttgtttggttacaagagaaacaataaccatggattggaaaggagctaatgagatgagaagggagatttcctagctggaaagaaccgggtttggcggatcctgtcctttcagaaagacaaaacaaaaacacctggtaatggtaagagtgagtgagagagagagagatatggaagggacactttaggtgtcaaataacaacaggtggcatacttattagtacaatttaatattggttttaatcactctcacaacgtgacacatcagtatagtgttaaattaagacaacttaagttgcttaataggctcataaaataaggtatccaaagcattctattctatgtattgtactttcccagccttgaagtgtttaaaatgtcaaaacacaatcttaagtgtctttactttgatgattaagaattcaatcgagaaaaataagactcacaaacaaggagaaaggcaatagaataataatataataaaattaagaacttgttttagttcatgcagtacatctagaaaacgtcccaaatttctgtcttataagtcctaatttttcttcttcttcttcttcttttcttctccctccccaatcgtagcagtttcacagagagagacatagaaattgtttatggaaacgaggaataatatcatagaaataaatgtcccccccaaaccaaaaaaaaaaaaaaa

SEQ ID NO: 243533 - DNA, 7063 bp, Cannabis indica
gcgacacacgtgctacaatggctgggacaaagggttgcgattgttctctagttcattggattggatgatgttattcatgtatcttgcactgtgatttttcattgatttattaccttgaaatgacggtgtaaaaaatagattggatcatgccacatttgctttgaatggcttagattgtttttgtgctagaatatatgatgattttattctaatgctcaaatatttttattttattgaaggaacggagttttgttgtaaacaagcaagatgatacctgggaaaaggtcaacctagtaagggataaatttgagtatgacagggagagaagaatgagagacaaaggttagttgaatatatttctgactctcctgctgacctttgtgggaggagttcttcgatatattgtctaatataacaatatcccttagccagcttggtcttgcttttattagtacctaactacttaataactagcctgttcaaactgaagattggtatataatgttttgggtagagatgtagcatgcttcatatgctaaaaattcagaacttagcacatttcattaggaagtaaatgaaagtcaaaacaatagagattgaaaattccactgcatatggatcctaatctggttcaaaaatttgtgttgcagcatttgcaccgatgcacggagaagctacatccgactctcataattcaaatcgtaatcagccttttgatgctcaaagatactttccccaggatgaaagaaagtaaatctagacgtaccaaagctatgcacatgtgaatttcattatagaaggaatctcgctgatgccggagtccatctacttttctgctaacccggcaaatgtttttgaagtgttactatttctggcagcagtgaccttgtgttgctccaactcaatgtcaaattagtttggttgttttgctaagcttctggagtgatagtattcctctacatcaaccatcccatccacaaaaagaaaattagtctgataccaaaaactatagttgtataccatcaaatatcattatttcctcttgtttattaaaaacttatttctagtgtttttgctatgtatggatgtttcactgaattctaccaaactagttggtttttgggtcaatccatccactgcccaaattggattaaaatgtagaaagaaactgcaaaattttataggatgtggttctctaaattgtttcctttgcttatgtttaagattgtaattaatcaattccataacccgaaaattcgatttgattgcctttatttaatgattcctattttttaaattcttcattctcatcttttaacttttcattactaaaagtttaacataaaaccttaaatcttacaagattttgtaacattaaacaaattgaatgtgatttacaattttatctgtcaagaaacttggatttacatattgatattgattgcttctctaccatttgtgagtttggtacaattatgagagaaaacgagggaatgagaagagagggtggaaaaaaaagaaaaaaaaaagcttacctcataaacaattttctttacaagtagtgagattggaagactaattttgttctttcttagccgaatttcaaagtttgagggtatttttaatctaagaaagctctaattgatgtagcatttagaaatgattaaatcttacaagatgttctaacattaaacaaattgaatgtgatttccaaatttatctgtcaagtatcagtttgtccaagaaaaaaaaattgtaatttttaacatttttttttttgagtcaataatttttaacatgaggtataaataaatataaaatttaaaaagaaggagaagattgtaaaaaaggtacaacacataacagcgtacgtagttttttacatgagaaagtaagagtagaagtagtgtcatttttgttggtggccggcgccaaaaaccttcccaaacactcctcactgttacatttttgaaattgaaagaagaagaagaagaagaagaagatcagagtgaaagtgaggcctcaggcctagatagatagagatcgagaatgagcggagccaaattgtgctccttgttaggtgaattggggtacgaaggtgcggaggcattagaccctgatagcttcgaatggccattccaatacgacgacgcacgacctattctcgactggatctgctccagcctccgtccctctaatgtcctttcactccccgaactatcccagtaaccttcccttctttctcttttctctcgttattttacattgtttttgcttgccgagaaactctagaaattagtggaggaatcgttgtgaattactgggttttatgctatttcgtttcttttggctgaatttgaaatgaaatgtgaaatcactggtatgtaattatctatatgatttggtttctaggtatggacaatttcttcaagaggggaagctacttgaggtatgtatctgggtttccctatcttagtttcatttggtgcagaattgaaaattgtgatgaacaggttgaaatgatctcaagtatatgggctacaaatgatacttaatttccatgattgggcagggtgaagacttggactttgcctatgatagcatttcagcttttgcttccaggagagataaccaagaagcagtttttggagctgaagaaggattgaaggacatcaggtaatatacaattttgaatctttgatgctacattactgtctttaagtgggaatatcttaaaaaatttggttaaggaaattttttgtgcaatatgattgattctatacaagcatctatttcgatgtgaattatgttaagatggggtggaatgtaagttatttatgtgtaactttttgatataaaacaaatagaatgacttataagaaatacagtttgatggttatttgtcttagacgtattgattaattttagatattcggtaggtttttaacattgttaatcatacaaatttaggatgtgagaattttctcctagagttctaataaacttcttatttgttttagggatgcaactatggcctatagaactgaagctttggacttgcagagacaacttagaagcttgcaatctcaatttgatatgctgtctggtcaggcttcttccttgatacaagggagacgagcaagagttgccgctacatctactgtcaatggacaccttacgattgtagatgacagcctttctgctagaaatttacaggtagctaggagacaagagttttctttattttatcaatatttgggaattgtgcttctgttctggctataaagtaacttgtgattaatttgttctttttaaagtaatttgttgatgcattctgtgaggtttttttttttgttattgcaatctgtgaggttttttttgttattgcaatctacaagtaatttgttaatgaaatttacatttatcaagtgaaagattccccctcctttcttttcccctcgtgatgccataatgttgtgttccaacattaaaatcttgcaaggaagtaattacctcatttatttgttgtgtatttttgacaagtgatttttttttagatgaatgcagttctagaaaagattgcttctacctcagaggagttggctcattatcattctggagagggtattgcttacttgtacttgttggctatatgattcttcaaaaacgatttgacatatttatttttttccctttgtgtacaccataatgggactaattaatggctaaccatgcataaataataaggcttaatcctttttctgctctaattagctctattttttacattcagaggatggaatctacttagcttactcttactttgatccctacttggttggagattcagcttgtataaaggagctaaatcagtggttttctaagcagtttggacacggtaccaagtataaacatttattgctgttttctagaatgtatattgtgatttcttatgatactctttctacatcatttttaatttatcagggtcccttccgattagttgctgaagatggaaagtctaagtgctcatgggtgagtcttgatgatatctcaaatatcatcatacgaggtaattttccagctgccttggtgctgtcctcatcaaatttcttttcatttctgtattgtttttccattatttcttgggtatacggattcccccttgtttccctaatgtatatttatgtatgcccattgagagagacagaacattatcttttaacttttatagaatttattttattatttttaaggagatttttggaatgaaaaatcttttttctttgttggaaaattggaaagattgtcgtctgtcgtcacttgtgagtttggccatttttattttccgcaaatgaatcttctctaattgatctgtatttgcagcagatattgaaacatctcatcatcaacgtgtctctgagttgcaacgacttcgttcagtgtaagtttttcttaattctatggactggtctatttcctttgtgcaagctttgaattgaatactgaaaacgttgacaaataacaatgtattgtggttatttggaagaaatgataaaagaaaagtttgacttatttcattcagtatatcagggaagcagattctgttagtaaggctaattatataatctgttgtagatgttttctctgttgttaatatttatataaactctacattaaaaaaacataaaattttagcggggccttcatcccccatttacctttaactggacctttaactggctttgtgcctttagtatgatgtgaaaagagcaattataacatgccatgaatatttttacttgtggttaaagcatgttggagctctataggaaaaattctatgatgattttgtaactgattgtcatttggaacagttttgggacaagtgaaagacaatgggtggaagcccaagttgagaatgctaagcagcaagctattctaatatcacttagatctcaagtaacttcagatgaagcacacattcatcttgatcttcactctctcaggtatgctccttctactagttgattcgtaaacgcatcattgagttcatagctcttttactatatgtaccaaactagaaactacattttgcaacttacattccttcagcttgatcttcttggttactaatgttacacgatattcaggagaaagcattctgaactggttggagaactatcaaatctttatcataaagaagagaaattgttatctgaggtgggtaccttaacttttggccctcttttatattattggctttgagggaatttttcctatatgcttgttttaagttagaaggcttctttatgcttttattttcttaccaattggtggataatttctgttgttgcatttatattttctaaccaattgtgtgtttctgttttaaagacaataccggatctttgttgggagctggctcagctccaagacacatacattttgcaaggtatttcttctagctttccctttacagaagtgtcatatgaacccatttttgatttcttatttctctaggactgatgcaatctgaatggaattataggtgattatgatttgaaggtcatgcgtcaagaatattatattaaccgacagaaagcggtattgttagctacacctatttttacttatcttttttaattattattattgtttttgtagagaggaaagagctctaacttgattttcaacatcattccaagttaactttgttggtagaaatatattcccatcaccatactttctgattttgtacactgacatttcataatccttatgtgaacttgtagtttataaatcatctggttaatcagcttgcaagacatcaattcttaaaaattgcttgccagttggaaaagaagaatatgcttggagcatattccttgcttaaagtcattgagtcagagctgcaagcttacctttcagcaaccaaaggccgtgtggtatctcaactctctatgtttatctgtttctatcctgttcatgtgtacatttagatttaattataatattcccgtcaatctttccattctgaaccactgttctctcaattagggtcgctgccttgcactaatacaagctgcatcagatgtgcaagaacaaggaggggtggatgatcaggaccattttctgcatggtgtcagagatcttttaagatacattcaagtaatgacagtacataaaattttgataacatttcttccatattcctgtttttcaattgataacgaattattgttttaactactttttattagatgcacaagctgggttgtcaacatatgtatcagctccaggcattgttcagcagatatcaggtctgcaatccgacttaatgactcttcagtctgatcttgaaaactctcttcctgaggatagaaatagatttatcaatgagctgtaagttatcatattcatacttaaccatcgtagtactagtattactgttactggagaataatcttcaaatgccttatctgtggtttctttttgccaggtgcactttaattcaaagtttgcagcaattgctttttgcctcttcaaccactgcacaaccgatactgacgcctcgggtacaaaatcattcactagtcttttgcagttaccactcatttcttacctcactttttaaagtttcatactgtgttgtgttacagtggcaaagttttaaacataatgaactgcctaagtaatatttgactagactttacactattccatacatcaagagcttgttcatttggtttacatatgggatttggttggttattcatgcaattcgtgacaagttgtttatacattattacaacatgatgtcattttcctgtatcccttgatttattttttcagccattaatgaaagagcttgatgaaatggagaagattaatgccaaactctctgctgccgtcgaagaggtgacacttgagcactgcaagaagaatgaggtaatcttttattatttgattcttttactatccttctcatttaataagccagtctttggaggttgtatgaatatcaatatactgcagtagcatctacagtttccaatttcaa

SEQ ID NO: 243534 - DNA, 2270 bp, Cannabis indica
ataatcctctccaatatcatggtggtctttcaggtacctccattgctgatccgcgaattgttcgctcagatattttcatttatcaatgttcagttgtttaacaggtaaaataacctaacgttttggatgttctacttgattcagcaaaacaatacatcagcaccgtttctttattgtttttttaattttttatttcatgcagccttctcttgcgacgtgaatgttgctcatttagtcatggggagtatgtcaaagcagggttgagtgagttggaacagtggtgtcatggtgcaaccgaggaggtctggctcattcacctcttccgcacctgttttctttttcctcaactgaaaaattagtttaacatgtggctggttttcattcagttcacagggtttgcttcagatgaactgaaacaactcagacaggcagttggtttcctggttagatatcatttatctttgtcgttcctttatatatgcttattattattctagacatttcattgttacttagataccttttctctaatgccgaatcaggtcatacatcagaagcccaataaatcattgacagatatctcaaatgatctttgtcctgtgagtgacttctctgttctacttactccatccgtagtacttgaactcactatttctttgctgcttctttcaggctctcagcattcagcagttgtatagaatcagcacaatgtactgggacgacaaatacggtacacatagcgtgtcttctagcgtaagtcaaagctctttactaatatcatttgattgatctgtcagtctttactttctttccccttgagaaatatccattttaacatacttctgatgctgtgggtgttacagtttctctttctttttctttgttttcttgtatagtctcaccccataatcttttcttactacaggtaatctcacgtatgagagctatgatgaatgacgacaatggcaacccgcgcaggcattctttcttattggacgataactcgaggtaatcccttttgcggattttgcttactgatcattacatgacgatataacttatactttcatatggctgcactcgaactatctcataataattataattttgcagaattccttttactgtggaagacatttccaagtccatgggcgcgggtgaaattgaagtagctgattttgagcctccacctttgcttcgatataactcagaattcgcttttctgctacaacgttcgggtgattgaatgtttccagtttcaatcccagaacattagtgttactactaaaacatttggtttcattagcatttgtcattatacagtgtcacaattcgaacatacagagcctcacttgtgctccttgtgatatcatttttacttttggtttgtatcaaaaaactacagccggttttaggcagatagccgcattttattggctatggtctactgttgtatcaaatgtatctctgtgaatgtaggcttaggcttctttatgcctttttttagagatacattttatgatgtagaaacttgatttgatacatccatgttggcaaatggctaatgaaatatcttttttattagtattatttttaccattaagtttttgaacttaaaatagtcatttctctctgcatgcatgccatcttttgttaatatgtagagcattgctatagtggtgtctagcatctagcatcatctaaatgtaaatagttagtaatattacataatagttgctaaattaaaatatgtggagttgatatttacttcaataataatatgatatcatatatggttttagatattattagtattagagctggctaagctggtcagacacgattacacgacttgaaatccgcacgagagttagcgggtttggatttgccttaaatggattcaggttgactcgtctaatttgtttaataaactggtcgtgttcggtttgacacggctaacacaaaattgacctgttaataacttatttgaagttattttagtactttaatatgtcatagatgggttataaacgtgttgaatacttcgtagacgtgttattgattgacatgtttaaacaaaatatgcttataaacgggttacacatgtcttgtcgtgtcaattcgtttataaatgggtcgtcttcaggttttattttttgacacgattattaaacgagtcgtgttcgggtcgagcatgtacatgttatacatgagtctcgacacaaaccgcgaacacaaattgtcacccctaattagtaccttttagtatt

SEQ ID NO: 243535 - DNA, 1866 bp, Cannabis indica
cccaggcgatgtgggattatacagctcctggtctttccccgttggatcacggggctctaactgtcacaccaataggaggattagctccaagtacataacaaaccatagctgacttccaaaataacacctcatcttcaatgtcatccatgtctattttcacccttattgatttctcaacagttctatttccagattcatcaaacttactattcaaatttttcaaaatatgaccatatcataatactggaggagcagatgtcatatctgatttcacattctcttcacatcgttttgttgcctccataaagctcataaaatctgagcgtgcatcctctcgaatcaagtgagccaatgttgatttgggagacacaatttcattttcctctgtaaatcaccccacattcctctgtatcatcttcattttcgtctactccctcatctgtgaactgcaaaggctctatacccaaaatcgaatccatcgtcttcattttcagcaccttattcgaaaaattgggacctgtcttcttcaatttttccttcaggcgagcttcctgctttccacactacacaatctcttagcaaagatttttcaaggacggcctcggccgaccatggctacaacgatgatgctgtgaacggaaccctagcaaagcaaaagggaaagtcgtcttactctaagatatttgttaatatttgtgttatgagttgaatagaatcaattcttaacaataaatccttgattaagtgtaccttagttctcttaaacatatggtagtggatcactactataaatctccactaaaatatagtccaatgcttgtttctatatgctcgttgagacctttcactcacacactcttactttctgtaagtcacagaacacacactcaacaattagataattttcataactaaacttcacacttttactcatactatataaggtcacagtatctactctctcgttcagtgctacacactaattccaaaacatttatctcacaacatacatataaatatctcctcatatcttttatttgaattggaaagacttaaactgtaacttcactaaaatcactacaaaattagtcaacagcacacctaattaaacaaaagcaataaaaacttaggacctatatacacgtgttccaccccaaaattctataaataaaatcttataaaaattaattatgtatatttatctttttgcaaggatgtatatatatcttattactcttataatataatcaattatgtattatcttcattataattaaggtaatatatataatctaattataataataaatcttataatacacttccttaagattagaatatagttactatatattcacgtaagatattgaacttttactatcctaattttactcctatcactctaattagattcaaatttagtctatttactccaactcacatgattattgtagcccccaagaaaccttgcataccataagtacccatacttaagaataatatcaccaactcactcttaaatataacccaagtcaatttaaatggctcagttctagtccgataggctagttctgactcattctaccttattgcgctaatgagtcttaaattatatttcagctcttaactaattaaataattttcttaacggtaaagaataccaaaatcttttattttagcaactaacacaactttatacttattttaaaaaaaatagacaactataataattttctccactcacactatctatagaaataaattagaataatttttataaaattgttatttcagtaaattttaaatgctattcttaatttggatatcatagtaacactatatcataccctttaataatatattgta

SEQ ID NO: 243536 - DNA, 1502 bp, Cannabis indica
atatgaaatcgcctcacttgtacagagagaccatgaccccacaattaatagcgacgatttttttattttgttaaatgataattaacaccttatatttttaaaataaaacaaaacgatagcatgagtctgatattcgtcgaactcttttaatgttaggattatattagaaatcaaaccaaaatcactagagttagggaagagaaaattttaggattaggattaaagacattgatttaaaattacattcagggtaccttaagtttcattttacaaaacgtatagtttaaaatattaattggacgaagcatagatatattttgtagtattttatatttagcgagaaaaatagcttgaatcttcatctaagaacaaaaaaaatcaatagttttcataaaagacaaatggatcctaatctttcttttttttaagaaaaataatattactattactgttcttatttagttggtttttccggtttctttttcttttgttattttgagctacaaattatagtgaattgtttaatcagagtatctcaaatcactaataaagtggacctgtttgtgagccaagtgggagtgtgtgtctttacaatgcaagtggattctgatgcaaaaggaccttaggctggctttagatgctatgctatacatatcttttctccttatcctaacttttaagtaccatgaactcacttttacaccaattaaaaaagattcacacttttgtttttcaaaaaagtagaattaaagaaatcattccaaacaaagaatccaaaaaactttactgatctaaaataaaattcaatgcttgtattatctgtttctctattatataaaaagcagaacatatcatatatatgcctttatttttgaagtttgagcccttctgtctttctgtttctcagaagtagaatcaagatagaaagaaaaaaatataattagtgatgtactatttcctccattattatatatccagtagagcacgaatagtactagttagtagttactagtaaaaagcttgtttcaaatagaataattgttataattaattgcaagtataaataaatatatatgtataaagaagaacaagcaaaatttgcaaatgtagcaaagctatagtatatgtgggcattagagcatcaccaacgacacggcatgctttgtttagtgatgaattcttattcagggagactgcatatatatatatatatatcttgaatttgcagtggatactacagtctactgtatataccgtacagtgtaacacacgatatatatatgactaattaagatttttgcctctaaattttgacatgtattaaatcatgcctcctgaacttttaaagttgttaaaaaatgcccctcgactatggagattgtttggagtttaaggtaacgttttgttctaatttctattctaattttacttatttctagtgattgtcttatgtactaaaccaatgctctccaaacttttgtatatctaccaaatcatgctcc

SEQ ID NO: 243537 - DNA, 1292 bp, Cannabis indica
acattggtgctgagaatgaaaaacagagagggtgtgacgaactggctagcttcgagagccttctcttcacttccaatgataagagatattatatggctcgtgatgggaattccagttaaattgcgaaaatcttgaactcgttcccaaattgcctttcttctccacgtctctttccttgccacaataacaccagctgccatgtcacatattatatggcttcgattaagattttaatgaccattttgtaagttatcatgttgaacaaaaaaataatgattaccatgggatgcagccacaactggcacgggagaagcagttgaaaatatgaaagagcgacctcttgattgtattagttgcttccatttcttactgtttacatatgaacaatagacaaatttaaaattttacaatgtttctatgctagttatggtttataagtattgtatttcaaactgttaaaactttaggtatgcacaaacgcactgctccaaaataggtgctaggcgaattatcgtaattgtaacattattactgaaaaactctagaaaaggaatataagggagaagaatatatagtcattgcctgcaagctataaatcctccatgacaaccaacagctttgctcagagtgccaacgcagatatcaatatctttctcgcagttgaactcttcagccactccgcctccattttgcccacaaacaaatgttccatgagcctgaaacaaaaagttattagaagcacatttgagaaaatgtaaaaataatctgcagtcattgctgcattacactttacaccccacttattaatttacttcaaccaagactaaggtcatcagcatatgccatttcttttcaccttgtacagagtcatctaaaagaataaatgattggttgttaagcctacgtagttaacaaattttatttatgaaataactatatggtcatagaaacctaatgactctaccccaaagtctatcatgctttgactgaacagtaagaaactacaaagtttgtgaaacaaatttgaaatagttcctagatgagcagcattaattgatttttacctacagtcttacttacatcatcgattactaacaaaaatctgtgtttcttccgcaacttcacaagttcagtcattggtgcaaagtctccatccatactaaacaagctgtaataacacaaccaaatgaagcttttgtacaaatacaatatgcagggatgatttgcgtgtacaaaaaaaaatggttgtctgtttcctaaaacttgtaagtaacaatctttcagtatatttt

SEQ ID NO: 243538 - DNA, 4366 bp, Cannabis indica
attatattaatttaaaattaaaaattcatccaacttcccccccaaaaaaaatcacattttgaaactcaaagccatagatccacataataaacgcccaaaataagacagttccttcactcatcaattgtaaagcatagcagcatttggaagattgagatgtgcaaaaatgaaatggagagtttgtacaaaaaaaggccaatttttagaaagagaggttaaacctatacaaagggatgcctcctaacattcattagaaagacagagttaagtctttttcaatttctcctccccacttcacataggtaggtaaaggtgaaaagcttctacggttggcaataaatgttcactttgaatatgctctgttccctcgtaaacacataggcgtaacaagtggacccattacattgcctctttaataccaaaataactctagcaaaaatcctaaggtatagatgcaatcatgagaagcagctcaaataacctatacaacaacaactcatgagtccatgaggctttatatcagctgccttcagggggaggatttgacttttcaatcagaaactcgagtctctgcacacgaagtggaaagcagatacagttttaataagacatgaaccaaccaaatgcatgacaagcaaaacaaggaaggcagccgatgacatgaatatcaaacgaaagagtataccttcactgatttatttacttcttcgagtttatgaagcagtaaatctccgggaactatgcctctgcggtccatcaaagagtagcgtggggaagctgtcatctgtgaaaaagtacccaaacatggtttgaccaatgttaaatgaccaaccatcatttataagaaaattatggacaagaaatctaaaatgtcaggggaacagatttaatcaaaagagtattgcaagataaatgtatcctccatagaagacttaatgcgaattaagtgaaccgtgaatcagaaaacctctacctcctttagaaaatctaagaatgaacaattttactatggtcattaaaattaaattatcataaaccttgcaaacctcaatctatcaatcttccgtaaatttactcagcatctcagaaaactctaatgataaggaaagtgcttttatattaatccgaatgtttggttctagaaatttttgaattgtttctaaagaatatgatcctctacttatagtcgtttcttataagccagagcagagaaaatagctggaaacttagaagagattcccctttccataactcagctggggaaaaaggcttgacaaattttctagtaattcaactgcataccaacagagagtaaaaaaatgagctttcctacttcctcatatcatttacacttctttctaaaatgaattcgcttctctgatgataaagaaagtgttctttatggtttcttcaggattctaatggttgcttcagaatgtaatccttttcttatagtccttgccagagtagagaaaacagctggaatatgcgaagagatgcccctttccatagctcagctggggaaaagacttgacaaccaacagggcgaaaaaaaaataaaactttcctaattccctcatatgctttacacttttccctaatatgaattcattctctgatgataaggaaagtgctcttatattaatcctaatgatttacagaaattttaaaatggtttcttcagaatagaatcctcttctcttagtcacttcctataagccaaagtagagaaaacagctggaaactttgatggccttatccatagctcagctgggaaaagccttaacaaaaaatctagtaattcaacatcctttacacttctgcctaatatgagtttgaattctcttcttggatgataaggaaagtgctcttatattattactaatgtttggttaggaaattttcgaatgatttcttcagattagactcctcttcttataatcgtttcttataaaccagagtagagagaagaaaacagccggaaactttgaagagatgtctatttccatggttcagttggggaaaaggcttaatgaaaaatttagtaattcaactgcataccaacagagcgtaaaaatgaactttcctaattcctcatatcttttttacacttcttccaaatatgaatttgcttctcatttgtaggcacgcagccatgttgagagaatagtagagagatgtagagatctggagatccataattaccttcaagcttttgactggcgatctgaaaacagctggtccctcagacaatgatcccccccgactaaagttttctccttcagcagctaaagcagaaggcttccaacttttatcaatatccagcatagtctttgaagcttctgttatgatgacctgtaaatcatgaagagaaagaactcatatgagacttcaatttcacattgttcaaatgatagtgcaacacaaagtaggatcccctgattcatgtgcaagctaaagccactcagactctactacattatagtataaaacaaaactgtcacaccttcctcaaatcatcaggatcggaaacaccttgaatctgtaattcatctacatgtgcagcttttccatgcgctatactttcaactctgaaggtgtgtattccatacattgactgcaagcatcctaaagacgacaaaatgaacaaagaaataacttcatcaattaatttgtactctatgaaatttacagtagattgaagtaaacacacagcctcaaaggcagtaattattcattaaataatttactgtaatgggcatatactgcaggcatagttccacattcgggtaacaaaaagttagatacaacaaaattgaagatgtaagtatcaataaaatggtggaaatggggcaactcgtcaagacaatattataaggaaattggctttagaaagaacaaacactaactggatcattaccttgttcgatgataatattaatgactagggaaagtggcaagtgtttctcaattgtcgtgatcccccaaaagggaatgaacgaaggtctcgaaaccttcaccaaaaaaaaaacactttgagctgtagtttatttctttaaaatacaaaaaatataggtttaccttgtaaactatttcattaggtgtcacatataatttgcgcgaggaaatatccttccggagaatacgtcttctgataggaagatatagcaacatgaagataccaactccccaagctaaaaccagcaacagtgatatacaaagccatataacagtatcatactgaatactattttctgcaagttcttcaaaggaggctgagtataacaactgctcggtactgtctgcactgtcatcctcatctaactcagattttttgtcagccagtagctgattccttgataatctaagctcgggtagaccaccggtatgacccaacaacattcctttaagcttaaaactggtacagttatcactatatttattaccaaataaaaaaaaaaattacaatagcattgtaaagctttaagtaaatacaaagagcctcctcaaaggcaactgcatacataaaacagcaaaatacagagacgtgatgctgacgcttaaacaactactttgactattctgggtccttttggtccttactgattcaaaacattgtttcattacagttaagaaatagccagcccttctagatagcttcccaaagcataaaataaaacacctaacatatcctatcctcataatcattttgcacagcttttgatgcatagtttatcaattcaattgaaacccacataatctggttaacacctgaagcattttcatgagtaattttattctaaacggtggcaataaacacattttcaccgtcaatgactcaaaaccctaatgttccaatccgtggcaaagaaacaaaaattgataaaagaaaaaaactaaaaactaaaaccccaataagtcacttcattctttagttaaaaaataaatatcagcttgctcaagccagggcttgaacaactatatgcctatcttcagcaactaccatttccttccaaaaaaaaatcactcatctcttttcttcttttcctaggaacaaaaccaaaagtactagaattcaataaaaaccaaaattccaagagaagaaatcattaaagtagtcacctgtgtttggcgtagactcgattataaaagtcctcggttcgtaaatgtgaagttttggatcgagatgtttttgggtattttggtgaagttttcagaaagttgtttgtttagttttgttgtttttttttttttttttggattaataaggttttccagacagttaatggggatgatagtgtgagaaaaaaaagaaaaaagatagtgatgcgaactaccggtcgtattataattttttaagtttgtc

SEQ ID NO: 243539 - DNA, 2954 bp, Cannabis indica
aaaaaaaaaaaagattaattttttatattaggccatttgatattggatggagcaacttactattactattattggaaagtacttcacaagtcgaaacgtactccaggtcgatattttaactataacttcttcatacaattcggaattagactattcaatatgttttgaaaagttaggatcacaatctacgaatttcatgttgagcttctacgtttaagaccgtcaaaattttcaattatgttcagatttttcagatagagttatgtgacttctactattttttatcaaaatgtgctaaaattcttccaaatgtatgattagtcttccacaatcctaacaaattaaatcacgctaattaataatttaataatttgaagaatcaattcaagaatattaacacataaaattaatcatatttatcttatgaatatagactactgtttcataaaaacaaataacaaatatataacgactaacagagcaacttaaatcgtaatcaaaatctgtgacccacataaaaattactagaaaaactgccgaaacaatccaaactgtaaatttgaaaaaaaaaatatttgaaataattctcataaaaaaattgtagatcgctatttattggtaatgagcaagtaactatactatacttaggttttgagactagtttatttatatttcttggcattaacgtaagaaggttttgagatttgaaccaaatttagttgttttgtatttttattcttcataagaataaattaaaaggtgattttaaactttaacatagaattaattcgtcaacaaaaacaaattcgaagaaatcaatcaaacatgtaaggaatctataaataagatgataaaaaaagaagcaaagataatacatgacatgtctgataaaattttctaagcagtatttgtttgttgttcttctgccataagtctaattagagcaaaattccatccatacaaattctactctgtcaaacacaaatccgcaaaattgaaaagaccttaaatgttactgattttaacaaaatgaaaaagaaaatttgagtttcattatgctcccacaacctcggtcacctcaccctcgaccgctgtttcatcagctggcctgtcaaccttcactccaacatcctcggagtaatcaccgtgaacctacacaaacaattcgacaaaaatcaaaaaaacaatctaaggttcctacgagttaaaaggggtgttaagaatggaatccaatgccaatgaatacctccatcaacttcccaagatcgaatttgggagctttaaggatcttcactttgcggatgaagacattctggagtgggtagatgcttgatgttgccttctcaatctctctaccaatcatttcgggaataaacttgttcaccaaatccttaagatcacaggacgtggcctggttgatcataatttctctcatctttctcctaatctatgaaaaaggaaattaaaacataagcaaacaaagattgttaacacaagtttctatatgtcatcaaagcatagcatactaaatgaaaatgtggagcatttaagagaaagagacaatcaaatcaaatcgaacctgacgaatctggctggattgcgcgtagcaggttctcttgacctggttagcacgtctctttgtgaaagcaatgcagaacatcctgagggtgtagttgtcagtggtcttgacatctacatgagcctcaataagtgtttgccacttgcgaacaagtgacctcaacttatcggtggtgaagtccattccctgcaaattcgcattataaaaattaaataagtaaaacattgtacaaaaagaagttccaaatagatgaatgaaattcattaaaaaagaaacctacccagaagttagttagaacattcttcccttgaacatcttcagctctcaaacggattttcctgtaagcatgatcctcatccttctggagatcagccaaggaaacctcaaacactctgtgttttagaccttcagaagcaatctgataacataataacaaattaaacatcaatgcgcctctaaatacatgaaatatacaaagaaaacatgaagtatatcctcacacacaattgggcatattaatgaaacaacataacagctcatctccaatccaaaatatacacttacatataagttcaactaaactaacaattgctactgatgaaaaaaaaaatactagagaaaagtatagtcctaatgcttaatcatcatcatcattataagtttaaattatcaaccacatttccccaaatagagcttgacattcaaaaaaaaggaataataatcccttattaggctcttaactaacaaacaataaatcatcatgagcacctaagcttaataattataatgataaaagaaagcattttgaggagacaaaccttggttccctgagttctagtgacaagggttttgccaacttgtctttggttgaatagagaaggagccttgatgtcataccaatccttcttggcaaagggatcggctctgtattatattattaacaaagtgttaatgcaattatagagattttgattctcaaatcaaatctgaataaaagataaaagttgaaaattgacttacgccttcttcttgcctcccttcttacccttggaaatcctcttgttcttcctaaaaaatcagatcacatgcatgttatgaaaatagaaaagaaagaaataaacatacagaaatccatgattcagaagtacatgaatgaagcatatagcggaggaaagaaatagagaagaggtacccgacggccatggttgcagaagagaggagagagtagagcttagctagggtttcagtctgagaggcgcaactcgcttctgtttcttataatatatatatttcttattgggctttacacgggcctgcctagtcctctatttttgcgctcattttgctgaaagcccatattcttttataaaaatat

SEQ ID NO: 243540 - DNA, 1921 bp, Cannabis indica
aaaaaatcaaatataagttatcataatttttttgcttcccagtgttcaatttctctctttttttggtcaagttgaggagaacttttaattgtttaaattgtttgatttggttcattccttagttatcttgtttcttacatatgtgattcatcttttctagaccttcaacaatgcatcgatcccagcttcagcccaggctactttcccctacatatttgctgtcagcaagtacttgcaggttcataaatctcattgccagtttcatcaattttcagtttctttaatcatttctattaggatgacacaggttttttttttttttgattgcagcctggaacttttgatcttgttggtaccatcatttatgagattgaccaacatccttatcaaaacaccttctacaatggtactattgaagttgttgaggctggtggattcgtcagcgttgaatctgttttccttgttactcttggaatcgctcttcttgttctccttgtcttgtgggttcatggtcaaatacagcacctttcgaaggtactagcaatttaatgttctatctatttcaatagatgtggatgcggtatgacttttataggcctattaacttgcagtcaatatgaattggatccttttgtgttatgctactaattgtgtcttccgcaaatttcacatcattcacaatgttgtaatttttgccttaggatgttcctgtggcaaactagtcatttatttatgtatatattttcatcataaaaccttctccaacgtcttttatttatttacagaaaaccaagagagctcccaaggtggaagttgggaccaggaccactgatgcatcaatggatgagtggcttcaggtacgtagttaatgctgaagctccacctttttaattttcaatatagtgtagattaggtgcggattattctctgaacagcaaattcctttagcctaatgaggattgttgctaatctgttccatttttttctgttgatatgtagggaactgcatatactcagtcgctttccagcaaatcaaagaagaagaagtagattaaacgttgtcatagctctgctactacgaatgagaatacatagaaggttcaagctcccctaactcacgttagggctcctagaatcataaaagttgaattagttttgacaactcaaccagaatttttaccttctgctgtagtttatggaaatttttacatttacaatatcttggacctgactttgagcctttttgaagtaaaactaacggatatttaagttaatgaggagaaaccttttttggtttgaaggttacactttttgtaaattgtttttagatatcatcacatctaaattttattctgtcaaaacttctttatttatttatttttatattttcctatctatatgatcattttcaaggcatttgtgccatacaattttaagtttgaaagcctttatcaaaatatactcaattgagattcatcatgtctatttgtgtgacccttagattttagttggtgcagattgttctttctctctgtatattgtatccatgaagggaggtgtatagacatttaaatttaatgcttcatgacgactgaaaaaaaaaaagaaattttagaaattttttttttttttttatgcttcatgaggatttggtgcagattgttttttattttttcttttagaatttatttcctgtctaatttggttcatacgaccccttgatgtattggatttgcaagtgttaatacttactttctgcttcattgtccaatcatggaaagccagaagaagcacaaataataggtcaaatttgataacttatgtggcaatattttgtaaaataatttgtactcttttaagatgggtctgttatagtgagatttctctcacctagaaactcgagaccagactcctctttaaa

SEQ ID NO: 243541 - DNA, 4943 bp, Cannabis indica
tctctctctctctctctcgatatggcggtctctttccagacaactattcatccccaagctagactcgctcacgcgcctccaaggttctttctcttgggttttctttctttttcatttctcttgctgggatttcttcaaaattgagtctttttcattgtcttgtttgtttattggcagttgtggaacaaagctttattcgggtttaaagcttcaatctccaggtatgtgcattgctttgctcttcgcagtcttagtaaatttatatataagttgtataaatttggggtctaacctttttttttcctttcaaggcacttttggagctggaaaacccaacttgacagctgagttctatggaaaagttcacaagagtcttcagcctaggtaatttggtgtataaatttgtgtgcttttgcgaaaaatatataatttggtatgtttgtatatatatatttggcaatttagtagtgtggtgctaaaatttagcatattcgacatttgggtcttgtaacttatttatgaagctttagaattttttgaactataacaattgatagagctttggaatacttttaatgcaaaattggtatcattctcatccttctgtttatcagcttcacattaatctaaaaccattttactcttccaattaatttaagttcatgtgcagaagcagttatactcagtttattttaataaaatagttataacatggttacctctttctgtggaaaaacttttctttgagaagtattttaaattctaaattgttatgtattgattcagctatgatccatactacttatgctttcaggatcagtaatcataaaccaacaagagcacaaattggaatgatgcctattggaactccaagggtgccctataggactcccggtgaaggtacttggcaatgggttgatttgtggaatgccttggtaagtttttgtcccctagaggctatctatgataaactggcaaaaatcttatcctctctccttgtttgtgcttccattttttatcctttgataagagtttttgcttaagactcctcaaaagttttatccatctctatacttttatttttctctggaaatgtttccattggttgtttgtttttgctaatttcaatatatccaccattttcctcgggacaagctgtttcatagaatctttctgtgtggatgttaatttggtctacaatctatataaatgctgttaaattgtgttacttaatccgtcaactgaattctgcaaatgcagtatagagaacgtgtcatcttcattggacaaaatatagatgaagagtttagcaaccaaattcttgccacaatgctttaccttgacagcgttgataataaaaagctctacatgtacattaatggtcctggtggagacgtgagtaccttattaaaatgttcaactgaaacagaatctatctaccttttctttgatatatgttttcgattgatttcatgctaaaacatgtactattttgtttatagcttactccaagcctgtctatttatgataccatgcaaagcttaaagagccccgtttgcacccattgtgtgggctacgcttacaatctagcagcatttcttcttgcagctggagaaaaggtagtactttgtccttttaagtttacatttttttttttatttttttaatcttcgtgaagtggagatattgtcatttataaagctatacaaaactaatattttgttagaggaaaccggaaaaaatttatgaattgggctatttgaatttcgattcatggggtatctgagtcaaatcaacaaggcttcagttagaacagctttatcatcttcccttttttaattccccatttggtgggactaacaatgtgtaatttggagtttgatgactggggtggcaagtacaatttccatataacgtccaattcattcatgcatacttgagtcaattgtcgaatcatatattgattatgctctgcattctacctattttttccttcttatcaagggtaaccgatatgcaatgcctttagcaagaattgcattacaatctcctgctggagctgcgcgtggtcaggtattcctcttttttacattccgttgccatagaaacctttttatatttactgattttggttctttctggtgtcattaacatgttatgacaggctgacgacattcagaatgaaacaaatgaacttctaagaatcagagattatctttttaatgaattggctgagaaaacaggccagccagctgacaaggttagtttaaggctttgtttttatggtagactattatttctatcattagggcctctgtctatagacatcatttgtaatttgtttgctgtgcagattagcaaagatttaagtcgaatgaagcggtttaatgctcaggaggcccttgaatatgggctaattgatcgtattgtgaggcctcctcgcattaaggctgacgcacctcgcaaggatgctgggacaggtctcggttagttgtgtattattgtatttttcgctcatattttagatccttgccgatatcaactgtagggcttaaatgtttcagaacttcatttaatgcttctgtaattggctttgttataaatttttgcatagagatttgttattttgaacgtttaaaccacacttaaaagactcagaaagcattagctcaaaaggaggctttctatagcttggcattcatatagctcaagtggttgggtgggtgactgggagcgagtggtttggggttggggttcaagcccggggtatagtggcaaatgatcatgctctctttacacttatttaaccagatccttcacttcattatagtaaaacacaatcaagtctgctgatattcttagcccgaatgatatatttcaatgatttgaaagttttggagttcagtgttcagtttattctgttagttttttttttttgaaaagggaaaggggtccgccaatcttagacagggcccttccgagataaattaaaaagcctcacttatggcggaggaaaaccatattacagagagatacatataacaagtagttactagagcttattctaacctagaaggaaacactagatagagggtttttcttttgcctaaaaatatatataaatcaattttagcactcgagattaaatgttacaatacaatgaattctcggactttctccttgcatgacatcaaaagttgaaagagtacaatgatatcatacttattcatgtaatgataattggctaaaagttttagtgaaaggaagaaagtcattcaatgttgatcttcatggtctcactctcaaacgacattgtttgttcaagtaaacattgtactacatatcgtttttgatggaaatttcgtttgtatgcaagtcaacacattttcgttcacattgcatgatagatatatggtttataatttccctttagaaatagacaaaggttggttttgaagacaataaaattaagcctacaataaattgcaaaactttccttctcccccaacctttcttttgcccatataaccttgccttgtggtaattttggtggttggtcagttacattttgagggtctataaacgtttttttttatttatttttggaggatactactacaacatcataatgaattaggccaagtccaatattattcaagacagtttccacaaaaataaaaaagaaaagtaaataaaataataaaaggggttcacattcaaactctacaaattcaaagacatcaatattcataatatagatttaaagtttcaagctctattaagattttccaaaatggcttacagcaaggagagatgtacagaaggaaaggttgggagagaaaggaaacgtttttgcaattattattttttaggttcaattaattatattttattttgggttaggaattaaaaaggaaataaaataaataatttaattattttggtattcacatgtgtcttactataagtggcatagattgtgttaaaaattgtgttcgtacaaactcatctctacattaaataatgattttaacacattcataatttcaaattacatactttttgcttacaataatttgtaataaatctcggctatacaattaaaagttatgtatctcacttaaatttatatatggctaagattgaacatacattattatagaaaattttcatagtaaggacactacgaaaagttacatatgaaatttttcatagacgcaattgactattttgaacttagtttttgatgtcttaaattattcaaaaaattttaaaaacttgtgggatatttattataactacattgtagactgtcgtataataaaattaggttataaatgttccaattattgaaaactgagatgtctctaccagtaaaggtaaaagtgacatccctattcacactgtaaatatgagtagaaatttttgacacgatatgaaactggtatgagctcgagaggtacgagcaagattcgacacgaaaaaatatgggcttaggcactacacagcacaatacaaaaaaaaagggcttaggaacgacaagctcaaaagcacgacacataaccacgaataaattagcttaaaagcataacacattaaaaaatccaacaatttgataataataataaaaatttatttatcaattaaaatgataataatattaaattataattatgtgtaattactattgaaaaaaagatataaaaataattaaaactataaaataaacatatattttagtatttagctcatcaattgttataaatgcaaaaatatgaaacacgaatttgagctcgtataaaaaaacaagttgacccgaataaagcacaacacaaatttgagcacgtcacgaaattaccggacttgcgggccgtatcagctctaccctataaaaccgcccgcaccgcaaaaaaaaaatgcagtttgaaattcttggcggtgcg

SEQ ID NO: 243542 - DNA, 4892 bp, Cannabis indica
ccgcggtggcggaacgatctgaagcgaagtacggttcaggttgcgtccttctctcctttattttttttcgttttaatttagtttttttagccgcaatcgacggacaatatttatcatgcgtcatcatgtgtttccgacagtttgatccgacggtgatcgtgactttcgttaggaaaagtcacgctttgcttgacatcactatatcgaccaaaaagaatagaaaatcttagtataaacggtacagttaattgttcggtggttttcgttttttttttttatatagaaaatatatttggtggttggtatacagtacttatatattttagatagggagtgtttggatgctttttctttatggctcattaaactttcccaaattgcttgctggaaatggattacatttaaaaatattttctagcttttttaataaaattgtatagtgtatatgtgtttattagtcatttgggtttgacccgggtggaaccaacaaaaactctaatcaatgattgaaaatttaatcataatgtttttatttatttatattcaaggaaataatgcttgaatttatgatatgataagaggagcatccaaacactaccttaagaccatccatattcgtagcttcgtacgaagaattttcctttaggtgaagagagggccctacttaacacagtaattctcacgcctcctcatcaaaagcaaacccataacaaaaaattataaaactaaaagaaaaataaagtccaaaaaggaaaactcattgtgacaaatgaagtagtggtggggcagttttgattgcattggtgggctttttcactgagtattgtcgaaatgtcgggagaagggtcttccctttcttttcaattcccttcacgcctgcctgattctccgtggccttgtcttcttatatgaccattcaactttatctattaacctgtgtagacaaagccagtaaatactgccatgccaaaactataaagaagacaaaatgttaaacgttcaaaatctttgtgttggcctacaaaattgaggcaaggcttacgaaaactcatagtcatgactcatggacttgtgattgacctcttgtttcttttactgtaggggacagtagcaaagtgagcattaatttttccttagtgattttttcgacatatatgacttgttgttcaagtccaaccaatgaaagctttgttgttgcgtcttagataatttgcttctctgtctctatcactttccacttggaatctgagtagacactccttcaaattatctcggctatttctccttttctattcatttcgtgtttacattttgttggttggccttgtaaattaaaaagggtttattactgttggaccccaccttaacttgatgactattctatagcaccgctagttaagtcaaatttgtagcctcttttattatcatcaccactttattccatgcacctactggtaggtttttgcttttttatttttttctctttcatttttaatgatcattattgtttttggtcaaaaaggaatgcgagcttaagttagtgctttgagtgcgattaagttagtggcctaacacaataaagaacaatgaacttctactgaatcatataatgatattataggaggtgttttagtaagctcatgtaaagtaggaacttactcatggattgtcctgctttcactaccccaaaaaacagatcaattgactgttgtcttgttaggggcactagtggtgctgtgtcacattgccttgggtgtgacaaattactctttccttatgtggtacattttcaaactgcttagctttagtttcatcaaatgattgacaattttattgaattcttaagtctcatgtaattatttatttaatcaacttcagggatacttaactattattttatcttctctgattagtcgagagatgtttaacaaatggcaagctcaaaggtggtgggcagagaactatgacaaggttatggaactttacaatgttcaaaggtttaatcgtaatgcattccctcttccaactccacctagatctgaagatgaggtgagcttgaatcctgcttatataacatagacattaatcacataagtggctgttttcagctctaattgtcattgaggagagtactttgtataagttgtgtttaaacatgattttttgagaagttcgtcaatttgtcaagtgtaatgtttagagattgaatcctatctacacaaacttattcttagatttactctttttcatgtttatgttatataatattaattcctttgtttacagagctcaaaaatggaatctgcagaggctagtcctgtaacaccaccactatccaaagagcggttacctcgtaacttataccgtccaacagggatggctatgggctactcatcttcagattcatttgaacaacactcaatgcagtcccgtcatttcaatgattccgttggtgttaattcaacaccgaaactctcaagcatcagtggggctaagacggagacatcgtccatggatgcttcaatgagaagtagttcatcgagagatgcagatcgttcaggcgagctatccattagcaatgctagtgatctagaggctgaatgggttgagcaggatgagccaggggtttacattacaattagagcattgccaggtggaaagcgagagcttagacgagtcagattcaggtaatatttcttgctgactgtaagcttagattgcagtaaattgattgagctcttgcacagtagttcctagtagcattctagacaaacttttaatgaagttcacaggcaaacaattaaatatagtgccccatttaatggccattagcacatatcatatgtagcttgctagctggaaaaacatatttgtcaataaatagaatggcaagtctactagacagtcaaaataatttatatcctctactctttcaggcatttaattttattttatttggtttctgataaggggtaaattctggaagacacattctcatttaataagtgtgtacagaaaacttgtgacattaatttcaccatacagcggctgttactcgttagtgcaagctgtaattatgtcaaaagtactcttctaagggtcatgatttagccatttgaattgttgtgctattaaacctgggttttgctgctggttcattttcaaaccttcttatatgctttggtttcattggatctggacaatgtatcacttaaaagtgaaaacttttgtgattttttataatgtttttaagccgtctaagatattgtctccgacatatcaactcctttacttgttaaaaagaaataataaaaaaattagttcatttactattcttttaattgcgctccctaagcttttggggacattgtaagtcatcctgttctgctttcaatttaacttcagactgaagatccttgcgtggctttaaagtttagtttctattcagtttcatactaatgatggcttaaattgtgaaccataagatacaatttttccagctacaaactacgacataattattagtattactcaagttgatgaagctgtttcctcacattccttttattaccattcggtgttacacattacacatgcacatctgtcaaattttacgatcaaatgtgaaaaaagcttctagtttatgataattgtttaggaattgtctatgaaactgatcttggttgatgtttatacacctcgaatgcagtcgagaaaaattcggagagatgcatgcaagattatggtgggaagagaatcgagcaaggatacatgaacaatacttgtgatcaattgaaggtgggaatggggggtcagctgctggtgctatatcatcatccagagtctgaaggtgttggtttatttaaattttgtttatcttatttgtttcgacatactactaaaaagccttgtctatagaatcaaaatggtgctgctggcgcctctggatgttcaaaatgttgctgggcaacatatcatactccactacaaaaaaaaaaaaggaaaagaagaaaaagaaccaagttgcaaggtggctgtatgttgttgatccagatcttctttctcataggatatgggggtaatggtaatagacttttcatttcctcaattttcttttttcttctttttattcttattattaagctattggtgggtgaagagcatctttgtatttgaatttcaaagtcgatatgtcaataccagtgaaaaaatattctctttcttttttttttctttctactgttgtaacttttttcatagtaaagcatcaacagcttttccctaaaggctaaagcaatatagctccctgcagtaataaactcattccagctggtaatattactagtagtacacatttaggagagaattggtggtttgttcctttagaatagagagaatttatacagtagaacctcactaatatatacgaagaataacctcaaaaattaaatcttgggcagttataaataaaaataatttttaaattgtaaaaccttgtttataaaattttaatcattaagaaacacagcaaataaacctaacaagtattgaaaaatgtccattaaaagaaaccatcggttctttccggtcttgaatctctgctcaaaacgcttcttggtctctttcaaggcagtgactttcttatccttagactggagaacgtcaacattaacaacatcattgagatcaacatcaagagtgtaccgagttggcatcaaatgttggtagttaacaagcttgacaaaggccttaactcgggacttcttagccgagtctttgccaataaccttgcttgggtacttgttaatcccagcaaccaaacaatatccataagggccatcacgagtaccatcattgtgtccagcataacgcccttgaaggacgataaccgc

SEQ ID NO: 243543 - DNA, 3752 bp, Cannabis indica
ccaaggtccaatatagccaagacaggcccatcatgggcccaatcaagttacaaatcaaccacaagcggagtccagctacagctctagatccagatataagtccatcttatagatgcaagaaagtcgttcgggaatgattatcctgccctgaagctaaaaggtccatcatgacgaatctagataccctcttaaggtaattcaaaatgggcaactgaagagacatttggcagcctctagataccatcctacgtggcatcctccagacacaaagtcatgttgtgtcagaggtttataccttatgtcaaaccttgagagcgcgcacaccatcaataggaaaccatcattttctttaacgccatattccttgacattctcggtaccaatatggttgcacatgacacctgtcatcaccaaacaatcaccacttgtatggatgatcgttatcttgagaattgggtctcacccaattagcccaaagtcaatatatattgtatgttaccctatcaatgggcttagttgacacctttaaaccttatcgtgtttgggttcgcccatacccaactctatcctataaatgtaacattgtccctccatgcgaaaggtttaaaaattatttcttacatcaaaggctaagaattagggttcttaagctagagcaagaacacttgtgcaagaatactttaaagtttgtttagttcaataatattgacttgtggattaaggcttattaacgctccaacaacttaaaaatctttctttctttttctttaatttattttttttaaggttatttattttaaaattgatttctaaaaatatttataaaagttaattattttgtaagttttttttaatgattataaaaagatattttttttattctactaacattaaaggcattatatggattcaacaccactcaaaaagcataatataaattgttaaatttaaaatcgaataccattcaatattataacttaaaatattaaaacaaataaatgcaactatttatagtcaactcaaataatgtaaattataaggtaccttgtaacaacattcctcctactaaggaggtaaattgaaaaatacatcttttatttatcaattaattaaatttatctataatttatatttaattgtaccatacttctctttttatatgtactttatataaaataccctgatataagggagtcacatgaaaattatattaaagtggcagagcaaaattagtaaagtataaaaagaaaaagataaaagtaaaagactttaacaaaaaaaaaaaaaacaataataaaaagaatacatagtctaattttctttataatatgtttgggggctgaagcatgctcaggtttattttaatttttaatattatttgttctacataatgaaaaattatattttaataaaattatggctcctaaatcggccatcatcatttatttcttttgatcaacttgtttaattaagtaaccaaattaatattacatatattacttgtaccaaatttatctcaaccagtaaaagctcattcctttgaaattattttttccttaattataagagtctagtacaactaccacagttgactttgggtctcgatccaaaatttctagttggtggggccaaataaataattggaattaaagaaaagaaacttaaaaacaatgcaaattatttatgtcttgctgactattttaattgttatttatgatcaatgaaatcacctaggtatggaaaacaagatcgatgtataattaattaattaattaattaacataacatttatttatgacaaagacatacataaataccgaaacacatcaaggccacgtgtacggaggatatgtactggcagaaccctcatttgcattataaatagcaacattgggtaacagtcccattataccaatcatccaaggagtaattacttattaaagtgaataaccctctttaaaatcttctctcttcaccatctaagccaaaagtattttattttattttatatagaaaaatgtcttgcaactgtggcagtagctgtagctgtggtagcgattgcaagtgtggaaagaagttccctgacttgggaatctcagagacgaaccccaccactgtaactgtgatcgctggaattgcaccactcatcaaaatgtaagtatatataatttcctttcattatctctctctctaaataataataataataaaaaataatataataaatatacttcacaacccttatcttgttatattattttattatttgtgacaaaaattggaaagaaatgaagataaacatcattaataaaaaaaaaatctaaaggtgcatatcccaattcagtttgttgggattctatatatctagctagctaaaagataaataaattcgaagtaataataaagaaaaattaataatatgtatttatttatttatttttaattgtaggagctttgagggagctgagatgagctttggagcagaaaatgatggctgcaactgtggttccaactgcagctgcggctcaggctgtaagtgctaaaatgatgggcgaatcatagcacaagagccacacaaaaaaccaacacattaattgatattaggataatgggatatatgatcatctcactctataaataatggaattgtctagtgtgattaatggttggatatgtactatgtattgtattttaattaattaagtggttttgatgtaaataataaagactgtcatgcaatatttccggtgttccatggcagtacttttttatacttgtgtaacatgattgtcctttttcttaaatttgatatgtgttctgtaagttcgaatgaaaaatttatatatcgttctatcttttcttttttcaaaggacatcgaatcctttactttttcaactcctaattaatatacttaagaaataaaaattaaaatacgaagcacagatcatcataacttacagcaaatatgttaatttgttctacaaaaaagataacatatataattgattatcgcgttatttatgtccatatcatatatattggttttgttgaggaagaaaaacctgaactaatgacaaagtaaacatagtgagctacgctacctacgcctaggagagaaacttggagtgttgtacagcataacatatggatggtattaaaattagagtttgccaaatttatatccacatgaatatttatttttatttttttatgaataaaacttcttcataaaacactagatcaatttctatagtgaccaccaaggagaccaccactcttaaaacatccaaagaaaaagctttagaaagtgtagcccatcaagcaagaagatttgcatcaaagtttacagaccgggaacaggcaccataacaaccaaatcaaactacttaaaagactaagacaaaaagaaaacaatagataagtattacatccaaacaagagataatcggaaattgttgtgctccaataaaaatatatcaaatcaataagattacaactctatgacaaacaaaagacaaaatatgtattaaataatgttataacactaaataaaatatacacataaagtagaaaatagagatgaagagagggattacaactcaaaacaataagctacacatgaaacacaatatataaatagcatatataatatatatgagatgtgagagcaatctcaacaccatctacaccacaagtgtataataggggaatcaccaaacttgaacaaggtcttacaccagggccgaccctg

SEQ ID NO: 243544 - DNA, 4151 bp, Cannabis indica
taaaaaaaaaaaaagcctaaaagcttcctttccccatttgtaattgcgtaagaaattgttccaacttatcccatcccgaccgctttatatgaacaaaacacacttgcgtgtcaaccttattatgaatccacgtgtcacactctttccattttattttgatttcttcttgtccacatcatctacccccaataataaattatgaaaaaatatcacccatactattttctatccttttttaaactctattttatccactatttgacataaattcacggacttaataagtattattgaaatatttatcacctcatgtcattaacaatttatttatataatgagtacaaattattgttttaatacgcttttcaattattaagaaataaataagacaagaaataaaattgaaacaatagatcttgtatagactctcagacgacaaaacaagagactgcaaaatgtaaaggaaaaaaaaaaaaaagtaaattaatttatttgggatacttcttgaaaacttccttctttaacttaacaaagaagacattaatttttatttatttatttatttaattttttaccattgcataactttttttccaggaacaaaaataaaagggtgcctttttggattctggggggacttttagatagaggccactcatttgcacaataggcagctgtgaaaggtgaactgtccgaaatgcctaatggcttcatgttagagtgtctgatcttttccaagatacgaattcagatttggaagtggggctgtcgctttgtcattttgccatgcaaaccaatttggccattttcttatgttttcctttcattttaaaacatttcacttatttatatttatatatatatatatatattatttgagattaaatattattataaaatataaatacacatactattataaatatttgatggaagctggtggtgcacgtcagcaatagacacataagcagaaaaaaaaaaacgcactcaaaatcttctcacttcccaattccacacaaattcctactctctattctcttccttacgtggacctactttatgtcgccacgtcaactgattgatatggaccccacttcaattcggataccggtcttaaccgaactctgtcgcaatcctttattgttgtggttctgctctccctctataaaatgagcaatactacttaaaaaagaattaactacttattagttgccataaaatcaaatacaatgaacttaattattgttaattaagtatttgaggatagagatcatagtgttccgtaccataaagacacatgattgtttttataagtcagctaatcctaaggttaggatcttgtattgaacataacaagtttgctcccacgatccctcacaaagtatcatattttttgtttttttttttttctcaaccacaaaaaataaaataacaataataattattaaaataaataatgaaattaaattccctattcgacgaatcacccgattattactctagtcaccacatgtcaaaattcgtataaccaaccagaaccagtacattactttgacaaagacaaatcgttttatttaatcgaataaataaaattcgacgtgtccaaaatatcaacggttgagatgaaatctcaaaaaacagagaatgatggataaggataaaacccagtatctttgctccactatcccgttcacgtcaacacaaaccaagtgtttttgtgaattaaaaaaacagagctcccccgtaacgtcaccgaacctttttttttttttttttaataattagcttatccattttgaaattccaggtcagacccaggaataaaaagtaaatgacttattttctaaaaaatgaaatttctagttagtataaataccgaagttggacccagcaaaagaggcaggactagattacaagagaagggcaacaccaccaaaacaaaagatacttagtagagaaaaatgggaagagtcacaaagcttcactctaacaatgatacggtttcttgggtcagaggaaagtgtataggcaaaggttcgttcggcaccgtaagcttaggagtcgacaaatcggacggtcgtgttttcgccgtcaagtccgttgatcggatggcttgtattcctagtcagcttgaggctttggagaacgaaattcggatcctccgatcactttcatattcttcttcttctccttatgtggttcagtacctcggcgacgacgagtcgtacgaaaagacgacgtcgtttaggaacatccacttagagtacttgccaggtggcactgtaacagaggatcatgatgacgtggatgaattgaccttacgatctcgaatttggtgcttggtttcagcattgaagcatgtacactccagaggcattgtccactgcgacgtcaagggcaaaaacgtcttagtcggtcacgctccgggtcttgttaagctcgcggatttcgggtcgggtaaagaccactccatgtttgattccggagctccaatttcgccccggggaagcccgctatggatggcgccggaggtagttcgtggggaatctcaggggccggagagtgacgtatggtccttgggatgcacgatcatcgagatggtcaccgggaagcctgcgtgggaggatcacggtgtcgacacgctgagtcgaatcggattctccgacgagttgcccgcttttccggatagattgtcggaaacgggtcgagattttatccagaaatgtcttcggagagacccgacgcagcggtggagctgcagtcagcttctggagcatccatttatggcggcggcagctcccgactcggtcccgaactcatctcctcgttgcgttctcgactgggtcaactcggagttcgacagtgaagaggaagaagatttcgagttcgaggaaaaatctctctcggcgaaagagcgaattagtaaattggcttcgagctcaggggcaatttgggaatcagatggttggacagtcgtgaggtcctcctcttcttcgaccagtgaggaagaaacagcacgtgcgaattgttctgcgtgccaaggagaagaaggaacaagtttagaatattcggatatagagagggcagaagatgaaatagttgggacaaattcgcaatattctgattttacagggactaatttgaaatatttgaaaaatggtgagtacgagccggaatggtcatgtaacgggaggcgtgacggtgacggcggtggttgtggttgcggtgggtggcggtgcttagctggctcgaattgtcggcatggattggagttaacagtggataggcacagaatatgtttttacagcttgtacattattgttgtttctattagtttattattttcatattctttcccaataatattatccacgaataaatgcaatattttcctgagttatatttgatattctttacctttcaattcacaattataaaaatttaaccattaccataactacaataagatataggggttgggctttttcgaattttgaggaaagtgattgaatcaactttctatttcccaaaaatccaaatcgatatatgccaaaggaaaaaatctaacagatagaaaccacttgatgtattattgttggtgggttattggttactgccgaccatggtaactgttggccaagttcaatgttgctagttgttagaattagaagcaataattatccaatatgcaaatattaacatatatatacaattatatataatcaccttcaaatggcttagaataaatttcacaaatagtattcgagtggcgtataataaagatactattggacaatatctgttgtgagatattccatttattttatttgtatggttcccaattagtggtgcattgcaaacaaacactacgattagcgtattttctttttggaaaggggattagtatatgcttaagtaaatatatatctttatatattaaaagtgtctatctaacgacattttttgatttaacagaatataatattctttaaatttaacgatgtttgatctcccgttaacaaataaacccaataattaaaccaaaaaattaaacaatcttttaaatattaataatccatttttaaattaaaaaaatcatcttagccacatatctctctaacaaacctatataaggagaatattaataattt

SEQ ID NO: 243545 - DNA, 3475 bp, Cannabis indica
ggatttgatttcatttcagtaacattcttgcttggtatctatcctccactgtttattgttcttcttgtatattccgtcggtggaacagctataagtatcttcttggaagggtaatgtcacaaccttttctctgtctcctcagagctttagtccttgacatgctgtttttggccaatagtagtatcaatcatgattaatggaatttaatttctctgtaattttaggaattggtcagtctaaacttcttgcaagaaaaaaaggaagcagattttcgttatggccttgtgcgcatccgagagaatgctgaatcgattgctttctatggtggtgaagaaaatgaaatgcgacttctgctgcaacgattcaaaagtgcttttgaaaatctaagtgtatgattattctctccttaagattttgcagaggcagttgtatgattttgtagtgcataaattcaaaatctttggtctttcagtttataatcaaagcagataaatggtctagtatgcttctggtttataatcaaagcagataaatggtttagtatgcttctgatgtttggggaaacttatactgctcacacatccctcaaatgtttaatctaaatctataatcattatggaaaaaagaacttaatattagctattctaagttgcacactccaaagtttggaaagttaaatcaccgagaggtgggtcgaatgataagccactgattttcacccaggatgtttagggctccatttgtacctagagtttcctacctccaaaggactagggttcaatgctagataagggaaaaggttagagagtgataacggctattaacttattattatagtttaaataagtaacagtgtatacaagatagatattctaaagaagtatatacttgtccttaagcttttgcatgggctgctttggctgcctccaatatacttgtccttgttatctcattatattcttttaccctgcagcaattgctgatttcttcgagaaatcttgactttttcaccagtggctatcgctacctcattcaaatccttcctgctgctcttgttgctcctatgtatttctcaggaaaaatagagttcggtgtcattaatcagtcagtatctgcttttaatcatatccttggggatgtttctctagtcgtgtaccagattcaagctatcagcgcattttcagcaataatcgatcgactaggtaaatatgtttgagttgtaatgctcttgttatatctattttgtttatttgtgtacctgcatttctggggtccggtatgcttaacaatggtacttggtgttggtgaacatgttttaagaacagtcagctcttgccgtatgcaggtgaatttgaggatgttctggatagtagtgggagttccaacagtagttctgatcctgtagaggagatacatctcgcatactgtagaactggtggctcacccaatcttgcatcaaatggatctgtacctgttgataagtgccaaaagttactggatgtagagagcttgacagtacagactcccggaagtcaatctacattagtcgaagatttgtcttttgtaattaaccagaaggagcatctattggttagtaaattagtctgcagtttaatctttagattttatgacatgaaatgatgattttaatattttagtatgaataaatttactttataataatcatgtaacagatcactggacctagtggcagtggtaagacttctttattaagagctatggctggtctttggaatactggaagaggaaagatcacattttatgtggaagatgaagaagatctccagcctcacactccttcagatttgagtcctcttgaaaccgatactgctcgtgatttagacataaagattgaaagatccgtatctagaaacagcagaagtgtatttttccttcctcaaagaccatacatggttttgggaacacttcgtcaacaattactttatccaacatggtctgttgatgcaattcccacggcagatggagatagcggtacaaatttgattctttgcctacagatttttaattttataagctgcacacatgaacaaagttgctataggaatttatgctccatgcctttgtaactgcgtaaaacacagttcttttgttctttttctacaaaactagttttctgctattgatcagcctctcttttcgaagagaagacaatttgctacgcagcttttcttttcttttctgttttgtttttcaagaaaagatgagaaatgcataaagctctttgattccataaataatttgtgcattgagctcttgttacatgttcacacacatgattgccacttactatatatatgacaatacatgttgcatagtatacattattatatttgagctgcattagtgcttgacaagttcagattttaatgttgtcatttgtggtaaagaaaaacattttctgatgtcatgcaatctacttggtgccctatattatgtcacagatacacttcctttcttgatgggcatatcaaactctgagaatacaagttctgaacgtaataagcccacaacagaggatataatacaggttttggagaatgtccggcttggatatttgttgtctcgtttcaatcttgattcaacatatgaatggtctagtgttttatccttgggggagcaacaacgtcttgcttttgcacgtattttgctttcaaaaccaagtttgattctactagatgagtcaacaagtgctttggatgagtctaatgaggtacttagttatgcttattttactatatgttcttctcataagttttgcaattcattcatcttgtttatcccactactcaattggatcccaagctcaacttaaccaagatgttatttttaaacattccttgtggcaggctcatttgtatcaagaagctgacaaagctggtataacatttgtaagtgttggccacaggcgaaccctttacggcttccataggagaagattgaacatatcgactatggattccatcaacaatcagcgaaattggcacatcgaattgatcgaccatggcagttcgtataatttgtcaagtttgtagttggaaaaaaaaattgaggcttacacgatttgagggtccacgataggagtttgttaatataatccctcttttgtagaaaacccattccaaaagatgaatgaatgaatgtgcttatctttacttttgttctggttcttcacatctgctacatgtatggtttgcaagaaatatgatgttgagaccatggtggcttagagaggtttaaagaatgtgaactaacaaaaacctatgaaaaattaggattgttaatagtacttgttgcaggcttgtatgcaaagagggctgtaataatattaatcatgtagctactggaacttgtaaatctggtcaattttagtggttggaaacaaatattttttagagttatttttcattttaacactttaaaataattttctttg

SEQ ID NO: 243546 - DNA, 3786 bp, Cannabis indica
atcattatactaaagtaattggtaagataaaaataaaagtaattagtaaatttgatacgacatacgacacacatttaatttttagcaccgttgccaaagactattgttctattttgtattcacaattatttttctgtttcactaactatttcacttttaaaatctcaagtgtacacaaaattactatcaaagctaaagaaatatcttgagtcatcttctgcttatcgctcttataggacaatctccgacaatccactctttcaacgtcttcttcatgttaaagagccactaccatctgatcacgagtatgttcttgaccattcaattaattctcacaagttttattggcttaaaatagggcattgaaaaagctggatgcgctaaatcttaaccaacaatcactgtgcatccactatccacccttgaatgttaacattgcattaaaagtcggacctcattcacttattgccctctttccatagccttcccaatgaggatcctaacaagcatttaaaggagtttcatatcgtctgttctagtatgaaacctcattcagtgattaaagaacaaatcaagccgcgggctatccctttctcaatgcaagatgcaactaaactaaagagtaattgtactatcttccacctggtattattgaaacatagaatgacatgaaaactatgttcttggagcattactttccaacttctaaagttagaagcattagaaaaaaaatctatggtatcaggcaagttacaggggagtcattatatgagtttcgggaatagttcaagcgattatgtgctagctacccgcatcaccaaataagtgactccttatcgagtccttttatgaatacttactaccactagataggagtatgattgatatagctagtggaagtgcactagtagacaaaactcttgcaacagccagaagcataatttcaaacatagttgccaattcacaatagtttggcattcgttgcaactctactccatcacctcgttaggttaatgaagtgagcaaccccattgaaaactaacttagtcaacaattaattcaattaacctctgtggtacaacaattcgctctaggccaacatatgcaaccttgtgagtcatgctagtttcttatgccaaagctagttagggagctagttaattaaattggtctaatagaatgaaaattttaaagatgcaatgcttacatctaatgaatgagatatggtgattgatgactgagtaccttcccagcttctttttttctagctggtttcccgtggttacatttgaattgaaagagaattcacaagaataagaaatttatgaagaaaacaagagaacagatacatttaccaaaaatgaattcaggaggcacaagttcttacaagaacatgagatgataggggaaataagtttcagagcaaaaacaactggtgattggcatcgtttttcacttgaaagtggaaagcctaggaagtttgtccctcaaataatataaccttgctcttctaaccttcctgtgactcactactcttatctcttttatgttaggtgagtacctgcaattaatgataaaaggcaaagaaacaaaaattaaatgacaactatatgaaattgctatttgttatttccaattgagagtcaaatgaaaatttggaaacccatcaactttgcatttcttgtccttaacactaacagagtttaatatcaaatggatagagttgtatcatgtaaccaggcacacagatctagttagttgaatgtgtgcctttattaacaactggttttctacataaagatgagcttactcaatgagccttgtcagctataaagatgagctctttactaacttaaagacagattccgataaatgcatgtaggaagcatcgtacttcagcttatatggttcgtgcacaagtacaaaccaaacagtattttaaaatgtatgatccttatattcattggtatggtacagtatggtatatggatgtagacatacataatttccttaaatattaaaaagaaaaaaaaaaaaatgagcaggaaaattgtgaaaaaattgaaagcaaacaaaacttagatgagacatgctcttattataggtgctatatgttctaaattactatattaatcacaattagctaatttgtcatgactaagaatcagcatgtaataaacattataaaactgaatcaagcagagtagcatactgaaaattttacttattggaaaaggacttacagagggaatacaatctcgactccaacaccagtcaataatcctccgaattcgaattgttgtatgaattccagcattttgtcttgaaatgacaatacctttatagacagacaatctacgtctattttcaggaacttcctgtgaatcgttcacatgaacaaaatcagaaaagtttcatttaaaacaattacaggaactaaaactaagtatgaaagccaaaaaccaaaagcatcattacaaatttgatctccacaacatctccagtccttatgtctggaactggcctttctttctgtgactcgtcaaccgcccttgtatttaaaatctggtaaaataaacaaagttttcatcaaaatcttcaatgacaaaaatgatccattgatgaaacaagagagcaggaaaagcaacttgccaattatttacattccttctatatagtatacaagttaatgtttcaactacttaaagttgctatcagcaaatacaaagaggatcccagcaatcaatgctcagctgagtgaaaattgaatcgtaatggtaatgataacacacaacaaataatcattgtttaaagattcatgacaactttcaacttagagagacatcattcatcatgaacaaagtgaatttaactccctacattacacatgtatatataaacacgaaattgtaatactatgatgagttttcttttcctgcttattctcaagaaccaaacaaagattccctttaataatctttatcaggtgataagaatttaaaaagaaaaactgaaaaagctattaaaaagagtacccccattatatctccaagcttaacccgaggctttctgggtggcttcgcttcctcagtctccaaaacttcttcttctccttcagcattgacctccgaagcctcttcaactccaccttcttcattctccacaacactctcagcagcttcagcttcagcttcaccttcggagttcgactccgccctcacaacaaaacaccgtcttccattcgccgcggcaagtaggggaccgaaattgcagccaattgagctggttgaaaccctggaagtccaaagccgagcagaattcgagagagaagggcgacgagaaacagcactggtaaaccctaggttcttgattgcgggttggttaggatttctcggaattgtaattagcgcctgtataatccaaaaacattcaatttaaaaacacacccaacattcgatagagagagagagagagaggagagtagtacctggggaagaactttggaagccatgattagggtgtggaggtttctgagatagagaaatgaagagagtgttcagtgagtaaaggtcatgactttatggtactctgtaaatttgatttactgtctcttatggtgtctgtctgagctgacggagaagaaactcccttatctgttctattctatccttttacacgtgctgtgcacgcgatgttactacaaactactttttttttcttaagagaaaactttattaaaaaaaaagaatggaatgaaaattatttcctattcattatattctattt

SEQ ID NO: 243547 - DNA, 2432 bp, Cannabis indica
atgtaaaatcttaatataatttaaatagattatcaaatgatatgattcattattgctgtttctttttcctttttgacacagatttttgctgttaaaaaaatggtttattgcgaaaatgactaacaagtttccatgttgtgatgatgcttaatattattttaataattgttttcttttcaaataaaatattttaataataacatagaggacaacaatttcgttccaggctgtgaaacgacaaaaatctatacagaaattaaatatttgttgacagagatttattactgttacaatactaaaatagtattatttttagtaatttcaactacgtaaacgacaacaatctgtttccatgaataacaaacgacaacaatttcgttccagggctgcgacgcgtctgtactactggactcaacatcggaaagcccatctgagaaagaaagcccagtaaataacccaagcctaagaggcttcgaagtcatcgatgacgccaaggcccaaatcgaagcccaatgtccacaaaccgtttcctgcgccgacatcctcgcattcgccgctcgcgactgcgtcaccgctctcggcggccccgattactgcgttcccgccgggcgccgcgacggcactgtatcactcaaacacgaaccattacaacacctgccaagccctttctccaacgccacccaactccgagacagtttcgccctaaaaggcctcaccttggccgagatggtcactctctccggtgcccactcggtcgggtcaactcactgttcttcgttctccactcggctctactcgttcaactcttcacaccctctggacccttcgatgaatcctgggtttgctcgggagatgaaggagaagtgccccgttggttcggagcgtggaaacgacgcgccgctggttgtgcctcttgaagggatgacgccgaataggcttgataataattattacgtgggtttgaagaaaggtcgtggggttttgagttcggatcagagtttgatgagtagttatgtgactgcgaaaatggtgaggaacagagctagggatggtgatggttgggggaagaagtttgctgaggctatggtgaaaatgggttccattgatgtgcttactggtaactcaggggagataaggaagaactgtaggtttgtgaattgatcatcattatctatgatcattcactatataaattgtaaataacctcaaattgtctgactgtgtaattattattgagaatgggttatttagttagatataatttaatataataatttttttcaagtataagatgtatttgcttacaattagataacagggccaaagaagacaatagtaactttttgttgttctcaaactcagctgttaaaaatttaatttttctaaaataaaaactagttcttttaagttatgctgacaaatactctatatttttgagatggggtgaattcaaagcttatgttttgtattgttatagacactctgtaggcttagtttttctctatgcaatgtcctttgaaattgaagtttttctctctcattaataggagtattgctgttttacaataaaattgtagaccaatttcagactggcataagctctttacaatcattaaccaagaaaactaaacaaaaaatacatatttgtaaagaaggctatctatttttactgtaacactatgccctttgaagttttaattgaatatactttttatattaaaaagagtttcattttgaaggttgtttgataaaagctttgatggccatcgaataatgctttgacaactccaatatttttcaaagttttgtgtagtttttttggaactctcattttgatgattgtttgtttggtggaacttcagtaatcgatcgtggctgatgttcaatagtttttaatgatttatcaatgaataaagcaactgttatgaaaataacaacaaaatcagttgtatcaaaacagatcaaattgacaaaatgaacgcaatgaatttacttggttcaactatccattccaaggatctgaacagcctattaaggctgacttgctttattaatcagttgagaacttaacaaaattacagactaaacaatggaaacttgttccaagattaaagagacaaaactttctttacaatgttctcaaaagtgtttcacaccaaaaatctcactaagataagtagacacgtgagccttatatagcctagcaaccttaactgtataacggcctctagatgagtcagctgccacgcaagcactctttcttgttgagtgttttaagttagggtaaatagtgagacaagtacttaaaattttaaagtttgtaagtggcataaactcaatatttatttttagagacataagtacttaatatttgtaaaacagtaatttttctctcggtatagattttgttatactgacaaaattagagaaaa

SEQ ID NO: 243548 - DNA, 1659 bp, Cannabis indica
atacaacacaatgaacaaaaatcaaatcaaagaataaaaattaacaaaaaaaaaaaaaaaagacaaacaatggaagataagttaaaagacgaaaaccctaaccttttgcgaatcatcattgttagtctaggtgcaacaccaggttgatcgggactaagtgggttggggtcttagtagagagctgcatgggtcaagatctcaatgattcaacgattttaagtgcaatgccgagggtttggggtgcttcgaggcatgggttcaatgtcgagagagctcgggtgaagtgagaaagggtcaaagtcaatagacttcaagcatatgacgaatcaagtgagagataaagattgggaaagtaagagagaaatgagagtaatttatctcaaagatatttggaaaatatttgcaacagcatcacatttggtatttgaattagggtgtcacactcacaccaagcaagactccaaattgaaacacgatatgaatcaatatgtacttttattcataacaatacttcttatacaaagggtaaaatgttattcatataaacaattgtgcactccaacttaaaagtgggtaagaattcaacattactattccagcacgtgacatttaaattttcctaaggttcctaataacatctcctcaatctatacgctcaatataagaacgatatgaacaagaaaagccgcgcacaattgcttgccattacatagtttgaacaaaacaaaaaaagaaaaactttacaaccttctgatggggtttgttaggctcatttctttggcacaaaagaatccttccaaaagctcacagtagaatatttttacatggtaactctgcatgtagggaaatgaaaagaaatcgtcagtatacagaaataattatatcttatgatggcagaaaataaaccaaaacatcattacatattgcaagaataaagaaaataaatgaagagtcgtattgaaaggcgatagttatagccaaaagaaacgctaaagggcatcaatggtacccactaccaccatgagatgtcataatgctattggtataattaagcatttgctaaatgttgttgagcactataagcacctaatagcaatgctcaaaatcaaaaaatagaataagtcccctatgcgaaacagaaatcaaatattagaaagcaacagcaatgctaacttttttctcacaaattgcagctatgtgatgaattacggggaaccttacaacatctaggtgacagtaatccttttgatttcagagatgtgcaagtgcaaggcacattcctaccaatggctcctgatcaaagttcccatgaagggacaaattgagccccaaagataagaactattatagtactagctaatagtaataaacagcaattcttctagtacaagaaagaactcaaaacgggggtaaacttatactcggcaaaacaatgaccacactcaagactcaaggcaattatgtcctaaacaaaacatataataattggatatatgacactaagacctcaggagacgttgtgcccccgttgatgctatgtagaagctaagtcaagctttagcctccccagtccccactgaaaaacgatatgctgtccagaagtactcgcaaactttcactcgagttcatatcaactcgaagactatgaacatcctattc

SEQ ID NO: 243549 - DNA, 2246 bp, Cannabis indica
ttgttgagttttgggtagatgaagaggttcggtggtggaagagaggaggttcggtagtggttgttggtggtctcggtgcgtgagttttgggtgtatcggtggtgcaagaaagaggaagagagagcgaggaagaggaagaaacagagagagaaatgaaaggaagggtattttgagtagaaattaaaaataataatattatttaattgtataaattaattaggaatctaaattttgttaaacgtattttttaagctgaaattttacgaaattcaattagatttgttctatttaggagctatgagagtttgctagcttttcatgttgtcttataaatataacttctaattaaatatttaggagctatgagagtttgctagcttttaaagtgctgttcattaactttgtgacagtgaagtagcaattcttggtaatatttttgagctggcatgttaaactaatagacacatcttatgagaaatgataaaagataccagtggtacgtgttaatatcgttattggtctaacttttagggaatattactagtcaagcgcaagacaacagtcttaagggtgctaggtaccactagtggccaatagcaacgctccatttttatttgtggaatagaagatggaacagtgaccaactgaaaataacactttacgaaggtttcaccgcatttcaataaattgtacaaatgaatttgctccttcccatgtataaatatatattctttttagtataatcaaaactatttataaactgatcttttaataagaaaaagaaaattaacttataaacggaatatatatgcttgtaaaattaaccattaatttttatattgaaacaagtttcattcgattaagacttagacaaaggagaacacaagaaagaacaagagaaagttattctaatctatgactttaaaacttaacattaatagaaattaataatactccatgaaaatgaattaagttgtaataattaatcaaaattaccatgaaatattgaaacatcaaccaatttgtgaatgatcattatttattattattagttcttgcaaaaatattgattataacaagcaaagaaaatggaaaagaaaaataagtgcatatgatatgaatattataaataaaataggggatatatatgggttcatcttcccgccaaaaatgaattgaaagcaatattggcaaaacaataaaagaaagagaaaaatgggtactcagtagcaatggtcactggtcaggactagtataaggaagcattagcctcgtggtcgtttctccgtctaggctcggtgtacgaacaactcctcttcgctgctttattcttccccataaagatcttcaaccgtccatcactcctcactctctcaagaacgcatcttggccgtccaaactcatccatcgacgacaaaaatggcggcaaattctccaaacccgaaccaatactgtttctcctcacaattctttcagacattgctgtttcatttctcggttttaaaatcgatcttgatgatggtggtagtccttccagtaccgcccgatacgaatcatcattgagattaacgcttctcattattacggagctctcaaaccccaagctctcactcaattcgaatccgctaatatcggctttattgtcaaggcatcccagagctctggtatcgccgtaagtattagatgcaccttcatcggctccgttaccggattgtcggtcgacggcggttgacgcaagaacgtttcgctgtaccggagcaatgtcgccggttgatggtaatgcgctgagtaaaccggtcgtcggaggcggaacattcttgcaccgatgagtatgttcttctggttgttggtcactgagcatggttttcttgaagatacccataccttttttccaactaatattttagtgtgataaaaatccctaaataatattatatatacgtataaataatacttaaacaacggttttagatgaaccggagaaggtcagtagttttgggctttcggcccgtttattgacaaggcccattttgaacgcaactcgttactaatgggaaatttacatggtgtactaattttttgacatttttttataaaaatattttcaagcggtatttttacttttttatagtattttttttataagtttcatactgcagtatactgtgttaagttttcactagtgttctactggtgttttttagctgttctactgttgttttgagttgttctactgttgttttgag

SEQ ID NO: 243550 - DNA, 2640 bp, Cannabis indica
agagttagagatctgaacggaagcatccatgatactttgctgccactaatgtaaagttttcttgaactttacatgtgtttattcattgttttagaaaattcatgtttaggatgttagactaaagaaaatatcaaacatacacgttagtaaatctagatcctagtaaaataagttccaataatgtcctcccgaccaatgaagcttctgtaatctatgaagtgggggaaggacatagttaggaatgggtccattctaattgtatccggagataatcctagattattttgcagaaaatatactattcggctagaagcttgtaagcaggaggtatcaactgaaaaagagttatccctatccttgacaaaaattttgcaaagtacatttgaaaagggagatttgctccgctcgctatgtgggcccagctctagacgctaaaccgatcagtactaacggaggcctactcctccgccacaaacaacctattccagatcaatctcaaaatgttacgcactccggcttcagcaacatagagctccatcaagttgcaattgttaggtttttggtccattttctagataaagtaattatagacgacagttgtgggggatgaagctttagctttctccttcaccttggactttactgccttcctaaatggagcagtttccaagacaggctcttgttgaagttcctcttctagagcagcagctagaacttccttaacattcacctcctcagtgagggtcactgctgacatttcctcaatgtttaccacctcgagactgaattcctcatttagatccatcactagaaaatggatagaaagaaataaccaagcaattatatacctaacacccaaaggactttatgggtatcggggactcccttaaaattactcggagaggtccttatcggacccatcacttacagagacctaccttcataaaatggtatctcaaaatgataggtcaggaacccaatggaaaattactagattagattcaaacaagttccaaaaatgagactgctttggagtcctaacaactccaaataggcaagcagaagaaaactggacctagcattcactcaagaattcattttgcctgattcaaatcttaatactagaatcctaagaacatgcaaatgccacaagattgaagttatcacgacctaactattcaaacgacaccaatattcccttggtaggatgatttcgacctaacttagtcctagaattacaactctatgggcatcattttaccatttgcatgtatcagatatcctagacctagcttgaactaagtatttctaccctagataagaaattacaaggttcaacgagattcaggatacttacttgatatacggttgggagatgatgggttattgtgaaaatctccccaagaattgcgcacccaaccgattacttggtcaaagtcagattgaacgtcgaagtcttcgtcaggctaggggtggaagtactgaattaagaggtcaaagaattcgtgctttcactgataaaaattgaatgctagattgaagctttttctcaggaaataagggctttggttcaaaatttgaaaataagggtttgaaaagtttaaaatggtaaagaagaagaagtgattcacgttgggtctatttataggcaagaaaaattcatgaaattcaaaataagcagtctaaatcctcccctcaaaaagcatgatttaatctaatggctaaggagatgaaagatggcatttaaaccctgctcaaggcttttatttttcatcatcacctaccttaggcccaacgtgaattaaaggatggtcatgtcaatcgtcctaccatcagaataatttctcctagaaaatgcaccccgtggagatgcgtgttaataccgattataataaaagcatggcatgaatgcaatgctagtggcacccagtttcttgacctttccatcaatgatagctcaactggaagaacacctccatgttctcactagtcacccacgtgtcataaatatgcctcagggacccagagaaggattgcaagctttcgtaactcaacaagttctaaaaaattcgggataaatgttattcatgtttctagatgagagacacatggcatgaaaagataagtatggcttcaagtagtcattagccaagtcgcctttacaaggtcaggtcacgtaaaagctttgtaaatctaggaacagcccaagatcagaggatgtacatcctgtcttactatgacttccgagacacggaagtcatactgtccctcgaggacccagagacaattaaacatatggtatgtccaacctatacctggaagacaactcgaagggcctatcacgaccactcaccgtgcagaagaagccaggcgtctaccaagaagagagacctagattgctccagtgacaattatacctttttgatacatgattagatcttgtccccctacttcagaccatggtagtgcatatgccccacctctgaacacgccatttttcttgagggtttttctaggcatcttcttttcaagatgaaaccttttggtgacacgtgtcctatatctttggaggtcccctattgtccagttacttctacgcacaagcacaaaaccttcctgggggcccaacagtcaacttat

SEQ ID NO: 243551 - DNA, 8911 bp, Cannabis indica
gcacaaaacccaacacttaaaaaggaatctgtgtttgagattgggtgtaggtgtttaattaataatataggttgcagtgcttatgcattcccctaataaggtaatggaacatgtgactgaaataagatggcttgagcaacattcaacaaatgttgatattttctctcaataacaacattctgttgaggcctttgcacacaagaatggtagtgaataatacctaatgaagaaaaaaaactcaggaaattgaagctctttggcattgttagatctgattccttttatcaaagagttgtattgagttttgactagttgaataaaggctggaacaacagtttgagcatacgatttgttctttatgagattgatccaggtgtacctagagcaatcatcaacaatagtgatgaagtatctatagctttcaacaatttgagtgttatatggtcccccaaatatcaatgtgaatgagatcaaaacaatgcttgaaaacattatgattggaaatgaaaggtaattttctttgttttgcaagatgacaaatggaacaataaaaatcagaattatgtgaatattgaaattgtaaagctttattcagtgtgattttttacacaagaagcatggccaagcctataatgccacaatgtgtcattactgattttagaattaaaaatagaacaaacaacaggaaaattatttttagacaggcaatacaagttgcaaattctttcacccatcccaatcacttgattcttggtgatatcttggatgacacatttgttaggaagaaatataaaagagtaattagctgaatcagatagggcacaagctgagatcaaattatgcttaaactcaagaacacaaagcacatttgtatgagttatgtttagcaatttgacagtgccaataaaagatatcttaacgttggttacatttggcaacttaacatgtgtcaatttagtgtctttttggatagaataaaaccaagtaggattagaacatacatggtgtgtagcatcagtatcaacaatctatctagatttagagatgaaatacacattgccagaaatgtttgacacaataggttgatcaggttgttgagattgctgtgattgctgagagctttcatacattttccatgttagcatagacataagcttctacattgcatagccaagttttgctcttaagtcatgctttcattagcatcatttcttgttgtgaagttagttgatgatcgttcttgctagtatcatggtttaagattttctcttggaagtcttacaaataatcgatggccaagagaatagccatgaattctataacacttggtaatgatatgtccagggatttcacaatgtgaacaaacaggtcgattgtcaaaacgattgtatctattgtcagatctatgattagtatgattgttacttcgattgccttgtgcacttccaacaaattgacctagatttttaatagtagattttgaagcttcaccttgaggaataaagattcctttttgtttttttttcttaaattatacaagcataagccttattcacatttggaagtggattttgaagtaagaactgagatctggcactaagataggactcatttagaccaataaggaactcaagaactttgtcctcatcttgatactcctgtatgatcttcatagctcaacaagtgcatacaagttgtggcctatgttcctgtaacaattcccataatcctttgagttaagtgtagtacgaagtgacatcactcgatcattgtgtcaaattctacatcgatctttttacttcaaaaattctaagagcatttctctaatgaaatctctcttctaattcagaccagatctgagaagcatcttccacatacataacactgtcacctatcattccacatacataacactgtcacctatcaaatgtgatacagagtttagaatcgatatccaagaaataaccaaactattacatttgatccatgcatcatagtcttcatcatcttcatctggagttagaagctttctatttatgaagttgattttgtttcttgccaacagtgccaccatcatcgacctcttccaaaaactatagttatctgcaccggtaagaatcttcggaaccagagatgaagaagcattatctgcattcgagatataataaggactgtgtggatcgatcgtaagaaatctgttgctttcattaagagctgcaaactgattcgaatctttagcacctttgttaccattattacgagtttgagtttctcctcctcgtgtcataccataacagagtatgagaatattgagatgaacaagaagaagaagtagaagcaagaagctcattaatcaagtggctctgataccatattaattttaggaagaagagagaataaggaaagttcagaaagagagaaataaactaaatgttaaagaatttcattaactgagaaacataacaatacaatgctcctatatacagctcgactaacaagctaacaattatctaacaatgttaactaactcacaacaattttctaagagacactctaacttactaattatcttgataattataacatcaaatcatttacttagacaaatattgctcattttttgctttttttttttaaaagatttatgtatatttttaattttaataataaatccaataatacaatttaattaatcatttgttttaagaaaccggtatcgtagtaatcccattattacttaatagtataaatacgagaaaagaaagaagaggaaaacataatcagcggaaagaaaagaaacgcttcagttgagagacactcttttcaaaattccaaggcactcgtcgtgactcgtgttcggttcgagtcttctctccaataccatttccgaagaagaacgtttctttagggttcaagattttgatcaatcgtcttttctgaggttcgtttctttgtcaaatcaatgtagatcttgtttggtatatctcttgtttggtttaccgggaaatgtaatacgaatttcataaaaagctaactaaattgttgtcttcattctcttttatgtccgaaacaagggtcagatatctttttatcttgctctaacttgaatttctgttcgttttattacctacctaggctttaggtaacaattttggatattgaatttcctcgtgtttcttggggtctttactgtattgcttacgaagttcaaattgaatgaatttgtttgcagctgtttcggtattgacttcatttgcatctttttttttttggtactcgtgttgttaattaaactcacgggaatttatgaacttttaggtagataggtgatagcggttcgaaacccttgtttgttgttgcaaattgggcggaattaggggttcattttttgctttcttgggtttctttgagatgggtggcgacgaaggaacaagcaacggtgacggtacggagtgcctagaggggctgcaaaatgaagtagttaataatgggaatggaacaacgggcgttgcaggattgagctctgggaaaagggaggtacttctgacttacaagaggcggaagcatatgaaatcttgttccgagagcaaattactggatgatggcaaagcgaatgcaaagactgcaagtccactgccactggggcaactaggttttgctctttcttcttgtttgttcttggtaatttattcatttacaaagagttatagttttttttttttttgaataatatatacgtatattaatatcatagaaatataaatccgcaaatcttgttccaataatcaatatcgaaatcttctttgaatctattttctcagactgctttaggggatttacttagggctgtgtttgctaacccgtaatggacttacatgaaaatggagatatgggaaatatttttctttcttgtcccttgcgttgttcatttgccaatttagatatgcgtttagggattacctcacatagtttgtgaattagtgaaattgagaaaagattgctcaattttcattttattctttttcattaccatataaatatttttcctttaccaattttttatttttaacttttaattgcgtattgatgtttagaatatcggttaaggatttagttgttctgtaagaaaaacctgagccattatttatttatttattccagttcgtaaaagaacaagaaggcattagcatggaaactacttgtcagcataagcgaactcacttctgcatggatggtttgaagaattgttcacagaagccttggaaaattgttttggaaggtatgtttcagtctttacgtgatagtgaaggtggtctgaaaggatgcattcgagatgcactggaattctgtccagatactaatcatgtagcaagaactaaggtttgtgccttaactagagttagtgattgtgactcttagtattttctttgaaatctgtagttttattttgactctccttgaattttaatgtttttgtttctttatgattttacagcagtatgatcatcacgttgataaaaggcagaggtacagttcaccatcagacagtctcatgaagggatttcagaaagaagctagtggtcaagtgggtgctgtatccaatgggcagaggtgcacttcactaacagacagtcttttaaaaggatttcagaaagaagctagtgggcaagtgggtgctgtatccaatgggcatttggatagcttaaatcatcagtcagtctctgagatctgtcatcgtactttttttgatgttgtaacatcggaaaagtttacctcactttgcaagcttatgttagatcatttccatgaaatgaagatcgacagttttcttgactatacacttataaactcaaggatagaaactggagcctataaccaatctcctttgcttttcctttcagatattcaacaggcaagttggggtaacactatgtcttgttttttcttttcatgtcatgatccaaattctaaaagttctgtctctctgttgtttgttttcttttgctttactcttacataatagatttacatcaattctgaacctgtctgttatgtttaaggaaatgatagttgaaagttaaaggacctttttttttttctcttaatggattgttttcattgttttattattatttgttctcgtgatgtttcttgcatttgtttgttgtagtctttagtattagtactcctgtgtcttctgttctgcatatgaactatttgaaaattacaaggtcactttatgcagtttagagctgaatgtgctggttaaagttggttgaaaggcattgtcgacacggtttcatacttttttcctttttcctattatacatcggctaaattattgatcctttccagtgaaagtcaaggataattatctttgtgtggtactgagtagaattttcattgtgggggcttacccttgtgtgcttttatatatttccagggttggggaaagcttgaagaagttggtgctgagatgatttctcttgcaaaaagcctatctgatttttcgatctcttgctataataagcaggtaagacaattcagttgaggatattgctatgtttgttactcttaatgtctaggttttgtaccttttcctatcttcaatcagttattacaataacatttcttagtttgttagtaaaatttctgccagatggggttttaattcacagcacatttgaaaacattgacaattaaaatctgggaaaacgtttaaatggatgactggtgttgtcatggttgtgctgttaattgttgatctgaagctgtatttatctcttttttaacaaaaaatataaaagaacaataatacaagtaaaggtagaaataaattctacagctcagaaattatatttaaaataaaaaatgaaattctactactttcaaccaataagaaggagatttctttgaagtctcaatttagtcttatgcttgacctttcagatactgttgaccaaaaatcctgagttttattttctgcattttcttcttgtattatgataggttgtgtgctataagtaaaccttaaaactagaaaaaaaaaattccagtattctttgacagttgtgagaagtcatggtaagataagagtcagttgtttaagaattttgaaaccttttatacttgtttctacaattctcagtacatcatattcatcttgattattatgttattatttatttatttaatgagtgtttaccatggttcttcaagcagtcctgccactgggaacctaactctcacactaaggtggttcagagagaggactgccgtaaatacagaatttgcccttgtagacaatgtggagacaaagcagatgggaggacctgccttgtttgtgattcatgtgaggagatgtatcacatatcctgcattaaaccagcagttgaagagattcccccgaaaagttggtattgtgccacttgtgctacctgcggaattcgttcacagcatgagaaatgtgtggtgtgcgagaaaattaaggagactgtggtcaagggtgttggcaatggaagttcctgtacaaatgaagccacacttgaaggtgatgattcaaactgtgttacagatgaagagagaaccatggaaaagaggaaaagggtagagcactgtaagatttgtaatggtgcgatacgagaaggtgacaacataaagatatgtgtccattcattctgcccctgcaaactctatcatgcaaggtgcctgacaaagaagcagctgaaatcatatagtactactggttggtactgcccttcttgcttgtgcagaacttgtcttactgatagagatgatgaaaagatcatcttatgtgatggctgtgattatgcgttccatctctactgtctgcaaccaaaactgactagttttccagaggggaagtggttttgcaattcttgtaatgtgaaattgcaaacaataaggacagcgaaaagggcatatgagagttcttcaaacaaacagatagtgcaaggccatccaagaacagtgacatttggaagccgtggaaagttgaaacgtaaaggaaacatgggatcagataagagtggaggaggaatggagatgctattaagtgcagtcaatacacttcacagctatgaaacagatatggctggcatttaggtaaaaattactagacactgtttcgggtacaggggatactctaatttccagtctcatcaagtaatgtctcagtcactctttgtttaggcgtacatccttgtagtaattttcactagtttccccttgcctcgttcattggagggctgatatttttgtaggttgtaagctgagtttgatttgccttgacctttttctttttcatttgtttcttgatacacgcatcttagggaagactttctctccttgttgaagtcaaaagggtatgagaatcactaattcagactgatatccagtttaatatgcatgtttccaatactgtaccatacaagtacatatatctttgttttcaacagctatcagaagctaatgttgtttttttttccttttccattttttgtcagtcaatcttgtaaaatgcagaaaaaccagttattgaacagcttgctgttgataatcaaatttaaggacatttctctttcttctattcttatgtctcttacatgattgaaagtgaaatccttattttcttttcttaattgactattaaggtccttcacttttagtaatgaatttgtctttttaatgttgaacactttgaatggaattggttttcttcttcttcttaagtctgaatcagtgattacttagctaaatctgggcttccaatgacctttacatgtgaggcctattacttctacgtgtatgaattttggtttagcttttaattggagtggttcataacgagcggaggtcattatatatttacatttcacgagtttattatgtcaaaagtgtagcacatataacatttagtgacacctaaaatgtcatcacacctaaactgtgtaatttaattaaatatgagaaaaattctctttttcttttttttttttctcaattctgttgattttaattctgtgctgagactctcctactaaatgaaaatctgcaaactcgttcataccctaaatatttttggtgacctgaagttagattttttcatgttttttgctcaccaaatcttcataaatctattcctttatgtttttaggtctaatttgggctaaaacccatcaatgtcgacgtcggagactcggaaacaatgttattgagttgagtttaattttttgtacccgttcatacctgaaattttttgctatatataatttgtttttgcaaaccaacttcatgaatcacttacggcggtttggtatagcttttgaaaaagctaaaagctcatttttaaaaaagttctgataaaaagtattggaaactcctataattttgtagtcaatttttttttttttctatagtcatgtaaattatagttatttaaggtatcctgcaaaatttttaaaaattcgaaaaagtttaacacgtcaaaaattgtgttcaagcagtacgttgcagcgtgactattttattttatacgcgtataaaataaactatttgaagattgttttctatattgtaaattattttgaatttcttaaaattgtgtaggatatcttaaataacttaacgtacatgaatatgaaaaaaaattagactaaatttttttttttggatgccaaaataagtagagggtgtatcagtacatcctttttaaatggtgcattctagaatcacccaaaagtattttgtaagtagttagaaaataatttattgaaaaatttatggagaaacaatatctaaaagatggtacaacctaactttataaaaagaattaattaaaagactataataaattattatgtaccaaaaatatatttaattatttattata

SEQ ID NO: 243552 - DNA, 3151 bp, Cannabis indica
acgcccgtggggtgtgtagaagagagagttagggtttcatacttagagcttaagagctttaggtgagcatagagacttagaactttagaattaggctaatgctctttagatagtagagcttacatgtatattaaccactaatattccttaaaaataggtagataaagctatatatacataataaaataataaactttaattgactaaattattcctcaaaagtagggaagttgctgatatttttctctatttttgtgggttgttggctcaattcactgcttaacttgctgtccatggatgaaggttgcgcaccaaaggcctgccaagcaaaaactggtcggccatgcacctgtaaggtgcaggctggccagccatacaatgcatgcatattggggtctgactagccatgctcctactagggtctggtcggtcatgttcctgccagggtctggcaagtcatgttctggccagctttggcaagtgttggctagccgttgtataacttttccttatagaggtcaagcttacttagttgaacgaacccctcctttgtctgaaagttacctttagtcggccaacttgtgcccaaaccctggccggccatataagctcttcttggttggcctatatactccctttaaccgaccatacattattttgcagcttctttacggcttgcttaactcctcttgcttgttgcttgatgattctgcgatgccttgtaaagagactttgttctactattggcaaggttgtattctacatgtaatgaccgcattttagaatatggattagtaaaggcaattagcgttaattattgatatttctgtaaatatttatgaatttatttagttgtgggttccatttttagaaatgggcattagagttgtaatttctcaattccagagatttcattaaactttagatgtattatttgtattatatgtgaattatgctatttttataatttttgctcgacaacaacgaaaaatacgatggatggccatttgaatcacatgggtaagtctagaaccttttacttagtgggataaatatttgagataaatagaataccgggtttaagcggggttgtaattttggaccattttacccctaggctgaatattgtttatgttttatgtgcaagggtatgttaggtatttggtaagaggggtatgtggctgaatatttgggtgacacctagtctttttatttttatttttagcctagtttaattaatttaggcgtttatcaagttgaagaaaaatgtcaatacaagaaaaaaagtagaataacactagaacgtctctttctctctttctttgttcggcttccacaagaccagaaggaaacccaatctagcttctatttttctggatttctacaagaatttaagtgttctcaagttgaggtattccctagtagctcttaccttgtaattatttatgttttaattgattatgttgaagtaattttgaattgaagtggctgtttaggttaggtttgccctagggtgttttcagaagctgttttaagttgaatttaactaatttttgttggattttctggtttgtttgtggaatgggcaagtttgagattgtgagctcatacttggctcattaatggtagaattggattcatgagttgtatgatgcttttactgcttggaatatattgtttgaggttattataggtgttgtggaaggtttggtatgttttggatacgaatcggacaagggtttgaatttgtttgggttacctggtgcagactggttaaccggtttcacaggccctgtgaaaccggttaaccagatcgaaaccggtttcccaaattttttgtgttgtcgattcatgttatttctagtgtcttagttggttatttccttggtttttggggtattgttttaatagtgaccaatagtagaacccttagttggggtttggatttcccatattagggttttgtaatgttatttacccatatgcgtgaatgtggcttagggcatccatccagcacgaggttttctgttcagatcgaccaactcgcttgaatttgaaaacgaggcaagaatagtatcaaacatattgtatatgcgaatgtatgtatgtgtggtatatatacatgctttgttgtgattgtatatgatttgggtggtatcataacggcgcaaccattgtgttggttcatcaatactggtatcgcactggttaagagtggtactcaccctaaaaagtattaattgacgctatcctagcggcacaaccattgtttcggttcaacagtacatgtatcgtacaggttaagagtgatatcatggccaattatacttttgggtagtattgatgctatcatagcggcgcgaacatagtgccggtcccgcagtgcgatcatagtgctggtagtgggtgatatcatggacagtagtaccaattgttaagaatgttcttaagtcatctagtaagccttgtggataggtgtatgggcgcctagacataagtcgtgattatatgatttgttgtatgcttttcttactgagtctgttgactcacatatgctacttccatgtgtaggtaagggaaaggcaaaagctgaacatgagtgagcaccggtcttggatgaagattgtacatgtcagggcaatgcggcctggagtgttcggtctcagtacatctggggtttttattttgtagtcacggtgcgacctgacttttgtatttggaatattttgtaaaaagttttactacgggatcccgacttatgtaaataactctataaaagtttattaagtttaatagttgaaatcaaaagttttaatttaacaagattttcaagaaaaaccggaaaatcactgtagcgcgcctaatcatcaaggcgttacactacatgtcctcaatcttggcttacgtggacatgccacgtgaggaagaaaaaaattgggataatatttcccccttaagtttttgttcaaacatctggtcagatagggacttcctcattctcgtcttgcttgtagtagcctctgtcaaacaaccttctctagccaagtattagctttttgcatggcatgcttttagatcttctctctccatatatgccccatcttctcttctttgacatctctttttttaacctgccattgataagtttcaa

SEQ ID NO: 243553 - DNA, 5041 bp, Cannabis indica
gttcgaggcatttacaggtataaggtctttctataattcatgtaaggcctacgcagatgggagataaactttctttcatgttcaagtgttattctccaatgttattttgtcatttcaggacttgcaagaatcaaattctttgttatttttccctgttcttcgtataggggccaattttattttctctctattaccatatttttgggttttaatgcaggaacaagtgatcctttgggtaagaaattaaacaactcgaaaactcgtctggaaataggctgggagccaaaataccccagtttcgctcagttcctggagaccctttgaaacacttaagcccgatattcggtcaagttggatacttttaaacatagttggcctagtaggtaatgatggagctgcgaaatctcttacattgattgaccttctgttaatacttgtttcagtgctctcacaaatgacttcaacaattgttatactaaaaattgagttacttatgtgaacatctttctgtgtctatgtgtacatgaaatgaaactaacatctcttgtttttcaaaagtctttaaatcttgaggtattctcatacatgtaaataagaataatctcttactcaattaccatgtatggttatgttcctttcataatcatagatggaatgatttggttttgtagttagtaaaaacagggagtgaacaacagcttcagactttaaagtaaagaagtgggattcctctcttatacagacatacttgggatttacttaacaagcatgatttaagttaatgatattgcttctaagatttactgatgtagatgaatcatagcactgtaggattataattgatagttacccaataacttggtggagtctttgtaaagacactaagaaatcttaaagttttagtctgtgttctggattaagatctccattgtattattgtaaacagtattggcttatttcgctttacgagaaattttttacttgtaataatttatatcccattgagaaatttctgtctttctttagaaagaaagaacagaaaaaataatatataaaaaaaaattgggtttagaatgttttaattgcaacagcccaagatgttaactttttaaggggataagatttgggtatctttcataatagataaactaaacaaaaaaattaggcaagtgcatacttaataagcatataaaaacatagtagtactcaactgattggatcattttgaagtctcaaccactgctagggccaccccaactataatattcgactgaaaattatatttaaggagaagttacaagattcccatgtaaacaaattagttattgataatttgatgtcattgtcatatgtagaagacatgttgttgattagttaaaaaaggtcaatttgctcaaacaaccacttttagaaactttcaagtgtcaactaggaggggcggtgtggtggtggtggtttagttaaacacttgaaaatgtagcatatagtacagttcaacatttggaattggaagttttttttaatgacaaaatagattaaaaaagaaacattatcaagtcaagttgactttggtttagtatggtggtacctagaaattatgcaaaacacttggtcatatctttacttcattaaccaaacacaaaaaagtttgtattgactttgtgttgttgtattgagagaagtggtttagaagaagatggggaagctttgttgttcatcagaagatgatggacttgatctctctggagttctcatagtgattgtcttagctcttgccatcatggccgtttgcatgcctcaacagcagcgagttgttgcggtgtatcgctgccgccggtggtagattttctttcctgtttgtcttcatcttctctccttctttctctttaagtttctgtatttttccactctaggagatggtcacaatgattggattcttaggctcaattagtctgcaatttttgagtcctaataaaagtctttgtacttattttactatcttttttaatttatgtctttttttctttctaaaatacaataaatataattgtaactttgtcatcatgatgttcttttactcttgttaaaaatttcattgaaagaaaaaaaaaatgtatatcttggatattttatactacacaataattgattatttcttttgctagtgcaaatcaatgaggggtacctaataataaaccaattattgaattttattaatttatctgaagtttgtgtgtaggaattcttctccatttttgctataattctttgattaaatttggtataaaaattcataattaaaaaaaacaaataaagaaatcgcctttctaataagttattaattaaatcatatgccaaagtaaagttatggtcattcttcgtcttgctatttctttttttgatgacaaaagggaatgaaaaataagaaatattttggagaatttttatgaatgaaagatatgtaaataataacttctacaaattaaagaataaaattaattaagtctttgtatagttatttattttttcagtttaatgaaattgaccccttgttttaagtggttcactacagaaaaaaaaaatattatatatatatattaaccataacatagctggtggcaaatatattcaatcatttacaaggaaaaacgacataatttacacattattattcatcatgaacgacaacaaataataacacttttgtttttttttctaatagaatctcatctcacgttatgaaaaaattggatactttataagaacaaatcgttttaagttaaagaaaaggaagaagaaagaataagccctaaagaaaatgcatgtcgtttgtaaaatattaataagaaacgacatatcgtttgtgacacaaacttaataagttgacttttaagttaggctgtttacaagtcaaaacgacacgtggttttattattgcttcatgtggtgggattctctgcatgtcaaccacgataaactctgctgtaacacacttccgattggtcaaaacttcttcttttagctcaaatttctgatatttccccaaaaaaaaataatttcagagagaaaaatgaaacactgtgagagttactttcagaaatcgcttcccaacgatattgccctcaaaatcgcttcttcacttcaggttcatatataatgtatacatataaatataaatatgcatattcatatagttttcatataatttcaactgagttttgtttttaagggtttggaactgtgttcactgggtagttgttctcgtttttggagggagctatgcaagtctgattgcttatgggaatctctagctaaagaaagatggccttttttgggttctcttcaactccaaccctcctcttcttcctctgctccttatatccctaatttccaggttaggttttttttttccttccttgaaagtgtgttatcgatgaaaattggtttattgggtcattttaatttgggggtggaaaattggttttagggatggagggccttatacatccagagacacaatgaaatggcgggtagagcaatggaggtattgaaattcgtggagcaacgttctttatctggttctcttggagttggggactatttgaaagcaattgaagatttgcacgtaatgcaatttcggtttaaagatgttgaattgttgcttttcaaacaaagcttaatcctttatttaacttggtcggtttgcattactgcataaattggcttcgagtaccggtaaatatgttttgttgagatcataattcgattgtcatattatgtctttgactttattttagaggttaagattctgagtaacttaagtaacatgtttgtgcttgatggttagttgctaaaaacttaaagctaaaatctagtatcaacattgcttaattattgccttattggtgttataaagtagcaatttttttattatcttatcttttctagtattccaaacatgatcttagtgagtcaatgtaaaacattatggacctgaatatgcagcctaataagttgcctaattcaaccaggctcatgatcatgattatgatttttaaagcatcttgtatttgacaggctgagtatgtacttgaatcacttgagtgctgtaagatctcagatagggaagtgtgtgtgaagtggtggaagcttggaagatggttctatggctttcgcatgcgcgatgagtcacgttttcgcattttctgtatggcagattttgcaatggctaaggaagaagaggttcttgcagtgctccatcgcggtgccattcatgaggtaatacgggttcagatttccattgttgattcttcagacattccctggtatcatcagaacactctgaaacaaggttaagtaagtgacctattagttatgcatgcatctgcataactttgttgtttattaatggattttatgtaaatttgtattgttgtatatatataaatataaacgctatgaatacaagcctgtgtatcaataaaccaaatatacttgtatagtattttctttgaagaggtcaatggcttctttattctcactgcaagcttcctcttccaagcttatattgtaacaattagggaataaaatgtatcagtttgtatgctatgttgttatctaaaataaaaattatgaactctgtcaactgaagggaagaaaggacactaagagttgtgtttggagttgtaatgttatgtctagttggtatgttagtttacatgcttgagcttaaattgttgttcattataataagcttcttttttgttaacattagtggagagtaatacgctgcaagcttatggattgatgaaaatttagtgaattttaatttatgcattatttgttgatcatgattgggtaagcatatatgttaatggatttgagtaagtttggatcaaaattttgaattgctgaaattggttgaatttggtaagaattatatgtgcatattatttataattttgaggtttgaattgttgttttcgacttgaattccttgttagtttttttggaggttcttagtagtgtttagtgttctttg

SEQ ID NO: 243554 - DNA, 4818 bp, Cannabis indica
gtctacctccgatcctcaggccctgccatgactcctgcaacacaagctcctcaagcacctgcctcacaacccactcctactgaatcctggaatccattttcaaattctttgtcctctctttaacaatcaaactcgatcgtgtaaacttcctttcttggaattcttaggtcattcccactgtgattggacatgatctcgataagatcttgttcacaggagttcctcctcccaccacactgctcaatggtaactagaatcctgaatatctccaatggagacgaaaggatcagttactcttatcctggttacgttcatctatgtcagaaaccattcttgcatctgttgcaaactatggtacatccttttctgtttggcacgcacttgaacagaagtttgcttctcaaaccaaagccagacaacttcagcttatgggccaattctcacatgtgcataaaggaaatcttcccatctctgatttcattgacaaagtgcaatcgattgctgactctctggcgattgcaggatcccctgctgatgatcaagatttaattcttcagattctaaatggtctcggaccagagtttgattcagtggtttcaggtataacatcaagaagtgacatcttgacgatcgaagatgttcaagcccttcttctatctcacgaaagtaggatcgaacatcatcttgctatgaatgatatcactgtcaaaatgcaggcaaacatggctcttggccgaggcagatccacaggtgttcgatcatttgccaacaacgattagctaacaacatcaactggtcgaggcagaggtttttctaaatttcctcatcagaaagttctgtgtcaagtcggcatgaagattggccacactgtagccgtgtgtcattatcgctttgataaaaactggacaaccccaaaactaggtaacaatcatgcctttcttactgagattgactgtgattgtgatcctcaggcctatacaatcactatgatccaaaactttggagaagacaactcctggtactttgattcaggagccactactcatgtcacctttgattcaggcaatcttgatgagtctgaacccttctctggccctgagactcttgccataggtgatggtaagatattgtttatttctcacactggttctgtctctattccctcttatcataaaaattgtcctttacatttgaaatctgttttaactgtgccttcgattactaagaatcttgttagtgtttctaagctcactcaagataatgatttttcttgaatttcacaaaattattgcttgtcaaggacaagaaaacagggtctgtactgctcaaagggaaagctagagatggcctctaccttcttggtgattcctcaagtcacacaagctcttctctgcaatgtcaccttgctacttctgagtctttttctactgattgtgtctgtaataaagattgtaattgtaattcccagtgtgctattagacaccaattttgtaacacacattcaaccaataaaagttctttttcttgtcccaatgagcaatctatttttcatgcctcaacaccctcagatatcagcctttggcactacaaattgggacatctagctatgtccacattgcagaagctactaccaaccataccacacactgacactttaaaacaattcctgttttgcaatgcatgccagaaatggaaaagtcacaggcttcccttcaccagttcctcaaaaagagccacccaaccactttcccttatacatactgacctctggggtccttcttatgaaccctccaaagaatgatttcaatactatattcatttcttggatgattatagtcaattcacttggatttatccactgaaattaaaatccaaggcatttgaaatgtttattcaattcaagagtttggttgaaaaacagtttggcttaccaataaaaagtgtctaggcagattaaggaggtgagtataaaccatttgctaggttcctagctgatcaaggtatcttgttttctcacccttgccctcacactcaccaacaaaatgaccgagcagaaagaaagtacatgcatatcactgaaacagggctgacacttttggcacaggcaaaattggacttcagctactagtggcatgcttttcagtgtgcaacttacactataaacagattgccaacccctgctaatggtaatattagcccgtatgagtgtttgtttcacactaagcctaaatattctatattaaaaccatttggatgtgcttgttggccacatctaaggccctataactctcacaagttagagttcagatctgagaagtgtttgtttctggggtactcacctgtccacaaaggctatatctgtgaaaataaaaatggacaagtgtttattgctcaaaatgtcattttcaatgagacacactatcctggcatgcctcaccaatcacagactgaacaggtaactaaggcagctccttcctttactcctactgctacatttttaactaactcatgcactaatactacgcctgttggtcatgtttccccaaatactgagacaatggttcccccaataccaactgtgtcaactccagcacctcttgtgccccatatcttacaaccaataccagaaaactatcctttgtctacactaaaccctgccacaaacactaaaccattgtacctgactctataaccccaatagacactaccaatgctattactctagccaatgttgaacctgtaccctcccaaacagacattccacctacaaacacaaatccttcaccctctcatctaacccaaaccattgtctcagtccccacaagtccaacaattgttcagaactcacattaaatggtcacaaggtccaaaaatggcatcactaagccaaaagcctatctttccacaaagcatcctctacccgagtctttactgccatctaaaccaaaatccttacaatgggcactcaaagatcctcaatggttcaattcaatgcaaaccgaagttattgctttaaaaaaggctgccacatggacattggtacccaaacaacctggcatgaacattattgataataaatgggttcataagatcaaattaaatgcagatggatcactcgacaggttcaaatcgagattggtggcaaaagggtatctccaggctcttggaattaattatgaggagaccttctctcctatggttaaacctgttacagtgcgtactttattatctttggttgttaattcacattggaaagtaactcagcttgatgttagcaatgcctttctcaatggattgctaactgaaactgtgtgcatgcatcagccaccaggctttattgatcaatcaaaacctgaccatgtatgtcttcttcacaaggccctttatggtcttaaacaggctcctagagcctggaatgacaagctaagaactagtcttattcaatgggatttcactagttcaaaatctgatgcatccttgtttgttcatggttcgggataccgacttattatactccttgtttatgttgatgacatacttgtcacaggtcccaaccagaaccttattacacgattaattactgatctcaacaaggagttctctctcaaagatctaggtgacgtacactattttcttggagttgaaatattcagagatagcaggggcatgttcttgtctcagaccaaatacattactgatctattagttaaggtacatatggagggtggcaaagtgtgttcaaatcttataagcaacacccctaaattgttcttacatgatgcagaattgtttgaggatcccactctttacagaagtactgtaggagctctgcaatatctctccctaacaagacctgatgtggcttttgtgataaacaaacttagctaattcctcgaagctcctactgtgtcacattgggaagcttgtaaacgattactcaggtaccttaaagaaacaatttcagatggtttattgctcaaaccaaccaaagtcttggccttgcaaagctacgtcgatgctgactgggctagctgtatagatgatggaaaatccacgggaggctatgttgtgttccttggtgactatttaatctcacggtcagctaagaaacaaagtcttgtggcacgttccagtactgagagtgagtttcgtgctctagccaacactgcagcagaattaaaatggattgtttcattactcactgagctgcaagttcgcttgccccactgccctattatttgggttgataaccagagtgcgtctaccttagccgctaacccaatttttcatgctcgctcaaaacatatagagatacattttccctttatcaggaatcggatattggccaaaagtctatcagttcgatatgttcccagtcatgaccaagtggctgatatgctcactaaaccattaactaaggatcgattcatatatttgaagtccaaactgaaaatggctcctacccctttttgtttgaggggggatgttaacacagctcactaatcctagttagttttcagttagcttagattagttaaatgtgttagttagttaatggttgttaattgatctgttatgagctaattgctctgttttgtacttgtataaatacaattcttatcagttgaataaagtgagcttctttgcattttctctgtctttcttttcttccatactttctttctctatagtaatgatttactttcataaaatatggatttaaaacgatgtttgtgttgatttggatggtttaatgttggtttatgtgcataattgatgaatgtatggaaatcgcaatgtatattatagaatattttt

SEQ ID NO: 243555 - DNA, 2160 bp, Cannabis indica
aacaaataaataaaagactagtgttgataggtgtatgcgtgggttaaagaataatgtattgtatgttatatgtatagcgacgcagaagatagatacaaaaaacatgcagagatatatgacacgttattattaacaaaataataataaaaaaaaaaaacatacaaaactacaaataaggaaaaaaagaaaaatcatagtagtgaaaaaaaagtgatatttgatcatgtatcaaaaatggagactactttgtcaaagaataagaggagtgctttcactttaagatgctatatatgataattatttataaaatatatatgacttggtaattataatgttgaacattaattattattactgtagctaataataagattaatgataatcatatgtttataaggtgttgttgggtggatataggagagaggaccccaccaagcatgttcctttgctttgggctttggctatggatggattgggttatcttcacacttgagacacacactctttctcactctctctgtacaaaagaaaaaggagtgatccacatatatcaagtatggtggataagcattatcacaacaccaacattgcacccaaaccaaatcctttctatctttattttttttagattattaaagcattggctttaaaagaaaaacatattattgttacacgtgtaaagtaacattgtgttgttgttgtagtagtagtagtagtagcaaagctagctagccctaaagactaaagatatataatatatgtttatgttctagaacataataatatgtaacatttgtaagattgtagttttaattataattaataaatgggtgtgtgctgtaacaatttttgaattcctcatttgggttttctatcatctatttctacccctaatatttttggttgtctttctccaagggaggtgtggactttgttatttaagttttttgtgttatatattttaagataaaaaaaaaaaaatctacccttaataaatatattttctatagtgaagagttacttcaaagtttcctactttatagttttagattattatagttttgcataataatttcttttgaaacatatacattatttatttttatttttttttgtaaaataatctctaatcacactaaactccaatttttttaacacacatctaaatttttaacacatttgcaaaaaattgtcgaaaaaaattggcaacatgtttttttaaccgtactcaaaattgctatacatgagcataaaaagatggggatgagataagtaatcacatgtttatgtttactttaaaaaaaataacttaattttaatatggtaataatcattttttataaggattattaacattatgtttaagagattgattaaatacccctaattgataagctattattagttccaaaaaaaaagagcaaacaaaaagttgttttgtctacttttttttgtgcttttttttcaaagaaagattcctttcttattaccaccattttttttttattaagaaccagacacttaattaatttgttatactgattaatcaaacttaagaacccttttacacattacatataataataatgttttgtaactggtcaacttataaatttgaagtacatacaataaaaacaaatagtcaaaaaccaaccaaccatacatttcatcaaacattaaatactctcagcaatatatttttttcatgccttaaatgaggattaatgggccccctcacatatcacaatcaaagtgactcaattctaatttaactctggtcacattagcctctgtcactaaaaagtctgcatttgtaattgtatttgtattaagctaagtattaattcttcatttaaatttctaaagagaaccaaaccaaactagaatgatgacagtactaagaatatccaatataacatgcatgtgaatatgaataattgaatattattataaaaatcactgcttaataattttggaccagtgcacgtgcttaaacaatacaaataaatacatacattcatatataataattatatatataatgtcatgtaagacaaaacctgtttaccacccacaactgtattccatcttttcttgcctccaatttttttttcttttcttcactttattttgtctttgataattcatttcattctcttt

SEQ ID NO: 243556 - DNA, 2905 bp, Cannabis indica
tgacgtactcgtgtataagagccattcattccgttacatattcagcaagaaaataaagtatagatatcaaacaaacattacacttatgcatccaagagggaatgctattatcaaattttatatatatgaacatacataatcctcattttaggacacaattagtcaattactagggaaacacatcccaccccatttacattttctttttggatgttataagcttccatcctcaaacacttgacctatatatataaattccaattcaacaaattaacaaacttgttgacttaaaaatcaaacccttttcatgacttaataatataagttctcaaaatttcagtaattatatacaacattttcccgtctaaatgccacagcaacgacatcaaactaggtggtgggcatcttttttttaagagttcacagaccaatcataatccttgtatgaaatactaacagggcctccatcacttagaagatgcgacaaaagaccagctttagttgcattcaagtaactcataagccacttcaagatttctttctcttgtccaaaatcagagctgaacctgaaacacaagacattatgccaagattaacataactttattattcatttctgtattgatataatgatgaaattagtgagaaaattttgcttaccacttgatgattcgggtgagatgaaccgttctcttatccaaatcaacctccattccaataccctgaaagaattctcttgctgcggttcttaattcagtttcgattccttgaggtgagaagaacttaactgtggggcttgacttcgtcccatcacatagtccaaagtgaatcaaaggatttactttaggaagaacaagctaaaattttaaaaatagaaaacatggcatgagtatatatagcccgaatctacaaacattttaaaatagaaaatcataacgtataatgatgctggtaaatgttgtttttacctctaaacgattgtctccggaaccaaaaggcttaaccaaggaataaggaggcctacggttgtttcttataattccatttttgatggtactaagtgaatagggatgtccaccgactatgtattggaactcggagaagaatttcctatccattattccttctgggcttcctgaccttatgactgcatggatcaccatggcattgtacaagttaaggaagaaggctagcctctgttcggttgtgaggtctacaaggtttatccggtgcagctcttgggttaagtttacatatctgatatcaggagagaaagaaaaaaggaagacaagtttaaagaattgtcaatatgatatttattttattacaaaggaaaaaggaaacataattaaaaatctcacctccggaattcctcactgttgcttatgccaatatactcaacactgcgtctgtcatcagaagcataggcctcaagtattgcagacataattttggtgagcttttcaccaacttgggctgcaggcttgggctgatcatcatttgttgatccccggaagttgaagcatttgggaataaacggttcatgttcaaggaagcggtagaaatggtttccatcttcaaaatcattttctctgcataaatatgtaacagagaaacatgaatgactactgaatgtttagtctctaaagaatgacttccatggcaggagaaattttcttacccaaagacgtgatggatgaagtgctttttggcaagctgctttccaatctgaacagcctgcaggtgttgtagcataaaatttaatttcaagacgataaaatgtaataaaagacataaatgagactcttacaagttataatcaagcaaaataagttaagtttttacatttgaggaagccaaacgctgctcctactttaataaatacagatttcagtatgcagtatttataacactaaaaatctataagctttggttacaaaaaggggatcatgtggttacaaaaagctttggttataaactttaaaatttatattaaaatgcatatttttctaaacgattatgtatttgacccctttcatttccttgatcttagcttctgcctccattcccaaagaccaaaacaaaaaatttgctttgagttaacatttgtgcctaatcccaaccatgctccacacataaatattttatatttagacatgtatgtaataattaacatatttttcatgtatataataattaacatatttatacatgtatataataattaacaaaaagaaaggcacatttcagaatctttttgacgttatagatttttaatgaagttataaagatttgtgatgagctaatagaagttttagaaagcagaaagtagtatgatcttatcccctggctgcacaatttataattgagcccaattgagtaatatcccctttctcaaagtccacatattcctgtacttaaaaggcaatagatatcatggctgatagaaaagcgaaagtctggccatttaaacaaacccaatatgaaagcccatgtcaacgaaacatttctcatgtcatttttgaaacaatctatatacttaaatattattttcaatgacaagagaattgcatacatcccaatggctaagtcagttgtagaaattcatgatttataaaataaaattaaaaaaatgtaaataacatatattaaaagataaaaaggttaattagaatagatcgataagataaattagggtcaaaagctttacgtgcagcctacttaaacaaagagtggtggaatctgcagaggatgtggacaactactcacaaaatgttatatacttgctttcaatgataatgatattatggggccctttgagtagatttcatcaaggaaccgtgtaaactaaactcatggtttcatgggtcatgcaatgcaggcaaaggtatgaacatatatatcc

SEQ ID NO: 243557 - DNA, 1197 bp, Cannabis indica
tattggtgtaattaagtatcaaaattatatataagacactacttctaaataatactagacactactaatactcaataataataatatttaagaaattagcaattttgggatacacatttgctaaatttgagtatctttgatgttaagagaaaagttgtaaaagtgtccttacaattttgctcgagtgaatttttgggttgggtcgtgtagctcaaaatctatcaatcaacctttgattgtaatagatttgaatgattcatatatagtagaacctctcatggatgagctggagtatgccaatttattaactgatttatttatgatattttttaaaaaaataacttaaattacttgatttaaaacatttattctttgacatgtagtatgcatctatatattttatttatggaataagcctagaaaaaggggttactaacataaaactaattgtcaaaaaataaatttaactgtgttgaattttctttgagttgtgttatatatatatagagagagttatatatgtggactaagatgtatacactttatcatctcatctgacggttctgtatcataattgtgtttgatcaaataattattttttttaaagaaagagaaaaaaaatttaattgaaaaaaaaaaaagctgatataaatgtataacgtactagtgtgtcaggatatggagcacactgcatgcaattaatagagttttaaataagtcatagtaaattattggcttaattaattaataatgctaatatttttttttgttttggggagtgaatgaaaagtgtattgaattctcaatggaatgaaaagaattgaattagtttttaaatacaacacttagaatctagaagagctaaacacagaattagttagaacaattaactgaaaaactaactctgttagcagtaactgaaaaactaactctgatagcagtaactgaaaaactaactctgttaacagctcactaatagctaagctaactaacacacaatatcttacaatctaataccccttgagacggagtgtatatatcgtataactctattttgtcttggagagtgtgaaactgagttggaagttaggctttagtacatatgtctgtaatatgattcttatttgagatgtgacttgtcttaattatttcttcttgaattttttgtctaactaggtgacaatcgatttcaatatg

SEQ ID NO: 243558 - DNA, 1242 bp, Cannabis indica
gggtcatttttaacgatcttaaaagtttaagaaacatgatttagtatatgtcaaagtttaggagtataaattctaattaacctctctataaatgtagcacgaacgtttaagtggaaaatcaactaaaagttattccaattaatctcataataacaaggcttaattaatagttttcaaaatcaagtaaggaactcaaatatataaagactttatagagatcatgactgatcatgcaaattaatgactattgaaatcaaagaaagtaataatgcaacaaaattaatgattaaaaagcttgaaagttaaaaatgcaagttcccaagtcaataacatgaagaatgttgctcttttttcaatcacagagagagagagagaaagaggcttatatatttatatttatatttatatatatagatgtatatataatgtgaaagctcatctaccaaaatgatttagaggtttgaagataaatagaaaatagagaataatttcaatgaattaagaaggtagctaggcagatgttgcacctacagacatcagcagttccctaccaaaccaataatagaagtttactaattaaatacaatcattcatcataaaaatcaattattcactctaaaatctgcccattcatcatgcttcatcttcatttcttgtcatgggctttgttttttttatatatatatgtaacaaaatatgtttatattattataaattatatatgattatgtaaattaatgtatgcatgtagcatgggagacagtggaattcccaacattttttaactcatgaaaagactttatatatggaaggagtcttaacttggcttgtaattcaagagcatgaacccacctaataataatcatatataatatcttataataataaaaactaccccataattttgtgataattataataatctgccatgagatgagactcatctcttcatcccaatcccatcttcgatttataaaaaagttacacatagaaggcgttgtcttcctagttgcccaaaacccattaaataattaatgggttaattaaacattatactttataggaatgtcttaaataattatgttgtataagatcatataaaatattaaaattaaaattatctaaattttaaaaatacaaagaggataaatcaatgcacttcttaagcaccctatactttttactatgtaaaagaaacatattatacttttgtttagtcttatttaaaaatatattgtattt

SEQ ID NO: 243559 - DNA, 2560 bp, Cannabis indica
gttattgtgttggtatgatattactattagtttaatgttaagcaataatcatgcttccatacagtagtgtaataagagagcaacatgtaaagtatcatctctggcattagagacttgagatgagaccttaaagtcaaaggtttcaaatttatagttacacacaaattacaatatatatatttttaatagcaaatacataatcaaatactacacatagatataataatattaagctagatcctactccaataaccaggtccagaaggagatcccatggttttagcaatatctttcagaacatatttctgaatcttcccagtggaagtcttaggaagttcatctctaatcaccacaactttaggaaccatataatgaggcaacttctctctacaatacgccactatctccttctctgtcggtctaatcttcgtccctttcttcaccgttataaacgcacatggcgtctcaccccagatttcatcgggccgagccaccaccgccgcctcgtccacagccggatggccgtaaagaattgactctacctccacgctgctcacgttctccccccacttatgatcacatcctttgacctgtcatctccaaatacccatcagggtgcataactcccacatcgcccgtgtaaaaccatccatcctcctttatagccttagaagtggccactgaatctttaaggtaaccaagcatgacacaaccacctctgaccactatttctcccatggctaaaccatctctcttcacactcactcccgaactcggatcaatcacatcaatttcagccatggccggtgtcttcaccccttgtcgcgcctttagccgagcacgctcgttcgcgggtaacagattccacttacttttccaagcgcaagatacaataattccagccacttccgtcaatccatacccatggctgacgtgaaacccgagcgactcagttcgcccaagcaccgccgcaggcgggggagcgcccgctgttagtatatgaacagggctcttgagaatcccaacattaggagtgtttgacaacatgttgagcaccacaggtgctccacacatgtgcgtcacatcatgccttcggatgaggtcgaagatcatctgaccgtcgaatttccgaaggcatatgttggtggcgccaactgccgctgtcccccacggataacaccaaccgttagcgtgaaacataggcagtgtccataagaacaccggctgtttaggcacactccaatcgacgagtgtgtcgagtgtgactataaaaatcgctctatgacagtgaacaactcctttcggagccgaagtagttccagacgtgtagtttagtatcataggctcccactcgttcactggctttaaccactgaaatttaggatctcctctttccacaagattctcatactcacaataaaagctctcacttagctttgaagatgatgaaacagcgtactggtcaaggatcaatacgagccgagggattggagtgtttggtgggaaccttgagatggcgtcgaggattaacttaactgagacttggtcaacgaagacgagcttggattcagaatgaagaagcatagctgaaactattctagcatcgagacgagtgttgatggtgttgagaatggctccagccatgggaactgcgaaatggagctcgtacatggctggaatgttgggagagatgacagacacgacttgacctcgcttgactccaagccatgttgctatggaggaagccacacgaagacaacgggcgttggtctgtgaccaggtataagtggtgcggttgtatactagagaagggcagtcgccgtagacgatcgccgccctttcgaggtagccgagtggagttagaggagatgagtttgctgggtttggctttaaattttccattggttagtttgggctgactcgtcaaggtagctagtttcatttatagagacattaaacgaaacactatgaccttggaatataataatgtgaaatgggggatgcagtacaatttctttcttttagaatcattatatatatatttatattattgaaaataatgtcatcctcagttttttatatatagaaaaattgaagcaggaaaaataaatgacgttcctcgttcattctgagaaattgatgggcagtaatttctcatccaagaaaaatgaagtaataaataataactattagtgcaataataacttttaaaaaattgataggcactaagaatatgaatttctaaaaaaaaatgataggcactaagcaaaatatgaatatatgttttgcattcatattcacttatttctatctctcgaaataccataaaaaatatgagttgaccgatgaggttcattagttttatttgtttttgggaaacggtgatgttgattaattaataaaagttatattttagtggattcctattacgtcgtatgctagttgtcaatatttatttatttaaagtggagccaatctcgtctcataactttctaatattttttccttaaataaattaaaaaaaaaaaactaagtttcaattatctatacatctataaat

SEQ ID NO: 243560 - DNA, 1891 bp, Cannabis indica
tttttttcttattattattttgatataacattgtacaatattaaacttagttcacaactcttatcatgtccttacaatatccaagttgtaaaagggtttcaacttgtaataaaatctagttcagttcaagctcattaagcagcaaaagaactggacaaagtgtctataagttcaacatatataactgtcaaaaaaaaacaaagataaacaaattcccactctatgatcatattagctaatctgttcacctatcaagtccaatcccataacaagaaaagataatccctgaaaaagcaagaagtaaaaatggactccatgagcagataataggcttctagctgaggcagtgagtaaaagaaaagcaagaacaagctccttcttgtaaagtttgttggtcttgttcttggaaggcacttcaattttaacttcttgttctttgagtttacttagaagttctaaaccggattctgaatatctcctcaatatcttttcttcattggaagattttgattccctttctgcaagtgccaacaagtctgattcagatgatcttcctgtcttctttgtaaccacccattcgtaggcgctcccgagttgaaataggcctgataccatggcattgaactttgtcactgacattgtgttttcaaacagaaggtatgggaccaagaaagggaatgatttaggtgctggtagaatgttgagaaatgacatgaaaatggggacataacagattacccaaagaggtaattcagcttcagggatgaacatggttaatgggagaatgatacagaacaatgtgaatgagtaaaagggtagaattagcttccttagaagaaagaataggaatatcaagttggccttcttccacaatgatatctgcacaaaagtaaaaatcaaataagtacttcttttcatcaaaatatacaattgagaatcattatcataggtatcaatgtggaagaaaaatatgatgaggttaagaaccttggaagttatgatggaaggaaggcataatctgaagagctgcattggacccgaatgccatctatgctgctgtttcttgtaagcttcataagactctggaacttcacatattactttgacatcattaaggaagacaaatttccatccattaagatgagctcgaaccgcgatatccatgtcttcaacggttgtcctctcaagccaaccacctgattcttctaaggccttaattctccaaactcctgcagttccattgaacccaaagaagttgagaaacacaccattcacttgctgctcaacttcaaaatggaagcacaggttgatgttctgtagccttgtgagtaaattctcatccttgttaatgaaagaccacctagcttgaacaagtcccacatcaggctttccctgcataatttttttaggacatgttatatagttgatcaaattaataaacataaaaaatcactttctccaattgggtttcttatgaataatcaccttgaagtgaggaacagtttgtttaagaaaatcagaattgggttggaaatctgcatcgaaaatggctacgaattcatagtccttgacataatcacatgacattgctgatttaaggttgccagctttgtaaccagttctaatcaatctatgtctgtacacaatattaacacctttctggctccatgaagagacttcttctttgattaaaagctgtactgttccatcactcgaatcgtctaatacttgtattagaatcctatcttttggccaatctaactgacaaactgctgcaatggattgtgcatacacctatatacattcatacaaagcaaagcaatatgagattaagttcaaatattaaattcagtggaaaaggactttggtatatttacttacctctctttca

SEQ ID NO: 243561 - DNA, 3338 bp, Cannabis indica
tcattgttttagaattcatattcggatgttaatcaaacatacttggtagtaaatctagatcctggtaaaataattccaacatctacttcccatgcctaggccttggctagagttttcaagaaattgggtgccacccgtcaggccctgagtaaatggaatcgtcagtagtttggtaagcttgattcttacatttacagacaagagcttcagctctaggatatccaagggcggcctgttggtttaagaatatggactcaggaggttgaggtgagaaaggcccttaatgtggctttaagacggaaagccttgtattggcagcagagatcccgggtttcttggattaaagatggggaaaaatgctctagattctttttcttatcggccacaatccataataggcgtaattctgtggagagtatctatggggtgtggattacaaataaaatggaaattggtagagaattcacggggttcttgagggacatcttttctaatccgacccaaggcccgttggaaaacttagaccatctgatcactgatcacctgtcccccattgagcaagcagatatggaaagcatttctagtttcgaggaaatcagaaggacgctcttctctatatgtatcttgaaaacccttgggtcggatggtatgtctgtgcttttctttaaacatgttacggatgacttctatgaggcagttgtggacttttgtcagtccaggtttatgtatagaggattcaatgcgacgaatgtgactcttattccgaaggttcccaacccgaaaaaagtctcccagttcagacctatttcactatgcaatgttgtctacaaggtaatctcaagttaattgcaaatagaattaggccaatccttcctcggttgatttgtcctacccaagcagcctttgttctgggtcggaacatccaggatagcaatgtcttaatccaagagattatccactcctttaaatgcaggaaagggaaagaaggtttgtttgttatcaaaatttacctggttaaagcatatgataaactaagctggcaattcattgatcgtgtgctttgtagctttaaggcccctaccaggttttgtaactgggtttggcagtgcatctctacaacttccttcaacctttttctcaatggttgcaagatgagcaattttgatcccgcgtgtggtatccagcaaggggaccctcattcccctacctttttatctggacagctgacatactctctcgtatccttgaaaattccttagacaatggacctgtcagaggcttacaattgagtatggatggccctaggctctttcatctattctttgctgatgacctgatctttgtgggatgagcgaatgttgcggaggccaggggcttttgggattgtcttgaaaaattttgtagctggtcgggacagagggttaataaactcaaaacctcgatcttttttagcaacaacactgatgagagtatgaagagaggcattttaagggaaattggcctaaacaactcgatagggaacatcaattacttggggctcccgatttttaggtcccgccagaaagacactgatttcaattttcattttagataaccttatttcaaaacttcatggctgaaaattgaaatctctgtcaaaggcgggacgtgctactttaatcacatctgtggggcttgcgctgtcagtttatactatgcagaccacgaagctttccaaaaaatgttccttaaagattgatggtatggtcagagacttctggtggggttgcaagcaaggaaaatggggtatctgcttaaaagcctgggatcacttgtgtcttcccaaatctcggggaggtcttgggttttgcaggacaggggaaatgaataaagctttattggccaagtggggttgggctcttctaaatgaggaccaatcgttgtgctgtcaagttctaagtgccaagtatcttagagggaaaatcttttttgagtgctcattcaagagctcttattcgtggttctggaagaacgttgttcgtactaaagatatcctcaaaaagggggcatgcaagcttattttgaatgggaaagagattaatatctgggaggacccatgggttattcatagtagggattttgtccctaaaccttttacccatccgccggacagcttgaggttagtggcagacttactcttaccgaacagggactgggacatctctaagctctcaaatctttttgaccaggaaacaattagtaacattatcaaaggtggcaagcctaatgggcaagagggtgatttatgggtctggactatagaatcgaatgggttattttctaccaagtctgcgtaccttatccaagcccttgaacgtgctcccctgtgtagtgttgcccctgtactctaaaactccaaaattttagagcggcataaaatcctttggtggagtattctttctaatgctctacctacccgagcctctctcgcaaagagaatgcatatcgaggaggtctcttgtcccatttgtggggagggaaaagagaggctggagcatctctttctctactgtgactttgcttttcatctttggtgttcttccccttggggggttatgcctgtcttgaattctggagcccttgggattgggttaatttcttgtggaatttaaagtttataggggtggacattgataaattattcctttatgcatcgattgtggtttggagaccgcgcaatgacaaggtacacaagaatgttctcggtagcattatacattatattgacactatctcttactgttatgcagattatggttctagtttacttactctttcgaaggttgttgggtctcctgtttgggtttcgcctcatgatgactgggtcaagatcaactgtgatgtcaaagttggttgcgactccatgtgtgttgtggccattgctagggatcataaggagactattttgtgagtggctacaactttgctcagcttttcaaacccccttaattattggagaagttgtggcatgtctgccatggagaccgctgtctctcagcaccatcgttttattttcacggagagtgatttgaaaactgttatcaaggccctgacgggcattggtaccttttgaggaattgataattatgcacgtcattgtaaaagactttctacttttatgttaagttgtaattttttgtttatctccgaaacttgtaacttcttggctcataatgtggttaggtgggtttatgttaactctatttctggtatggtggatatttcgtcaatatcggttactatcctttgtaatgaccatgaggtaactttttctacttataaaacgccgtttttttttt

SEQ ID NO: 243562 - DNA, 2337 bp, Cannabis indica
ctccttaagcagacacttcaaaaatcacactaaattgtgttctatgcagagatttttcttcgtaaaacttgttcttttatggtgctgcttctcaaacatttgatatcgaaaaacagatcttcagaaacttcacttctctaaaacctgtgactctgcaagatgataggcttgttataaaaattatcggtagttatttttcatgggctatggctactcctgttgttttagggacggtttcacttgggacgagttcacaaatatttgaaccagaaggcgcaatagctgttgacacagttgaaaaaactattacaggaggagatcgagatccatctatacaaaatctttctcctagcgggagttggagactctggcctttctccttcagaagatcaagatcttggaagggtgtgaagacacctttggacgacgttagaatttctgaggctgaaaatgattctgagatcaaaagtagtagcattgttgaagaaaaaagtatgcttgaacccaagatggggaagaaaatggttagaacactttgtccaacatccgagcaactcgcatccttaaatctaaatgatgggacgaatacaataacattcacgtttatgactccaatgctcgggaggcaacaggtaaaaatgaaaattctactaatatcggtcttgaccaagttttctcatttagattttgattcttattgttttcatataactataattcatcataggttgatgctagaatttataaatggaaatggaacactcgaattgtaatctccgatgtggatgggactattacaaggtaattcgaatacatttgaatacataaaccgattacttcttgatgtgaattcaaatatataatctgtgctgttatttcagatcagatgttcttggtcagttcatgcccatggttggagtagattggtcacaaacaggtgttgcacatttattttcagctattaaggtttgtgaattctgtcttatgcattcgaattctttgcatatttcagtcaaaatatgcttcaatggctccacatgttgaaattcgctattgaagaccgaaagactaatatttgttgttctgtatttcaggaaaatgggtatcagttgctttttctaagcgccgagcaatctcacaggcgtatctactagcaatttcttgtcaatcttaagcaggtgacatattaagaactaatgagtatgaaaattcaaacactttcatatatgttttcttcattattgatcctatttcctttaatacaggatggaaaagctttaccagagggacctgtggtgatttcgcctgatggacttttcccctcgctttaccgagaaggtatataagattattttctttgtattgtcatctttaagattatttaaggtcagattgaattgaagcattttaatgaactctctattttaatctcattttctttcgttttttcgctcagttattagaagggctcctcatgaattcaagatttcatgcttggaggtttggcttctatttagacctataatttcttatttagttatttgtatgcacttcttttatcggtagcgagtctgagttttgaatgtttggccgtcattccatgttgattaagttctcggttttgtaaacagcgcttcgagggagtcatcaaattttccttttaggacccgaaaaatccagagttttaaggagtcatatgtgaaagtctcatatatctttgtattaacttggtttttctgattttttcccaggaaatcaaatcattgtttcccgccgattgcagtccattctatgctggtttcggaaatagagatacagatgaagttagctaccttaaggttggaattccactagggaaaatcttcattatcaatccaaaggtaataacacaaaaggtctatagatatctctaaattcagaatctcaaacactctttctaatgttgtaatcttttttcatagggagaggttgctgttaaccggcgagttgacacgaaatcatacaaatccattcatgctcttgttaacggcatgtttccatccacgagttcctccgagcaggttcagtcctattcgattctgctgttttgtatacaccaaactattttgtgtcatgggaatgacttagattccaattattgcaggaggattacaattcatggaatttttggaggttgccacctcccaacatggatatctgaacatcataatacatttcttaaccctcttcaaatggagtgtgcctttcacaagcttgtacaaaactgtgaaggtataatatttctatatacatacacatacatatatataaactgattttatctttgctatttactat

SEQ ID NO: 243563 - DNA, 1733 bp, Cannabis indica
tgatagactgggttcgaggctaaagcactagcactcatattgtcacaccaagttataggagagacattgagagggaatctgatttcattcagcagagattcaatccatgttagttcagcactaacttgagcaagagctctatattcagactctgtactcgaacgagacaccactgattgtttctttgaggaccaagagactaaagactctccaagataaacacagtacccaccaactgatcttctatcatcgggattgctagcccaatcagcatcagaaaaacccatcagatcgagcttgtcacagcagctaagatgtaggccttgtgtgttcttgagatatctcaagattctctttgcagcattccaatgtgagactgtgggggccttgaggaattgactcagtgagttaacagcatagctaatatcgggtctggtatggttaagatactgcagagcaccaatgagacttcgataatttgttggttcttccatcaatttgccatctgtgagggaaagagatttaccagtagccattggtgtagggcaaggcttcaaatgttgcattctgttcttctctaataggtcctcaatgtattttgcttgagtgagatagagacctgttgcatctctagcaacttctatgccaaggaagaagtgtaaatccccaagatctttgagagtgaacagtttgttcagtttttcaatgaaactgttcagattgttattattgttcccagtcacaataatatcatctacatagattaagactagaatgatgcatccattgttgatgtagaagaagagagatgtgtctgcccttgagttcctgaagttccaagtaagaagagtgttcttcaatttatcaaaccaggctcttggagcttgtttaagtccataaagtgacttgagtagcttacaaacatggtcaggtctgtttgggtcttcaaaaccttctggttgacacatataaacatcctcttcaagattcccattcagaaatgcattattgatgtccaattgcctaatattccatccctttgacacagcaatgctcaacacaattctgactgtagaagctttgaccacaggactgaaagtctctccataatccaaccctgctctttgatgaaatccctttgcaacaagtcttgatttgtatctttgaaaagaaccatcagcattccttttaattctgtgaacccacttgcaccctactaagttgtttgcctcagacctgggaaccaatatccaggttttgtttcttttgagagctgtaatttcatcattcatagctccattccagcccttgtgttgaagagcttcagcagtattctttggttcttcaaagacagatacccacttggcttgactgaggtatgtttttggtttaaatataccagcctttgatctggtaatcatatgatgagttgggacagcaacactttctggttgttcatgcattgaaggttctgcaccagtgttgagaatttcttggtttgatttctctggttcttcactgtaatgctgctgctgtatagagaaattatctctgctgatattgacagtggcactgtcaggtgcaacaaggccatgatcaagtgagtcaaagtcagatactaatgagtttgaagagtttacctgattagatgaagatgctgctggtgtactggattcagtggaggcttgagatggtacacgagtgtcttgattagaggtaaaatgtctaaagtg

SEQ ID NO: 243564 - DNA, 4163 bp, Cannabis indica
tctctctctctctctctatttattttttctatatcatgttcttttagattcttttagatcattgtttgatccatgcatcactttattatgctcttccttgaccactcaagtagttagttccggacaagtattttatttcttccaaatgtaagatgttttaatttatgatttattgattgagtttgtggatattggattcattctattaggcgcctcttttgacgattgaaaataatgctgttctgctagctgggaattggtctcagctttgtgcaacatgcaaggtgctgtttaacaattttattttagcatttttgtgaccatcttatgcttttctcttcaaatcttcatctaatatgctacatttttgcttttttattagattgtcaggccacttcgtgcaaagcattgttctacttgtgatcgctgtgttgaacaatttgatcatcattgcccttgggtctccaattgcattggcaaggtgggttgacgttgatatattattcaattttgtgtatctatgcatcgactgtttctttatctgcagaaaaactattatactagtaaaacccttttcattgtgccatattggcttataaaaaaaacaagcatacactttgccatgcaaagttgggacatactagtgatgatcctatatatcacttccatcctggttggaagaaaactccattgtaaatccatggtcggattaagctggaacgatctttgttggcctgctgctccatttttgctgcttcatattctctgctaatatgaaaatgatgtatcaatttccatgctttgttgcatgctgaagatttaacgatgagggattatgttattgtgcttctaatctgttatttatatatatatctaattttacttttaacatctgatgcagaaaaacaaatgggagttctttatttttcttgctttagaagtttcggctatgttgattactggagcagtagccctttcaagtaagttcttattgaccaaccaccatcagctacctgttgaaatttttccaggtgccgtagttgtgtggatgcatttctgttaatcttacaaattattttgttgcctgtaggaattttgagtgatccgcttgctccatccacttttggagcttggattagtcatgtcgctactattcatgctggtgtgatgtcatttttgattgtggattttttccttttcttcggggtggctgttttaactgttgtacaagcctctcaggtaaatctgcttcattctttattagattctcccccgagttactttcttgcaagatgggttcattattcagatatttcttctattggtaatacagatttctcgaaatattacaacaaacgaaatggcaaatgcaatgcgttacagctaccttaaaggccctggtgatcggttcagaaacccttatgatcatggaatcaggaaaaattgttcggatttcttgatcaatggctacaacgaagatgtacagtacatagaacaatcatcatcagatgctgagggtatcggaatgatgcacttgcagaggactgctaatttgcaaaacggggatgctcattcacatagtagtaatcacacaagtggctgtggtcatgttgcgatcaatatgaattcccaagctacaaatgctcaccaaggtcatgttcattcttcacactgcaaccacaataaccatgggaatccggaaaccggcaacgtcccattaggtctcggccttggtcttggacttggacgaaacacatctagatctgtcacagcttcatgatgcatgttcatgtttatgcccatcccaagctgtgttgagtttgagttttgtattatattcttatatttaattgattattgcttctctttcttacttttatttttttccgtttctttcattctcatatataaaaactttaatctaattcagatttctttgtaagtgatccttcttagttcctagcatagttgtatatctcattttgaatgccataggtcaggtgtgctttaggttcccaagacataaacttgaaagtacagtaaatgataaagaatggaagttattgccttcttgtatttgctatggtgaattgatttattttagaacaatttacacacctggttcaaggactttcttgttttggtggctttatttgttgtgcatattgaaatcctttgattttgacactcaaaaatttcatatggaatgactagtaaattagcagcccaaaagtgtagatttccatgcaattgtataagtaaagattattattattggatactagtggtgtctgacattttttttatagatgatgtctcataatttgttagtaatgttctcgaaaagttatttttttaagttagatccaatatttaattacactaatagtaatatgacactcagatacttatattatatgagatccgatacttaattagttaataatattctctaaaagttattttcttaagttatatgagattcgatacttaattggttaataatattctctaaaagttattttcttaaattatatgagatccgataattaattataccaaaaatgatgttaaatagtaatagtaccttttagcaattctcataaataaatgctatatattaacttattatataaatgtattgttccaccgaattggatgatgtcattacttctattaagaagttttgtataacttaccaagaatgtttctagccaagtcttcattattacccatcattgctttcatacttatttgtgtcattgtttagcaataaataatatttaatatataatattaaatcactattttaacatcagattcagatactttaaaattaatttttttttaaatatttaaaaaattaaattaaaaataagttacattaaatattttaaactctttctgtattttaaagtttttttaaaatttatttttcatgttctgcatttataaaatactatttattattcgattcaattagattaaattaaatgatgcccatccctaattatacttattaataaaagtttaaaaatttgacatagaataagaaggaggattgctgtgaaaatttgacatagcataatatgaggaactgctgctactaagcatatcgtccaaaaagatataatcattaaaatcaccaataattaagcacgatatatgaggaacaacattttataaacgattaagcaaagtccaaatattagccttattaatactataaggagaattataaaataaaaaacatgtcatttaatattatcattaaaagttacaaaccaatctatataactaaagaagtaagtattaatatttatatcaacattacctatccaaaataacagtaatcattccgtttagcctaaaccattcttaggtcaaatgcattattaaaagataacctattacaaaaggcagaactagagcctactacaagtttggtctccacaataaaaaggaattgacgctggtgctgcttttttttttaaaaaaaatatattgtaacttcattagatagaaaacaaatagtacaacttacaatataaaacagtttggaatacaaccattccaaacaacctctcactcttgtcttaatgctcttttagctaatctatgcactaacacatcaatatctgtagatacatgtagggccggctcaagagtaggacagcagggcccacgcagaaggtcccccacgcaggtttaaaaaatcttttaacaaaaagactccaaatttattttttaaaatcaccatattttttatttttactatttttattaaaaatataattatcttctaaagcgaatacctactttatattttaagatactacattttatatttattaagaaaaaatggttaattatattcttaatacagtgacggacccataactatttctttgtgggggctttttattattaaaaaatatttatacatacattataattattcttactagatttatttaattttgtgagggcttttccactattttaatctataactatcaaattaataaatttaaatttaatttttaaaaggtaatatttttattagtgggagctataacccccacattaacccgtccatgtttttaaaatattatattttaaatttttaccaatatatataaaaacataaattttttcatata

SEQ ID NO: 243565 - DNA, 1350 bp, Cannabis indica
gtttgcattaaacttgatccaccaatggggtaaatacacttaatacaatgactttgggcccatggaatgaggcccagcccgtgaggccgtgattttccgtacggatagggatcactcaatgttgacaggcagcatgcatgcactgttttcgtacactcttgtgttagggaggtgactgttggacacggggtatccttctcttggtggtatatgcactcctttggtttgacgcaaggacaaggacttgatcttgtggaattcggcatcagtggattgccatgttagtaggggcttccagagctcctcttgggttgcccttccagatgtattcccttctgctcatccagaaggctatcagagaacctttctttattttgggcgagatgcccttccgaatctagagaggtccagattaagatatgaataatttgtcatccggacaaatatgagacatgaatcaagttctcttgatagattcgacccatgaacttgattggacatgagattgggtctcagtaggctatttcttagagaacccttcaagacgtattccaatcgctcatctggagggtcttgaccgcttctttttttaagtggggtggggcaccccgaacacaaattttctatatcttgtatggttgtgaggcccatctctctatataatcttggcccattatctcgttgaattgtttagcgggccttaatcaattaattttgtattgagaatgtcacgggtcttccttttaaaaatataaataataactaaaatatacatagatcaaaattaataaatattttccttttataaatgttttataaagattaataatttcttctatactagttatacaatgtcgcttttaattggtttggtgatctgcaaaatttgttaaaaaaaataagaataaattagctagctttttctacttcaaaattaatatttattattagaaaaagaaattaaaagaagcatcacacttatttgagcaaaatgttgctaaattaatgcttccatgtattttttatagctagctaagtctagtgaagtgtgtagggcatgtgtgtgttttcacatatataatgtataaatttgtgtgtacatttattatatagaaaataatgcattattggtagttagatccataattggctatttattgaaagaattttggctttatagagagaagaaggaagaagtacttgcaacttgtcaaaccaatatatattaaatataaaaacataaaaataaaataaaaataaagaggagctatagatatatacacatggatatttatctatatttttagacaagttctcaccactttttcaagtaaggctgcactgcatgca

SEQ ID NO: 243566 - DNA, 4276 bp, Cannabis indica
aaatgccgttagataggtacttttaatatataaagatatatatgtttattatttatttttatcatatataatttgtatataaaattaaaaatatatttctgatagttaataaaattatagttcaaataatttgttacacacaacaaaaaaaaatgtattaaactcttactcttattttaacagtgtaaataataaacatcgttgtatagataaattaaggttgtaatttcttcacaagtcaaaatagaaataaatattaatacactactatctcatttagggtttgtattaaagaagtctcctaaaatatgaataatttgttgtttttttagtcacaatattataataattgactttaaatcttcttttccaaatgaattgctaccttccaaatgaagataaaaatgcgtgtttcactattttggatattctgtgtgagtccacttgcggacaacaaactcagggcgttcagataggatccctgggtaaagtttgaaacttcgaaggtcattatgtttaaaaaaagatcattgctagatttcgagacaagtcctttaaagagtgtgacgtctcttcactctgcatccataatgagggtacacatatgactagtactagagtagacttcctttgacatattttaagtaggtacacatagttagcatgcaacctttgacagagggcagtctcgttgcaaatggcaaaatatatttctcatgaaataaaataatcctaaggattcgtgcatccactttcactattataacacaaggtaagcgcacctttctcagactccttcaaataacataattgacacatgtcacatcaccatgagacaaaatacgtcaacaatggttacacgccagattaggccaatccatcaggccttatataagaaagatagtttagtcttaactgatgtgaactctccattagtgaggatattggagattaacttcgcattaggtttattttatttgacttgtgtttggtaggactagcctacacatgtaaaacgattcaaattttagttctcaaacctaagtgttgccaaaatcataacaaacctccattcttatgaaattttaattgtaatacaagtgatttgtagactatgatctatttaacgatctgaaccacctgaattctttacttttttctctcaagttttctaatatattttaattttaagtaattcatttattttttatttgtatttgaatttccatttgttctacaatctgagtgtgttatgacatggaaaagaatgagttcatatgttgtattagaaaggggaaaaaactacacaaaaaattctcattgttaggaattttagattttgaaaacttaaaatatggacatttaattttaaagattcatgactttcaataccacgacatcaatttttttagtgaatattaagttaggtacatgaattggacattgacacttgaccccacttaaatataagattatatatatttccccaaataaacttcaatgatcaatacaacaccatttgcataagcctctttgaatttctccaccactaaagataaactttgagccttttctagacaagcaaaacaagataatggacaaaagaagaaaaacaagaatcataaatcttaaaatagaataacacttcattaaaaatttcagaggatggtcaacattttgagaagtgaagaaaaaaatgaagtaaaagggtcaagctaacttgtatctatagtacaaaataggcctcttgtgatcaacatgaatatagcctattctaaaaaaaaaagaacaaagcaaaatacaacaaggaagcctgcaatgaacccaaatggtatataattcagaaactgaatcaagttttatagaaagaaaaaaccaaagcaataaatggtatctcaatctggtcagcatgtattgactccatccttgcaatcttttgtcaaattatagaaagtttcaacctttgtctttgccctgtaaagtacctcagtatccactgcaactctcatgtacccatcaaactcaactggtctattattattcaactgcattgtctcattgtaccactcactagtattcccccacaatacattgtaatcatcaagcaaatgaaccttatactgagacctcaatttatcaaaatagttatagtatggttcattggttgcaatgtaaagatgccttcctggtcgaaccatccctttaatcttctcaataagcatatctggagaagtatcataatccaaatgaggccacagctctttgttttgtgccttggcaccccgaaccacatgtgcagcatcgaaatcccagtccatttgaccgctaatctcggtgacaatgttcatcaacctcttagatttccacaaagcatgccatggtctttgaatgtactttgaagcttgaccctcacaaactctgtaccagtaattctctggctcgggagcatcgaattgcctccatacgattgtgctcctatctttcttaagctgcataggagtaaccttatgagttacaactttcctaacaggaactttcctcttatgactacgattccatttcttccaatctctcaaaaactcaccctcctcaaccacaggagcagcttccttcaaatgctcgaaatcaaaatagtatctaaaatcttttccttcctcatctttgttactaggattataagtagcagccaaacatatactaaaatccataactaaagttctattcaagtacattgcttcacctaaaccacataagaaactccacatatattgattcattcctttacaataatcaccaccacgagagtaatacaagtaccttcctctcctgaagctagtctctgatcccaagcttggaatggtgtcgtttatctgatcatcccgaggaggctgcggcgcgagtctagacctcgttccattgccaattcgggtcctaaatcgacgagcattgacaccagaatgccagccaccagcatgagccacttcataagtacaattctcaccaaatgtgagcttaaacctcctgaaatccctatactttctccatgatttctccttcttgttccgaaatcgccacattacatcacattcatctggtttagatccattaactggtgtttgatactccaagaacacaatagacttgaaaacctttaaattgaacctctcaatagcgattaaagctcggggatccgaacaattcactttctctagatcctcacagttcaattgggtactcgaatcgtttatcaaagattcacttttctctatagccaactcagtaatgggattcgataaggacggagcaatggaaggagccactacaactgggaccatatcctcgcccgttttgaggattgaatcgtcgtttttgaaggtggcgttttcgttctgggtgaagagttttgttagggcaggagctgattcgagccatggatctgggggttggtaggtaatggctatgactgtgaagaccaagactgagaagacaaaaactgagaaacagaggttgcttatgagctttatgaggttttgcccaataggctcagtcccctgagtcgattccttcatgtttacccagatctaacaaaacagaaaattcaaaaaaatagtgtttgggtagaaagaaaataagaagagaaaacgaatcctctgcttcgacgagtgtctcatacacttagataaaaaatgggtctgaactgagaattgcagacgtgattcgcgacaagatgagttttttctcgtttctgggaagatttaacgaaatgggtatttgagaacaagctcaaaaaaccccaacccagaagagaaaatttggggaaattattttctgagaagccaaacagggatttggggaaatgggtttggagcgcgaaaaataaatgaccgaaatttagaaaacccaaatggatctgaagagaaagtttggttgttgattgaagaaaatgacaaaggaactaacgggtagaaatgatgatgatgatgatggtgattgagattgaagaagagtgattgtgaaggaatacgagaagagagagagagagttcaccacaactgttcagatccagttgagactcaaaaccgacaacctcagctacatcagcataatgtttttttcaaatttttgaaaaaaaaaaatattgacaataaaaaaataattaattaatttaaatttatatattttctttcacgtttggttgaaagtgttcatcaaagaaaggcattaaaatttgaaaggttttttaaaaaataatttggggtttgactgttgagaactg

SEQ ID NO: 243567 - DNA, 4552 bp, Cannabis indica
ttctaattataaaattgaaaagtaaaacagttttatagaacatgttttgaaaaatattttcacttttctacttttaaaaacagaaaactgattaaaaaagtgttaccaaacgccacctaatttaattaaattgaaagtgtatactagcttctctgccaaatgtttctttaattcattatgaacctgttttttttttttttagctaaaaataaacttcattgaaaaagacgaaaaaaaaaggatgatgcttacaaagggaaccatctccctaaaactagattagctagaaatgataatggtgaacacatgggattcacgtcccataagctaacaaaacccgaacacgaattatttaaaccccacttagcaagggtgtgggcacccctataagccgatcttggaatccaatggagagagaactcagccccctcaacagcttgcaggaacttggagaaagaagaagccatggaccagttaggaaccgccttggctttgactgccttagtaagagcttgacagtcagagagaatcacccccctgttgagccccagcagaagagagacctctatccccttcaaagctgccaatagttcgccatgaatcacaccaacgagcttgcacttgctaacatatatcgcgaccaattgcttggattgatccttaacaaccacccccattgtcatgttctctttgccaaaagcagcatccacttcaatgataaaaccatcagatggttcgtgagagaacccagcaattggatgaggaggaggaggagcccgattatccaaggccaaattccaatgaaactcgaattctcggccaatgagtttagacatcatctctagttgtaaggagcaaccactatggaaagcttggtttcgaaaaaaccaaattttgtagagaagcaccgctggatatacattctaaagtcatcaaccgcccgagcctccttttccttagaaaacggggcattgaatatccaattaagtactttccttccgttgctcaagtcaaaagcttcgatcctaataccccacttagggagaaaccagagtttcttgaccacatcactgtgcccaaaaagatgttcggttgaatttgcagacggggcatggcacatacagcacggaccaaactcattgccaaatatagccgccaatcttgaccctgtaggcagggcatctctatataacttcaaaaggaaaagttttacacgagggtgaaaacaactttcccacaattgtttataaagagagttatcaacggagaacaggtgcttgttaagagcccagtaagcagattttacagaaaaattaccactagaattaggagtccataccagggagtcatgagagtcgagatctgagggaacaatcgattgaagattagccactgccccaggggaaaacaccacagaaagtttggccaaattccaatccccactatcgcaatcaatgagctcattaataaccagacgctccttcactaaaggattcaagtcgtcttttccgatcctcaaaccatcataaatcagccagtcacaatcctaaagatttctgttagaattgagaccgaccctccaagcgacattctcctcgattaaatatttaaacatcccaaattccccttgccacgaaggaaatattccgtttcttatcagcctctaggaaggaggaatgagggaagtatttccctttcataaccttaatccacaaggcatcactctccctagctagcatccatgccagtttggccagaagacacatattgttatgcccagactttctaaattcgaggcccccacaaatcttaggtttacagatgttttcccaaataaccagcgacagatatcgtcccttcccagtatccccagtccactaaaatcgtctacatagacaatctagatttgcaagaatggccgaagggagtttaaaaaccgccatagaatacagaggaaccgtctggataacattttgaactagcaccgttctagccacttgcgataagagtttagctttccatccctcaagccgattagccaccttgtccaccacaaatttgaacttgctcacattgtttccgtgaatgaagaaaggatttcctaagatctgctcatctccattcatcatttttagcccgaacgagttaacaattttcgaccgcaagaaatgacagtagttattagagaaggtaatcttagtcttctagagatttaaacattgaccagaccaagaacaatatttgtcgatgcaatcccacaaacagctcaatgagttaagatccgcttttgcaaacagaagggtatcatcagcatacatcaaatgcgtgatagaaggcccttgacgagacaccgaaacaccttccaacgccccagtagcctcattggctagcagtaaccttgaaagaacctccgaagacaaaatgaaaatatagggggacaagggatcgccttccctgatccctcttctaggaacgaaggttttggtaaggcctccattgagcagaacttggaatttaaccgaactaatacaccacatgatcatgttaataaatcttgcatcgaatccattagcatgtaggacaacttcaataaatctccattcaaggcggtcataagctttagacaaatcgcacttaattccaacaaaggctttcttgcccttctgttgacgaaaatagttgatcacttcatgagcaattatggagttttcagctatccatctacctttcacgaaagtcgattggataggggagatcaacttatgcaacaccttacgaatcctattcgacagcagcttcgaaatgatcttgtaagaagtgttacactgactaataggccgataatcatcaaaggtggccgcattggaacgcttagggatcagcacaataaaagtacgattcaactcggccacgaaccttcctgtgcgaaagaattcctgcacagtattcaccacttcacctccaacaatatcccagtaatttttgaagaatttacctggacaaccgtcagggccaggggatttgagagggggaatttcccacacaactttcttgatctcctcagaagaaggaagagcccgaagagtctgattctccgcttcactcaccgggttagggaacatagaggacaaatcatcaggaattgaaggcaaagaagattcaaaaacctgatcaaaatttctgcggatatgctcatcaatcgaacgtctatcatccacgaattcaccctgatcatttctcataacccatatgaagttgcgtttttgccgaatcaccatcgaggcatgaaaaaatttagaatttctatccccttcattcagccagagctccctcgattgttgacgccaaattgaattttgtctcgcttctatctcctccatctctaggagaatagcttcttccagcttcgcattctcatgggacgggcttttcttttgaatctcccgaaagacattttccagcatattcagtttcaccttgcaaaagccgaagtattcgacattccattttttcagcgcgatcgcggtagaagccaatttctttgacagaataaagctatgatatccattaatagtcgtggcccaagcatccctcaccacctgatggcacttctcatcccaagaccaagcatcaatataacggaaaggcacccgtatattatctctatctctcatcgtgtcgagaacaatggtcgagtgatccgagtgtctagttgcaagagttttaattccggccttcttaaaatgaattacccaatcagcagaacccagagcccggtcaagtctttctctaatgagagtttgccacttttggccattagtccaggtaaagaaagcaccacattatgtacctgttgctttcacaattttacgatcgtagttttgtgaaatttattattctgcctaatgtttattcaacttatttaactgatttttgatttgaataaaactagttttcttcaaaaaaaaaaaaatctataacaaaaagttaataccgcagcaaatatcagaatgaccccaaccgtaaaaattaataaaaaaaaaagtaaaataaatagtgtagagactaattctcctaatttatattatttttattattatttttcttccatctcatattcttaaaaaaatatatttataaaataaaaataaaatttattttaaattaagacaaaaaaattaaaataaaaattatataatttttattaaaaaaaagaaaataaaataaaaaatataaaagcattttctaaaaattattttaagttactttttttaatattagagtgtagttgtctttatgaaagtgtaaataaatatctcatttaatttaattaaaggcatccaaacacaatttaatagatttttttttttgctaactccaaaacaatttaacagctccctttcaaaaataaaaataaaaaaaattaacagttagatattataaaatatttagcaactaaaactgataaagattactgtccaaaataatgtatagatcaatatgcatatatttaattaccactaactaagttgaaatttgtagttcagtcttc

SEQ ID NO: 243568 - DNA, 1573 bp, Cannabis indica
atgaaacttataaaaaaacacagtaaaataataaaaaaataccgtctggcaatatttttgtaaaaaaatagcaaaagttagtatatcatgtaaatttctctaattaatagttatataaatttagagtgttattgctgattttggatgtgtggtactgactttacgagactggttttactgcaaagcaagcattttttttttcaaaaaagaaaatgtaaaaacaaatataaaatacattatgtttatgaactattttgtgaataaaaaatgtgtatcagttatgattttaaggaaggattaattgcggtaaaattcttaatacttttatttcgctaacaattaatctttaaaacttaaattttgaccataaaaccttcaaaatcataatatcgttagtaatttacgacttctatccaaattactagtgaaataaaagtattgagggttttggttaattcagtctatagtaggggatgttttggtagagcctttatttaaaaaagtttttcatattaatttttcttttcatgatcgtgtatgttatagttatttagagtcacctataaatttttaaaaaacttcaaatagtttaacgtgccgaaaataaaagttaaatattattttttcttttatacatagtataagttattatttgaacttaaatttcgatataaactatttaaaatttactaatagtcttaaataattacaacgtttacaatcatgaaaaaaattagggttataaactctttgaaatatcgaaataaataaaaaaaatctacccaaacattcttttaaatggtgtactaattttttttttctataagtgatccatatttatgacacatttatatatttattcttatagtattatactcaataaatttagttcatatagatatactaaattataaaagtttgccttttagctaaattaatttttatataggaaaggaagaacttttaacttttcatgaacataaagcatctctaatagagtattatatcatttttaatggatggtgtaaattttgtattaagtttgactcaaaaaataaatcaatgctacatttagcttaaatcttataattgtgcttcaatacaccaagagtgaaataaactatattttaatagaaacgtgtaaaaaaattaacaaaaatagtaaatttttattgaaaatatataaaaactatagggtgtttctacaatgcaccccttaaaagtgatgcattgacgtaccccttatctatttcggcatttcagagaattttttattttagtttttttcataaacgtgtacgctatagttatttaagacattttgaaaaattttgagaaattcaaaataatttacaatatagaaagtaatattcaaacaatctatttcatacgtgtataaaagaaaatagttatgcgtgttacagactgtttgaaccctattttggatgtgttatttttttaaaaaaatatctcaaaatattgtaggatttcttaaataactacaatgtacatgagtataaaaaatagggaaatttacatggtatactaacttttgctatttttttacaaaaat

SEQ ID NO: 243569 - DNA, 3755 bp, Cannabis indica
gactagtcaaatttgattgatcgaattgttactacgtctaaccaattcagatgctccttctcaactataacccaccaagtctacacataatagatggttaaaatttaattaacgattctgttaatctatataaacagcttggtattagtaaaaagtattattcatatcgaaagagccaccaaaaaatttgatctactttgatatttaggaaaccgtttccgtatcatacaatacaaagatttaatatgtttcaatatatgtgtggcaactcaactgaagtgataccaaagcaggaacttcggaatgattatgggcatactatgtcttaaagtttccattacaaaccagtatatttggtaatagttttttttttttgttcaaattaatggtccctctaattcttttgaaactcttatccaaacctcgttcagctactttataattaataaatggtaacaaaagtgaagtaattagtaaagtaatcatcgtttggagaataaagctaactcgccgtttacatttggcagtctaatccccgaaactactaacaactatcacaccggaaggtccgtaatcgaagagtcaaaagtgtattgcctaacaccaattcaaaatttaaaataaaaattaagaaaattacaataaaaaattattaccttgaatgggtttactctccaattccgacatgccagatgagcttccaccgtgagactccacagaaccttgagaagtattttgaatagcaccagcactaactttacttttagctattactaaatcggaaccggctccggtgccgagcagggtttgtctagtggccgcagcccaagtggtaaacccaaaaggtgggttcaccgaggacgagctaaacgccgtcgtattatcacgtttctcctcttctagagaagaccctgcttctttctcgcccttggccgagttcctctgcttctcggaccttcttcgcttggctgccattcttcttaaggtctgtaactctttcctcttcctccattcctcttcggtttccgtcggaagtgaagaagttcgcatcagattcgggtatggcacgggcggcgatagcgttgtcgtttcttcgttgttgttattgccccttacgagcggcatggttccgattatcgaagaagatcgggtaagcttgttcttcttatttgcattcttatcaactccaaatcgacctcctaaagacaaacccagattcaattcaagctcttctgaatcttcttcgtcttctccttctccttctacagcagcatcaaacgctgcgttttgggattgctgctgcgtgttactgctactcatcaatctatgcaacagatctcttggatatttctctatttgcagagaaaggttctccatttctctaccactaacactaacttctcctctgattccctttccttcgtcagcttcacccattttatcttctactttctgaaaaaaaaaaatcccagcaaaaaatatcttagtgttcaacaactatagcgtcgtctcggccgatataaagcaaaacccatttgcagaaactcgtatattatcagaagtatgcatccattattggtttggataggaaaacaaaacattcaatccaaaacccatatcgatctttgtctcttcttttctgtgtataattatgtaagacttcagttttcaaaacaaaaggatttcgaggcgaatacgtgtgtctattgtatatacacaatataaatatttatatgtatggaagcggcgaaaagtcccggaaatactcgccggaaaataggagcagaaaaaggagaatgaaggaaaaagaaaaaagaaaaaaacagagaaaagaaatgatgagagagaggggctggtttttattgtaattataaattatttaaaaaattaaaacaaatagattatttattttttatctattatacctgtatttctgggatatgtgggagaagatataaaatgaagagagagaaaaaaaatagttagtaaatgtgagtttccgaaaatgcccttggtgtttagagaagaaaagtacctggaggagacaagtggccgtctgaaagggtgccagatggacacgtgttggagtaagcataattattagttattagtattgttaggggtgtcagtagtagtactgtcctctgccgcttgcccaaagaaagaaaacacgtgttgtgcggagaataaaaaaggagattaaaactgccacggtgtcggtcttaatcgggttccctggtgagtgccacgtggggcttcttggtttgggcctcgggaagccgcgacgatggctcgttagctgtcgtccaaaactatttgactcatcaattcataatcataataatctcaactcaactcaactccaccatttccttctaccattgttatggtcaccaagagcctaccataactcaccttattacctcataaattttctttaagttaataatttttattaaagttaaattaatgtgatttaatattcttatcttatatactgatattatgcctcacaataataccagccaatttgttaataaaaataataataataaataataaataatactagccacctttagcatttctcgttcccttctcttcccaacccacttgtttacatatgtaaaggtgtcaaaccagtggcacttaaattaaatatattttaatatataatttacatatataaatttaaaattaaatatatttaattagtattttatatttaaccaaagataattttatttttccaaattaatttataataatataaactcaaaaataattaataattacaagtactaaatgagtatattactatttctcactaatagataatactactataaaatacttgtttttaaattacaaattaaatgattatatatcattatcgatattatacattcattcacatatgtacgaagtaaatatttgtataaaaaggtcgatattaaattatatgcacctgctcatgtcacattatatgatgtttgatatcatataaatatgatatgccaaaatcatattattttcttaaatgtatttctttctttttcttttcttttgaattttgaaaagtctcaattgtcctttgacattatatagaatataattttacagcttaattgtattatcttcttaatttgttgcaaacgtggattttggttgtttaaaaatgatcggaaaaccatgaaaattatatgtaaggtatattgtcatatcatatattagtttttttttcttagaaaaatattatatattaggtttggttattatcatcatttggtatatgtaattaaaaattgtattaaaaaaaattccacctgattaagtcttttgtttatattagtgttcaactactttgtttatttaaacttttctgaaataattgaatgatcataattttatttatctattttttcctttttaaatccaaattcgataatacttcaattatagacatgatttaggaaagaacattactatttcaaccacaccattagtgttgtaaatatgagttggattttttttaacatggcacaaaaatggcatgagcctgagaggcacgagcatgacctgatatgaaaaatatgtacttaggtccaatacgacacgatacgaaaaaaaatataggcttaagcacgacacaacatgaaaaatatagactttgctacgacacgacacgatcgacaagctcgaaagcgcggcacacaaacacaaatggattaacttgaaagtatgacacattaaaa

SEQ ID NO: 243570 - DNA, 1600 bp, Cannabis indica
ttttgaaaatgaagggagtgaaagatgggatgaaaagaaagagggaggatggaaagaaagaatggaggattggaaaatgcagcagggaaatcttggtcctgatcctcatgatgatgttaatgatcaagacatggctctgtatgttaacttacatattaatcaatacatgtatatacaaattaatatgatatatgaaaagactaatactaattattttatgtaggattgatgaggcaaggcaaccactatcaagaaaagtaccacttgcatcaagcaagctcaatccatatcgaatggtgattgtggctcgtttgttcatcttggccttgttcttccattatagaattttgaacccagttgaggattcatttggtctctggttgacttctgtgatatgtgagatttggtttggtttttcatggattcttgatcagtttcccaaatggttccctatcgatcgtgagacctatcttgatcgtctttcaatcaggtatgtaaaactaaagagcataagaagcaagtgaaaatcaaaataaaagttgtgtattttgacaagtgagtttactaactcaaattttatgtaggtatgagagagagggagagccaaacatgcttgccccagttgatgtgtttgtgagtactgtggatccaatgaaggaacctcctattgttactgccaacacaattctttcgatcttagcaatggactacccagttgacaagatctcatgctacatttctgatgatggagcttccatgtgcacattcgaagccttatcggaaactgcagagtttgctaggaaatgggttcctttttgcaagaagttttccatagagccaagagctcctgacatgtacttctgtgagaagattgattacctcaaggacaaagtgcaacctactttgtcaaggagagaagagcaatgaaggtttgtgaacaaaatgttacacaaggatttgatttgatctttcctgacgagatcaaactagacgaaatgaagaagataaatgatgtagaaattagagaacaatcatggctttttatagcttttgggcatatatatatataagtatatatcgcacatatttgacaaagcaaaacctaatattatataggacacaaaattagttcaagtgtatgagattttttcttttatgaggatttaattgttggatcacacaataacaggaagtatatatataattttgagaaactaattaattaaaagacatcttgctcctgcaaattaagccatctagacctaactcttatgctccccttacttaattttaaacaaaaaatcaacttcatcaagttgaagaaaacatagatcttgaataaaaagaataaataacttattatatataatatatatatacaaacactatgtatatatatttatgtatggagatctatagggaaagggtaggtttaataggaagagattatgatgtatataaaataataaaaaataataataataataataatacatatacctgagccgctacagaactcataaagacttgccacggttggagaaaataataaacggcgaacctcagcctcacagagaacagagagctcataagctttctt

SEQ ID NO: 243571 - DNA, 1427 bp, Cannabis indica
tttattattttttagtacctaaatacccttagttatataagggtattattaacattatattcattctcaaaatagaaacagaagctctgctccaaaatttaaaatgaaattccgtattttaatatttccagtttaattatttaatgacacactatcaaattctgattatttagtttaggatgggctattaattacaaatagcggctccacgtgagtatccactctaatctaaaacagcaacttatgaaggaattccatgcctctccaattggcgggcatgctagtttggagtgtatgttcttaaggttgagcgccaattttttttggccaggtatgaagaagtgcgaaaattcgtacaaacatgtgtgatatgtcagatagttaaatactcacccgttgcccctatggattgttacaaccacttgaatttctaaaacatgtttgagaggatcttgtcatgaattttatcgtgggcttacctaacttatgtggggttacaaatatcttagtggtagtggatcgcttcaccaatgcccatttcaaagctcttccaagtcattatttagctaataaagttgctgtacttttttctcatatgttcattagactacattgtatgcctcgctccattgtgtaagatcgtgatctgattttcactagtgctttttgaagaaaattatttgagttgatggggactttcatgaaaatgagctattcttaccaccctcagatagatggtcagatgaaggtgactaattgctatctagaacaatacctttggggctttactgtagacaaccccaaaaaatggagtaagtttttttcttaggctgaataccactgtaatactagccatcctccgttatttgtatgaccctttttcaagttgtgtatggatgaactccttcatctatacctgcttacagtggggtactacaaccattcacgctgttgaagaagatatgctatcacgagatgttatcctttaacaactgaagaaaaacctagtccaagctcaatatcgaatgactcaacaagctagcaagaagcattgagatattaagtttaaaccgagaaattcagtactgattaaattgaaaccttatcgtctagcaatgatggttcatcgtctcaattttaacctctccataaagtactttggcccatttccaattaaggctcgagtagggactattgcttacacccttaaattaccaacaggtagtcgcattcatcccacctcacatgtctctgtacttaaaccattctatggtaacaccccacctacttgaaatgcacctctcgaaccctccatcaacaacaagcctatcatggtaccacaagctattactacaaaaaatagctacttttagtgataaccttttagtcataacacaaattttatgtgactaaatttgacttttagt

SEQ ID NO: 243572 - DNA, 6999 bp, Cannabis indica
tgcattttaaattatctaagttataccaaaagtcggacttaagtttacaacaaaagtacctgagatcaacttttagttacattatcagaggctgatatgataaaatagtttaaataataattgtggcgaaagtacctaatttgtgctaaaagttgcacttaagcacctaagtatagttagatgctgaagaaatataagtactttagtgcaatttttagcacaacttagatatttttgctgcaaaaacgattttaacccaatctaccacatcaacatctaataacaaagttaatagatacttacggtgcaacttaaagttgatcttagatacatttacttgggtattcagtgcaacttccaatataacttaaataatttcgccacaaatatctctgtattatttcttacaatgaactcatttatttaattaatgtataggttattagctatatctcattagtttaagtttaaaagacattccaaatgacctaacataagaaacattataggatattgtggtcacttttatattcatttatttagtttgttcttttcatatatttttctaccctacaagaaaatcaagaataaatagcagtactctcacataatgcttaaatttactaaattccttttatagagcatagatgagaagttttaaggttcattgtccggccaaatgaaggcgagatttacattcttgaatgagggataactgaacatggtgaagacacttgaaaaggtttgttgccagcacaagaactgagtaaaagaaaatggagatgctggacatagaagttagaccagaattgtgaaagcactaaccttgcatattggacggtgaggatctcgaagattaacaagtaagttgtcactttttaaatcaaagtgtacaatattcttctcatgcaggtactccattccaaatgccacatccatagcaattaatagacgcttgcgcttgtcaagaatcctgaaacaaatacttctctgttaattattatcattttgcagactctagaattaaattttttcaagtatgctgtgcgagaatagaaaattacttctcgttcttctgcaaagcatttcttagagagccattcaccatgtactctgtcactgttgctacagcacctccgggaccatcaagcacaacaccatagaaagccaaaacatttggatggtgcaagtcagccagcttaatggcctcattccagaaatcatctctctgataccatatagagacataattagcatgccactaacaaaacagtttctttcttttgattaattttttttcaaggaaaagacagaccatccgctcctgttctgaaggtttcccagaaaacacctatcgttgatccgtttaattgcaacatcagtacccctccatttcccatgatagacagtgccaaaggtgccagaccctaattctttcagctcttcaaggtcagagttctttatgatctacaagataatataactgaggttaataaattaacttcagagaagagcagaagaaaatgaactcaaattgagaaactaagaaatcgttaacctgcaagcgtccaatcccatcagacacgggaaaaccagaatttgctgtctcagagactttgtttttaacatcctgatgagaaaagaaaacagaacatataaatgtatgtacaaatagataactatatgcatatattaaaagcagatgtgtaatgatcacctcagctttagtcttacactcagaggtactctttttaacatctgcatgaatggaatcattgcatgatccagaatttgatgcagtagatggctggaaaacagaagcagctacaccctcagcaacagcttgaagttcattcttgatctgttcctctgctgacccttttacagttatgataaacaaaatcaacatcatgacacttactagcaattacaatattaaaaataattacaataataggcatgctgaccattttccagctgagactgctctgaacctaggtctttgttcaagatgccgaacgatggttgaactccatcttccactaagctttgttctgtgtaattaaatgagcggttctcaccaatagaatcattactggcataagatcctcttattgatgaacttttacttggtctaggagggggaaaatgagtatcatggcgcaaattccaaggatcctgattgctgaaaagtgagtttgagaaatcttgaacgtctccagttgtactaggaggaagtgtatatggtgggtcaatgccacgaaatgcagggtttccataatgaacttcatcagaatccaagagatgtgctccaacttttggttgtgtatgatatccaggattgccccacataggtggttgtgttacctcacatgtttcaaccaaccgcgaagtagggttgtactgaatttctgtagagtaactaggcagcggttcagctggtatacagtaactggtctcaaatttatcaacaggtggtttactgtgctcatatggggttctgtgatcatagccatcatcaattcttagtttatcaactggtggtggtttactgcggtcactgaggatagatgtttcaggggggaaatttctaccagactccactctcccttcgattggtctcaaatggtcatatgaaatggaagtgtctgcagcaccctcattcattactatgccaggaaagttgttagcttttggcgattcacgatttgaccgctctgaagctaggactggagctgctcctccaacaggtgttataccttggatgacaggtttgaccaagggatcctgtttaaccaggtattgggcagcaacagattgttgctgaacaggatcatctcgaccatactgcagtactgcagtcatgaatgcactattaggcggttgtacttcaatagctcttccagccacagcctgaggaatgggaatcctaggatgctcaacgatatctacttgttgagaattaattctctccttttcatacattgaatcaggattctgcatgagaccacttgtctcgagttgaaaattgccaatttgtggatcaacatgagcatggaccctgcgtcgagcttcaactccttgatcaagagcccgttcccctagggcaccagttaccataaccttagccattggttgagttcttatacgatcgtccaaacgaagactatgaagtgttgagcttaaatcagacaaagcacttgcaccactgtctctctgaccctgtaccatagtatcggaatgtgcatgaggcaatcgtttttgacacatgtaacagtcctgaatcctagggattttatcagaaaacattacctgttggcaaggtacaacaccctcagagatgagggcatggtcctgccttggaacctgatggtgataaccataattaccacccaccactgcagaagggaccggaacctgatatgaattatagctttgttcaacaggaacaggctgaaccacccttggaacaaaagttctttcatccacgtaattttctattcgaggttgaatcattggctgaagcacactttgtcttacaccaacatacgaaggcggaggattcactgttgcacacactgcaggaggaaaatactgacttgggacaaccccagccccattaccatggagatgtggttgtgtgtacacggggctaggaggtcgcaatagttgagaatttggaaatcccaaatggggaggaaactgtagataatctgcctggtttggtatttcctgacgaggatcaacgtatgctggcacaaaggcagaagttggaatttccattccaggttgttgcaatcccaaatgttgcggaattactgatacaggaacagacctttctagatcgacttctagtggaccagacttagccaaaggcatgcgcaatggaactacagtaggttcagtatagcctacagtgctgggatccacatacaccaatctaggagaaaagtcatctgagttagctgaattttgcttgcgcaataacataccagatggtaaggctccagtaacctccccttgaccagtaagaaagccatcaacagcgtcattcgcactgaaatcagaagcttgtgttgaagtggcacttgttacactctccttccttgtaataccaccaccaccacctccaatcccattcactgcgtcaacatatctctgcccactatcatgtaaatccacaaacggtaacataccagatgattcaagctcagatgctgaaaacagaaacatcctcaacttagctgatccatctgaagacctctcaatcatcttttcatactcctccatcaaattttcaagatcatcagggcatgaaactgaaaccagtgcatcaagatcctcatcgggaagctgatatttgataactacaggttgcccataagtatccatcatcttctgcaccagctcattatagctcacatcgcttctgacactaataatccttgtatgtccaccaacatatctcaacaccccatcacttggtctaggtaaaatctttcccccaaaactacagagaaactttacttttcttcctgatgcagaatcatctccaccctcatcactcgcttgatcggccgcattaccaccaacccgattgcctatattgggattatagccacatccagccgctgaatcattcactagctgatcagcagcattaccagaaccccttttactcaaattaggagcataccccatcctgttagccatatcatgactagcaagatcaacaccgtaagcaccagcagccggattgcccaaattggggctgccaccagatgctgttgacatggcacagttgttgctcacaagttcgccggatccaccagcaccccgattggccaaattagaattgtaaccgtacccaacagctggacacacactctgatacgccactggtaaggtttggacagccacacgagggccccaggcagccacattaggaatcgcatttccatatcctaggcctacaaacccagcttcagaaacaggcgatgggtagtaaacgggtacggaatcagggctcccaatctcacgaacagggttagcataatacccatctggacttctacccgctgaagtaacagacgtaatgcggggctcatcagacaaatttctaactatatttaacggtcttaaatctttaggaatcgaattttgatcaaacgccatatctgcaatcaatcaattccaacttataaggttccatacaaccaatcttaaaacaacacacatagttattagccactagggtttttgctttttggatattcaataattttccctcgtttttcatagttttaaattaaccaaacaatacttttcaaaaaacagaaatcaatctatcaggttattttccaaaacaaagtacatattcaaagagttcaaaccaaagaaaaaaaaaccagagcaaaacaaatataagacaaatacacgcgcagatatatatatacatatatatatgtatgtgtgtaagtaccagatatgagaagctgagtcggtgtcttgcaaagagaggaagaagtataattatgatgaaacttcttcttcttctccagtttgagtttctagattgagaaggtgtgaccgaatctctccgtttattctggatgggtaataataaagatatgccattgccatttccctttttctcttttccttttctgggttagatttttaatattttctcgagaaaatcatagcgaaaagctttggtcttttctttgtgtttgggtttcgattgagagagaaacatggcatcaaaggattttgtttaatattttaaggaattttcggatgagatacagacggcacgtggatccttccatgcaaatattatttttttcttttttaaaaagtgtttattattattattattaatataaaaaaataaaagtgttatgtgttatcaattttgaatgttttttttttctttctatgattaatattattataagatagtgacatggagggaaaaataaccgaaacttggtacgtaacttaattggacccattttatctacattttttattcattttatgaaaaataaaataaagtaataaataatttaaaagaaaataaggaagaaaatttgtttgagaggttggtaaatttctccttgtctagattatagggtgaatgtctgaatgaatatgacatattggaaaatttagagatatttgaaaagaaaatgaattttttagtggataaaaagaaaaatagaatttttttaataaagaaatgaaaattatcttttgacctttttttttacaattgaactatttcttcccactatttgggggggttcaacagaaaatgaccatcattagaaatttagagtgtatgtaaacatactatatttttttattaattttttttttttgaatgcatatttgttatttcataattgttcttttattgcctattttggtttaacaacattattttctacctccaattcccaaaaaaaaaacattactttctatctttgttatcaattttatttattaattaattaatattatatttacatatgtatctatacaaaatcccaatcaatagttatctagtttcagctaaaaaaattcaatagtcatctacacaaaaagatattatacaagattttgcagtaagttttattataatactcccatacagattacagtaccctttccaagatttgttttttggcaacaatttagattagatatgcctttcccaagatttgtaattttggttttcttgcttcaaatagatttatccttactttaactcaaaaaaaaaaaaaaaattaaaatccttgttctcaataattaatttttttgtataccatataggatttaggacacctctaccactagagaagttataaaatttatatatatatatataggaaatttctcaaattatactcgggtgtttgaatgttttgataaatttttatatgtttcagtatataaaaaagttttttagtttaattatgctacttattagga

SEQ ID NO: 243573 - DNA, 4024 bp, Cannabis indica
aatattttacaaaaaatagtgcattatgtaattattcctaaaataattcacatgtgcccatcaatccattgaagtctctttaattgtgtagtctcatactaatataattttagaatcataacacttaacttttctcaaataatgtgagattgtataacttatttaatatttttccttacgaatgacgagattcacaacaaaggcgaaaaaaaatggcctacataaaagtatagttgttgtaaaaacagctgctagtatacattctgttttgaccaatatttaacaacaaacaattatgccatgcagaaatgatgaaagccaatctgtcaagtgattctctcagctgtattatcaacaaaatgctttaattgaaagaaagaaacagaaccaatttcactaaatgagaagaagaagaagaagaaggcatacaagaattttattattcactcggattcataaccttttttttaattcagtgaacaacttcaagctcacaacagcagaaatttcaatgaaataattaacaaggaaaaaagaaaaataatataaatgagagagagaattccaaagctcatgaaatggaagaaaaacctcaagccgaaattgaataaaaaaaaataataataataaaaacttcttcaaccctatacatgatgatgatgttgatgatgatgatctatgttacataatgtgcactttgtaagaagaaatcaatgtgaagtgaacctttccctctttcttttttctttcttaaattctaaaccccaagccgggccacctctttgtcacctctttcttagtctttttcgaggtgggatcgatgaggttttcgagtgattttgcttttctgtctcgagtttttcctgcttcttttagaagctctgctagccttctcttctcgtcttcgaaatcaggatttgctattccaagcttttcttcgcgcaatttaagaacatactctagaatctcaattgcatcttgaactctgaagagaaaaaaattccaaatttcagttcatatgcatagacaacagagcaaattacaaagcatgagaagcaaaatttcatgacagaaacattagtgaacagaactttctctcaaaatctatcaagatatggatatagcatgtttgaagaagtacgagttcaagaaagttcaggaaaaatctgtagtacactcccttaaagggatgtttaggtacatctcctatctgtttcggtattaaagaaatccaatttcctttgcaacagataaaagggtgtacagaaacgtcgagggtatactatagacttacccgaaagtttatatctgaacaatgattcagaaaaattttactaaattcatttggcatttgagaaatttaagtgacattctatgagagttagttttgttttgttctattctgttcttacctccccattgcatcataggttgctgcaagattgctgtatactccaatagtatcttgatgacatgagccacattcttgttctagtatcccccttgcttcttcaaacaactcggcggcttcatctatcttaaacagctgaacgcaagccaatcccatctggttcaacacaaccccaaagaaagcagattttctttctccactagctctaagtttcactacagcactttcgaaagagttccttgaatcttcatatctcccaatcatataaaacatcactcccattcgcgcttctattccagcaattgtgctttgctgtcccggcttgtcctccaacaacttcatcgccttttgcaacagcttcagtgcttcttcaggttcatcaacagactcgtatatagctgagatttcggtcagcccaccagcaatctcttctgctgtagttccaggcacaggttttgaatatatcctcagagcattttcacagtaagatttggactctctaagctttcctgttcgatggtataggtcagcaagacgaacaaagacagaagcaaccgaaggatggctgtcaccctttgatgacttgaaaacagtaagcgctttttggtaggagaagatagcctcatcaaaccgacatagagacatgtaaatattgcctatgcttacatcaatagctgcaacttcagtatcttgtccattagcaatcattgccatgcttgcaagaacaagatgctcaagggctgcttcataatcccccttagcttcacatacaagggccattaacctacgatcagctgcctcttcaagagacgccggttcactatgaactcggtgaatttcaagagttttcttacacaattcttctgctctatcaaactgcattgcttgaacatgagcctcagccaaatacctgaaatttcatatactaactcaactttattcttcttctttttaagaaagctattatttaagattcaagcactaatctcaagtattaaatttaaacagattatcgcatttaaaccatcttttgaagagctctaaaaggacaatagttatttccctttccaaatttgctacacataaactctttgactacgtttattttatctttttcatttaaggaaaaatgtattttcacaaaaagtgcatactttttgaaattcaacacagaaatctcaccttagactaatatagaaatggtcaactgggacagcttttttctgggatatgaattaatgcaactaacaactcatcttagaaactaccttattcagattgcattagcatgaatgtaaaatataatggaaaaatgatcataatttcattccaggaaatcaactcaactcaagtacactaatgattatgattcagaaccatttttataataataataattataaagaatcaatttttcttaatagccgttattatggtatataagatttcacaaaatttcatgctggaattacactacacgtataaaaaaggtccaatttttactcgaaaaatgagaaacccacttcagatatgaatcgaaatatacttaaaaaattaaaaaaaaaaccagaccttgaagtttccccaactctgggatcagtatcacccaatgattcgatctggatcttcaatccttcctcatagcacgaaatggaacgatccacctgtcccaacattgagtaagtatcacccaactgcatatgcccagagaaagcagcaagcgcgtgatctgcacctctcgaaacctcaggcacctgaatcgccctctccaaaaccggtacagcttcttcaaacctccccaagctacagtaaatagcagcaagaacatggagactcataaccaaatctaaactaggctcaccatcaacagcgcatctctcaaacgatttcgaagccctaacagcgtaatccagagccttaatcggtccttcccctgaagcgatcgtgtctctagctaatttcagtagaaacgggccgagatccggattatcaagcgaggtttctgacaagatctggtttggactgtccggctggggcttcttcagtctccggtccggtgagggtttggatcgggaagctgaaggtgatggagatggaagcctcttgggtaatggagatggggttttgggtattccgggttcggatctttgggtggtattattggattcggagactgagatccgtaacggcggcgcgtccggtggggttttgatcgatactaatcccggcatcttaacaagttaaagactgaaactttgagtgaaattgaaaatgggtttaagcttaagattactaaataagaaagaatgaaagagaaagagaggttgcagagttaaattatgggatatgaactcgccaccattctagagagagaaagagggagtttttgtagagagagaaagcttttcaatggagttttggcagatcagatgtctttctgtgctggcaaaagagtgagactgaggacgaggacgaggacattattgtcttttcattattttgagacacgtgttttattttcattcgttgatttgttttattttcttttttagcccgttggaaacgatacacgtgtatatacgctattggattagacaacgacggttgatctct

SEQ ID NO: 243574 - DNA, 3996 bp, Cannabis indica
attaaagatttaagctccaaacaaggtgccgagaacaccagagaatacttgcctggtcatttaggtcaaaaagaaaagatgagtttgcacgatcatatatcttcccacgcttatcagcttctcgatgggaaataagttcaccggtatattctccaaggtagtcatttttgttgacagagttctgaaattatgttgtaattttgttagaacaattctttatgagttactatgcaacagattttacatacatctcctaacctttataaaggccccccatccagcaacatcagactttgcaagaagaatctgaaagaaaagagggaaaaccattctttatagtatttttctaatatttaagagacaattttactaaattaaggcttatattcccaccctttgttgttgcctcagaagaagcctcatgtttccgcattggccatctccttgtctgggtggctcctctagtgtaccatctccacaactgcaatcagaaagagatacttataggccaccactaaaagagaatcaatttccaaaataggaggcgaaatgagaaacaataaaggagatgtcgtgcaactctaaggttgaattgtattgaaaacataattgagcactatttaaaaagacaggaagtacccaggagaagcaaagtaaacacatttgcaaagatgcacttcatttacctgacccaacaatttcgacaaacatctggatcacattcacgtccagcagcaaagcacgggcattggcgacttctgcattgactctttgcacaatggcatcctctaaaccgatttttgcagctctttgagcacctgagatatacaacctaactatatcaattgaaattatatctcattcatctaaactcaaaaaagcagatcttgcaaattggttagttatatatttaaatatcaagtataatagctcagccttggaagtctaattttattgtttttgcttactatgtcaaggcatcactctaactgaagtgctaagccacagtgtaaatgaccttcatagttttacattgagggctttctctcaacttgagataagcgggaatcaaatgaagatacccagtatggaccctaagggaacatagctcgtaggcttatgtaccactcattgaacaataaatggattttcctttgatcttgacaaacatgaaatatccaagatagcacctaaattctaaattccccttttaattctaagctacttacattcaagataatttaacatacccacagtatttttcacagcaagttccatttactaggcaggggcactgcttcccacacatagattcgcaatcacatggtgtatattgcttactggactggttctttccatcggcaattcttttccaaattgatgggtgaccaggagacttcatagagtatttaagctttcgggctttgccccttctacggatcaagcgagacttcgctggcatctcttggtccttagaaaaggaaaaggaaaaataatgataataataaatttctattctcgggtttgcagagccaatcggcaatctactaggcatattgagtaagagagagtaaattaacaaaccattatacatgaagaactcaaaaaagtgaatgaaatctatagtatcatcttgattatatcttaccctctccatcatcaaagaaatatactcagaacacttactatctttttgtcagtcaggaaaaaggaagaaaacatgtcacttatcttttatcctaaaaattaagcatgaagcaagcaaaaaataataatagattaaaaaaataatgatactaactgtataatctgtctcagtgttcccattttcatccataaataaacttggtccagcaaaagatctgcgcggcattgatactccaccctcgcgcatgtaactagagacctctaagcaggtcttgaagccagaaagtaagttcctggctatgaggcaactgaaaaacatgacatataaattatgtggggtccaaataagaattatttagcagatttcaggttctaatgatggcgtaaatagtaaaattgtcatgcagaatgtatagaacctaaacacagacctatttcttccaaatatctccaatcctttcatatatagatctttctccatttgtttccactcagtgctactagatatttctaacacttttccttctttggaggaaaatggtttcaacttcagtgatttctctacagcttctgattcatcaatggaaaaatttccagaattcttgtcaatcatctgatgttcacttttggtatgtaaaacaacatcaagatgtctacttttggtgctaagctcggaaccctgaactggaatatcttctgtagttccacttttgacattgaaaacatttagtcttttctgttttttatttgatgcgtcgagatcatcagaaaccctggcttgttctagtcctgtgtctatttgctttatgaccttgcgcttccccgtgctctcgtagcatattgccatcgtcgtagttatatccacatttggagcttcagcagcttctgaaatgcaaatagcatttgaattagcagggacaatttcttgagaaacggatatatcatcacttgtaatgtttgtaataatgttggcagtagtaatgggttcttcagagatagaagacggtaatatgacattattagactttggaccccctggcaagcttttaacaatatttaactgcaaaaaatattgacataattagagtttaaattctatgggaatatgacacaagaagaatttgaacatagattgtataatacaaatccaatagatacaattctcacattaaaacatggaaaagaccaagtgttaaaagaaagaagtctcaccttaagataacactgatcgctgcaaggcttcctatcatcttcatgttcagaccaatacatctgcttttcattctgtcaaagcaaactccgaatcaaatataacaacaaatgagaaactataggtaacctacacaccgaaaacaaatcttacaggtaaaacaactgtgtgggaacagccatgaagacggcagtcaaataccatgcaacgccgacagaaaaggttatcaaaagaatctaaagcatctgtaagactcttgttcagcaacatgccctttccaggttcaaataccttgccattattagggtcgagttcctcgctctttcctatgattgtgttatatctttccttcacatataaaattcgaatacatccatgaccagatcagaaaacagcaatgctaactacatttagttttgttgtttggtctgagaattacaacacataatgtgcagaactcaagtttcctccaaaagacattaagtcataataaaataaaccagactacctgagcttccagagtactgactccaataaaattgctcactgttttcagcacttcctcacctagcccatgctcgccaaagattgtgctgtcgattcaaaagtaaaaaacaaagtataagtagagtttttctgttttggtaagatcatttcataaagatgaaatacgatgacatcacactacttgtacaaacctcttagttgggtatggcaatccgcaacacttttaggaacacttttatatttgaaaagtaagattggattattttttttcaacaaagttagggggaatgaagaaaaattgaaaattaatccaacacactaactattccacctagaattaaataactttatctcatgaaaagcttaagataattttatcctctccaatttcctatcttcatgtaaaggaaaaaaaaaaaaaaaaaaaacctaatttactcataggcagatatgatcaactctcattcggatattttcttatatatcatgatccaattacatacaacagtctcctgctttcaagacatgacttcaagactgtagctcagtataatttaagcccaaaactgtacattattgtctaacatatcctgttaaacttaccacagaattcggtcttctcctttagaaaa

SEQ ID NO: 243575 - DNA, 3359 bp, Cannabis indica
taatatgcaaaaaaaaaaaatatctttctttaaatgaatgaagtatttattatgcacaaataagcctaactcatttatagcttttttttttccttaatttattgaatgaattatgactaataaatctacatagattctataaatctcgttttagatttttattttttactttataattggcccttttccaatcagtattaattagtaattaactcactgaaattattcctaacacttcccaaccagtatgtttttatatcacattataaatttataaccattattatgcggccaaaaatatatatacaaatacaatcaattaatttaatgatattttgtatgtggtgatgaactgtagaaagaaagtcaagtgatccaacggccaaggatgaaaattgtgaaccccacccgaaagtcaaacctcaagagactgcaagtgcatcgactgctggaggttactctcacttggattagaacgacaatgaagctgaaaatcctgggcatggctaggttggagagtagttgtcgttggtttctcatccaaaacggcaacctcttcttcgtcgtttggaagatcaagagagtacaccacatcttccatggtccaccccgcacgtaacaaaaccaccgagagcgtccgcacgtgccacgccatggcctcctccaagtcgactcctcctacaccttcaccgcactcgataactacctccctcttctgatcatcctccttgtcgtcatcgtagccgtccatcatcatcatctctctcacctcctcttccctccaccctcctcctctcaacctctgaaacacctcctccaagcacccgcccagctcctcgtcccggctccaccacgtgctactcgccgccgaattcaccgtccgcttcttgctcgcaacctccgtccaaaactcgatctcacgcgccgtcgtcgccgcccatgccggagcgttgactcttgtatactccgatgagcggcggattcctccgccgccgtttaagaactcgaaatcttggaagaatctggtaatgtcgtagctaagaatccaaacctcatcgccgtcgacgtagaagatagggttcccggcggcattcggcatcgacgggatgtaacagtttcggtagagaggaacgagaacaggagctttggtcaagaacttcttggctatctccaaggcttgattgatatcgtcgggaaaaggtccccaagattcgaaccagaaattccttcgagagatttgctttaggagaccgaggatcggaaggttgatgagaatgtgaagctgttgatgagaagaggaacgccaattaggaaaaccagagccgatcggaagaccttcacggaggatggaacggagatcgggagggaaggtgaagttgaagagtgactcgatggaggagaattcgacgttggagaggcctccggcgacgggaaggtcggagcagcggagattctggattagatttttagcgtaagcggcgaaggagaaacagacgagcttggttgtggtcggtggcttcttcggtggcttcatggcttgatatgccgtgttgattatctcaatttgtgcgggagccatatataaagagagaaaaatgaataaacagaattgtgtttggctagttagaaaatttcaaaactgaaagagaaaaatgaaaagacaaagaaagaaaaggaaggaaaggcatagtagagttcgttttttccgaagcctaaggaaggggataggtaagtgagtaagagagaaaatctgtaagaaaagagagactcattatttatttattttcttttcttttcttttataaaaaaataataagaaaataagtacgtattgtgtgtgtgtgtgataatgagattatattggttcatattaatagacggttttgatcagagaagtgttcaatggttatattaattcacggttatgatttaagataagtgtcaaaaagtcatagtaagaaaagagagagaagaaaaaaaaacatatattagagaatttattgtaaagagattgagttggttgttacttgttttgatgatgagaattaagggtgtatgatggaacatgaaaaagtcacgtggggactcgttgacatcttacatatgattcatgttcatgtgcatgtatagtataatgttagcaattaatttgatgatatatataatagaaatatatatgttacacaaaagaatttagctactatgtttggaccatttaaatgttataataattagtattatattgttctgtgaatatagaaatgtccatacataggaatatcataatatacatagaataatgtttataataaatatatataactggtaatatgggtctgtattttacaaaacatatgggggatatatgctagtgaatagttaccaaattgacggtgaaaagtgggacaaaggctaatagaaaaattgtttaaagtaggattatctttaagtgaaatgattcaagagagtagttgaaaaggttgattagaaagaaagtaatcgatatgagcaaataatgaaattggagttttattttttaagctttatgtatatagtgatgtggaattcaatcattccatccaatcatttatatatgtataggttagttattataggactaagggaccaaaatttagtcgtttgataagatatataacagaagagaagagctagagagagagagacaaccgtgagagcctcatcaacgacaagagatacttgtcctaaggtttaaaacaaacctacgagcacatgtggatatgcatgaatcacaccccctttattggaaaatgtctcgtttttttaggtactttatatccaattttatcattatttgtctttttcctaaaacatatgttgaaaccttgagagagagtaacttgtaatcctaatattaattgaacatgattattagccataggcaaaaattatttacataagaagatgaagtaataaggaatcaaaatgtatatgcatgcagccacactgctacttaaaaattgacatcttatatcgtctctaccaaaatacattagcgaattaagaagatataaaatgagataatattaattgaaaaagaaggaatagatttgtagtgactctttcaagacatatgcaattgcaaatgcaatgtgttttgctgagtgaaatattttgggtatttttttttccacaaggactagttagtactcaacggtagttgtgtgtgttgtgttggccttttcaaagttgatgaaagtgacaaatatatataaatatatatatatatatatatatttggcataattcctactttaaacccagcgattagattatgcccaattcaattcaacggctacagtacaattagggattgtatt

SEQ ID NO: 243576 - DNA, 1557 bp, Cannabis indica
tttttgcactaaaaaaagtatggaaaatttgagaggagtatttttgagttttagataaaaatggtcatatattttcaatggtgatatgtattagtttagaaataaaatattaagtaaatgtaagtatagaaaatcaaacttcccatttgtaatccattatatatgtgtagctccaacccttaaaagaaggcacctagtagccgaggctccaaagcctggtcttaggcaccacgacccaaagaccaagcgaaaaaaaaaaaaagactcgcaaagctctccaagagccgaagaatcaacacaaccatgatacgatacgacacgacacaaatgcaaacacagaaaaaagaaaatagattgaaagcctcaaaatactacgacaccaaataatacaatcacgatcccaatctcacccggtggccatttttcttctcatgcattcgacattgttttggctaatacggaaatgagactctcataatcaataattcaacagatttgttgaggtaaatgctgcaatacatttcatccaaattaaataagtttgtcaaattctcttgatgaaatttgtgttgtgttaattttcattgtagccaactcccatctagtctcttttgaatagcggtacctggtgcttcgtcatttctttgttatacccttgctaatttgttcgagttagtcttctagatttgtcagtcactgttacgagtcgcatttgaaaagtaattttaaaccagaaattaaataattaaagctcagaaaatacagcatatcaacactcagtgttcttaattttcttcttttttgaggcaaagttgcttggtccaatttctatggagattcttttggttctgcagaacataaaaataagtaaatataatgagcagaagagctctatatatcaacttaaactgcaatcgaaaatcaatactgaaagtataaaacaacacagtttatgaagcagcataccttgtcaaaagttcttctgactctttattatcatcgtcttcatcttcaactacatttcccgtagaaagttcttctaagtccttacaattatcatcatcgtcgtcgtcaactgcatcagctggaaaaggaagttacaatcagaaggaaaatccattatcaggataaaggacacaaactttatacttgataataatattgaaaccagtcttctcaaaagcccgacaacaaaatcgaaataaaaacacctccaaaatcatgcaaatcaaactcccgataatgcaagtttggttgggtcattctctattgaattctcctgaaatccttactggacaattggacatcagatgtatgcagtgaagaaaaactaaaacaaagaatggagtttggccccaaaaaccatgtgatttaaaggttctttatcttcaaataaaagatgcattcaagacatggagaaacaggaaaaacacaaggggttcaacgatatttgaaaatctcaactaaatggatttatatcatatcacacctagaatataacacagattttggaagttgatcaatattttcaagtagggaacaaaacaatgcatacaa

SEQ ID NO: 243577 - DNA, 2708 bp, Cannabis indica
gggacgagtcctgataatatgcaggccattcaagttgaccaagtaagaacatctcacatgaaatgtgtatctctgcaatattccccagttggaagaacagacctcacagatatgagtacttagaaatcatccaattatttatttatttattattattattattattatttttttttgcaggtatcaagttctctgaattcatcttattgttacattctgaattccggaacaactgtattcacttggattgggaatctttctttgaccagggaccatgatattttacacagaatgttggagttcataaatgtaacttgtttttacttctgcagacttctttcaaatttctgttcgagcttctaactttttcaatggcagccaacatggcaaccgatatcagtgagggaagggagtgaacctgatatcttttggacagcactgggtggaaagacagagtatgcaaaaggaaaagaaatgaaaggacatgtagaagatccacgtttgcttttgttaaacattactgaaggtaggaaaagagtccattcttctacagttgtcttaaaagataatgtggtcttcttttgttgtgaatcattcaagctgtaaagcatgtctaattgcggactgtggttcttggctgcttgatcaaatttcctcattcaggtgatttcaaggtacactttcagatacagtgtttgtagttcaatagttgatttactttcaagtacatggaatacactttcaacacaagaagtttacagttaagcttgtgtcttgtgaaattctaatggtgtttatctctattggaatcactatgtaatcttcttatatagtatggtttttataatatttcaggcgaaagagatattcaattttacacaggatgatttaactactgaagatgttttagcgctggactgccacaacgagttgtatatttggattggatgccattcaaaagtaaaatcaaagcaacaagctctaatgttgggccaggtgaactgtcaattctaatgttgatactcatcacacttgtggtcttgacccttgtttgttttctaaacctttttcctttcatccttttacgtggaactgcagaaatttctcgagacagatgtacttgctgaagggctatctgtggatactcctttttatgttgttactgaagggaaagaaccaacattcttcactcgtttctttgaatgggatttctcgaagcaaaatgtaagtgcacctcccttctagaatttgagtacacattttacagcacctcataagatgacaattttactactttattgtacagctaccgtacaatactttatacataatcgctgataaattcattgaagaattttgtcaaaaatcaattcaaatcatcctttgatgtgaaactattttctcacttgaaatgtttactatagttctaatcagttgctgatataattttagggtgggttaactaaaatttgtaataataatttcaaacttaaattatatatattgccttttttttacataaatctcgaataaaattattatataaattagaacaaattttagtatctaaataataatacgaggttttatgattttacttttagtttttttttatgtgggaggttgtgttaattatagattaaatataattacacataattcattaacataaattaataaaaaagttttttgtaatttgaatacttaatgttaatattttgtagtttttttttaaaagaaaagagtagatttatatataaataaaaataaaaaatatagctcaagagaattaaattcaaaaccaggtctactaagtaatgaataaacacctatataaattatgttttctaacaattatttattgtttctatttctaattttatatgatctgttctgaaatttgagagtgggcttaaaccctccctcggctctaggtaggttctaatccatgctgactaaacaatattgctgaacagaaaccataattttttaatatgggatcataccatcagattaattttgacttaaatttccggtctttatagatgcatggcaactcttttgagcgaaagctggctaagttgaagggaaaaccacaaagtgtagaagtaagtgatcccacgagataaagagcttcttatgtccataaaatactgatgaatatctacgccttgtatgtttttataatttctcatttaagttttattatattcaatgtcagttttcagatcttctttaacaatcttactatgaaattttctattatcctttattgcaatttgcaagacaagttatattcttttgtcatgatgtcatcaacaaactaagcaggctcctttaagaacctcttggaaatcatactcaagggagagtaccccaaacggcctaagaagcaggtccgtgagttcgaatggccagggaagaagtccatctcctgcaccaaatggttcaagctcaaattggaagtctcctgtcagtcgcccccagtccacttcaactccaactgccagggaactcttttctgaatctcctcgtagtggtagtagtcctggtaactaattatgatcctaagtttgttgatttaagttctaactaaaatgaaaagaagaagctgatttcatttgcatgattagatttagcataaaaatactctactgtacttcgatgcatagtaacaatttagaaagtgacaactgaatatagtgcta

SEQ ID NO: 243578 - DNA, 3059 bp, Cannabis indica
ccattgatggtcatgcaagctcgtgttgggctcttggaatagaatgctggtggcggaaagcacatggggtgagccttttgtttacatgtcttattttgtcttcagcagttcctttgacaatttcattcaaagagaacatgtattgattagttctgccctgctgcttacagttctgagctggcacagaggattggcattaacgaaattgcagaaagcatgatggcatttaacaccaactacaaagacaccggcctgtttggtgtttatgctgttgctaaggttttctatctacttttaacttcaatgtttgctttgaatttttatgcaggcagcatctttgatgcatagtattgaaagccacaatgtacaaatatattcaagcattttttttctttgctctatctgacatctttctcttgataattattattaaacttgtattaagtatgatctagtgtgtctttggcctgcattaatttgattgcatttttttaatctatgttggaaattgtctcagtgtttgtagtgtatattaaatcataactgacagtcagttacagatggtatgttatgtgtatattttctttaaaagtgactttaattgcaatgcttgatcctcttgtttcagcctgattgcttagatgacttggcctgggcaattatgtatgagataacaaagttagcttatagagtttcagaagctgatgttatccgtgctcgtaatcaggtattcacattctacttttactggctctagaaacttctttgagaatttgtcatgtttgcattggtgtaatcatggaactgatgctatgactgagatctttgtaatttagattagttgcctcatatatccatatgaaacggttgtcaaagcagttttataatactgatgttgccaactgtcttgcccaagttttgttaaatcgacatcatgaaattttaatgttgcagtatgattgcagtagattaacctatgatacagttgtggtagtcatgacaactaagcttatttcctgtcattttcagctgaaatcttctctgctgcttcacattgatgggactagtcctgtagcagaagatattgggcgccaggtatatttttttttatattaaataagagtaagaattagatcaggataaaagaattggagctttacttgatgccaaagtttttttttaacattgtttttttactattattttatgtttgtattttatatgattataacctgggatcgcaataaaaataatgaattgtacgagtattgggttccaattaaaaatggtgatattccagagctggatggtgtcgttctaagaattgagaatagtaactttttacgttctaaaaaaataaaatagtactctacaggttgtaaattactgatttattgttgttttaaatttaatttaattatgctactattcagcctttctgaattttctactgataatgaaattttcttgcagttactaacttatggccgaagaattccgttcgctgaactgtttgcaaggattgatgctgttgacacaagcaccatcaaacgtgttgccaaccgatttatttacgacagggtaaagactatagtgcacccctaaccctttcaattaacacccataattttgaattacatcagcatcactacattgtgttaccttacaacttgctaaggcttgtcttttattcccgacaggatattgctattgccgccatgggaccaatccagagtttgccagactacaactggttcagacgcaggacctactggaacagatactagtttcgttcttataattatttccgcacaaccattctccagcagtctggcatcggatactttggttgctcttttgcaattgttgtccttcaaaagctttaaaggctggtttatatttttttcaataaattttttttagatctttccttcccaacatttcattttcggaaaataagcaatgcacacgctgtttttcagtgatatatactgtgatttatcaaagctgagagtttttccagatagctcttaatgtcgagacctccaactacaaagtgtaaattaccgtttgttatttaaagccctaattttctttctttctcaactaatgttttcggtcattgatggtgatgatgtaaacctctgattttgacttccacatggtattaaataataatcaagttacatagatgaagtaagtaaatattgcatataacattaaggccgacagtacaataaaatacagcccttaaatgagtttggttggatttgatttgtttttttaaaccaaaaccaaaacgcattggtactctatggaggcaaagtctttaaagttggaaacctaaccttgtgttctcctctctcaataagtacatttacatttatttaacgtgtctgacacagagagagatgaagtgtgagtttgcgttagttctgaggttcgtggttgtttgttgaggttagttaaaagggcgatgttgatgggtctcattgtaagtatcggattcacaaaacccaataatacttaatgttatagaatcaatcaaacagttacttcaaagcctttttgttaaaagtttcgcatataagcttcttcgatcctatcgccgcctacccaattaaatctgttttcagatcagaaataaataattaaattacccttctttattcttcttcttcttccaattttggcttgtttttggtcattctttggtaaactcggatctggggttgtggtgttcttgttccattaccagttccgtactttggtttcttctattaaaagggttggtttcagttttgagtgagaaccactacaatggctacattcacggtgccctgccccaaagcgacggcctctaactcattgggtcgcgttggtttgacggtcaggaattctcttcctttccaccacccaaggcggctcacctttcaaaatgccgataatgcatctctctctttcggctttcaggttagtgtatgtgtgtatgtatatataaatatcgtttctttccgaatcaaatccatggcgtacctactctctctcacttttcgttg

SEQ ID NO: 243579 - DNA, 1766 bp, Cannabis indica
cctcttcatatatccacctagagattctacaatgaagaatatcatcgaccaagattagtacttagttatctattatcaagtggggaagtgttttactttaattaagtttacttctatttttgaatatctctacctttctcttaagtagtttgcattggcaaagtaaatgggtgcatcgatatgaagaatgagaactccaggaacactgttggcaattgggtattgatcagtgcttctgaagatcatggagttgggaatgttgccaagaacagtcgttcttggtctagcaataaacagaagaactctcataaacgaaattgtgacctgcataaaccaacaaatcatcccaattcagatttcattttcaatcagttcaattattcattgttataaggaagagaattaagtttggtacttactgcaatgatcagaccaatctcgacactggcgaagaccacacccaggtatgctcccatgcagatgacaaagtcgagtttgtcaatcttccagaggtgaatggcagatttgtagtcgatgaggctgatcatggcgacaatgataatggccgaaagaaccacaagtggagtgtagtggaacagtggtgtcaagacaagagagtgatcatcactgccatggccatgacaatgttggagactgctgttttacatccagcgttaaagttcacagcacttctagaaaatggccctgcaaaatcatgcattatattattcttctattcactaaatttatatatatgtatatatatattagtataatactaatatatatcaaagaaaggtaccagcggttaagtagcaagaagtacaagagcctgcaatgttcatcatcccaaaagcgatcatttctttgttcccatcaatatgataattcttgaatgtggcaaagcttcttcctactgctactccttcctgcacatttacatcttcacatatttactcttctctttcactttatcatattacaatatccaatatcataatgaatattttcaaccattaattaatctttggtgttctgtgcatattattaaggttaacttagttaaacgggagcatatggcaactggcgagctatgcctattatctaatgcgtaattggagatttgagattgagacataattaatggaataaataatataattagtaattattaccgcaagaccaataatgccaacgacaattcctgttttaatggctaatgtcagatgtggtgacccaaaagccagctcagacactgttagtggattcaacccttttttcaggtgtccaatctgcaaaaatacatatacacaaaagcaaattagttaataaattgattcaacttttggttgattctctttctataattgaggtttgttgatctgtgccatttttaaatatgagaaatgtatgtgcggtaatattttacttagtttgtgttagtactcattaattattatatatatgttctgctacacagatcagacctacatatgcacaaatagctataccccaaaatagtaaatccttttttttttttaatttattagtagattttgtcagccaaagttgacactacaaataatatgtatagtactagaatgactagatatatattagttggtcatgtcttatttaatgaatccattatgataaagaatattatacgtttgttggtctacaacatgtgcaaaagagatgggtgtattgtatgtaagtttgtatatatttatgtgtttctaataatttagagagagagagagaga

SEQ ID NO: 243580 - DNA, 3263 bp, Cannabis indica
tatatatatataaaagaaaatctcttaactatcatcttcataaaaaatctgttattttgagcttttttatatatcttattactctgtaacaatggcgacaaagtctgataaagccataggaattgatcttggcactacatacagctgcgttggagtgtggctcaacgatcgagttgaaataatcgccaacgatcaaggaaaccgtacgactccttcctacgtggccttcactgacacagagcgattaatcggcgatgcggcgaagaaccaggtggcgatgaatcctcagaatacggtcttcgatgctaagcgtctgatcggccgtcgattctctgatccgtcggttcagagcgatatgaagctctggccgtttaaggtgatcccgggacaaggcgataagcctatgataattgtgaactacaaaggagaagagaagcaattttcagcagaggagatttcatccatggtgttgattaagatgagagaagtctctgaagctttcctcggtcactccgtcaaaaacgccgtcgtaactgtaccagcgtatttcaacgattcgcaacggcaagcgacgaaggatgctggagcgatttcgggattgaacgtgttgaggatcatcaatgagccgaccgccgcggctattgcgtacggattggataagaaagcttcgagagtaggcgaacagaacgttctgattttcgatctcggcggtggaacttttgatgtctcaattttaacgatcgaagaaggaatcttcgaagttaaagctacagccggagatactcatctcggaggtgaagatttcgataacagaatggttaatcatttcgtttctgaatttaggagaaagaataagaaggatattagcggcaacgcgagatcactgaggcgattgagaaccgcttgcgagagagcgaagcgaacgttgtcgtctacaactcaaacgacaattgaaatcgattctttatacgaaggaatcgatttctacgccacaataaccagagcgagattcgaagaattgaatatggatttgtttaagagatgtatggagccagtggagaaatgtttacgcgatgctaaaattgacaagagtcagatccacgaggtggttttagtcggtggatctacaagaatcccgaaagttcaacaacttttacaagacttgttcaacggaaaagagctctgtaaaagtataaacccagacgaagcggtggcttacggggcagcggttcaggcggcgattttaagcggagaaggaaacgaaaaagttcaagatcttctcctactcgatgtgactcctctaagtctcggattagaaaccgcaggcggtgttatgaccgtactaattccgagaaacacaacgattccgacgaagaaggagcagatcttctcaacttattcggataatcagcctggtgttttgatccaagtttacgaaggagaacgagcaagaaccagagacaacaacctgctcggaaaattcgaactgaccggaatccctccggcgccgagaggtgtgcctcaagttaacgttgttttcgatatagacgctaacggaatccttaacgtttcagctgaagataagacggcgggagtgaagaacaagataacgatcactaacgataaggggagattgagcaaagaagatattgaaaagatggttaaagatgcagagaggtataaggctgaggatgaagaggtgaagaggaaggttgaagctaagaatgggttggagaattacgcttataatatgaggaacactgttagggatgagaagtttggtgagaaattggataagagtgataaggagaagattgagaaagctgtggaggaagctattcggtggttggaagggaatcagttggcggaggttgatgagcttgaggataagcttaaggaattggaaggtgtttgtaatcctattatctctaagatgtatcagagtggtgccggcgccggagccggaggtggtgatgttccgatgggtgatgagtttggtggtggaagcaatggtggtggtggtggttctggttcgggtggtgggactggtcctaagatcgaagaggttgactaaggttggtttgttgtcgttttggggttggaggtgataagttgtttgtcgttttggatagttttttagttttagtatatgtaacgcatgtttacagtttatgaaaataaataaataaaatgagtctcttaagtaagtttctttaattaattcatctttaatatatctgatctatatataatattagtttaacatttttacacgtgaaaatcgataattatttacacgtgacatttttatgtttaacttggttaagtatctcaaaagtgtcaacaaatgaatagaaaaagtaccataagatgagacaatatgataatttgacttaatggagtcagtgatataataatgagaaactattgataatcctaacaggtgttcgtaatttcgttggggagaattctgatgcgacttaaaagattacactagtttgcatattcaagcatttataaatgcctgttctactcactgtaaactgtacctcatcaaaagggattgtttgaaatttgtagatgatctagcctctaatgctagataggacatgtaactctactaacagcaatggaatcgcagggtgcctacgtcgagttcggttttacagggcgaaacttaattataaattttgatgaccatagaagaagaactagacttagagctcaacatgaaagttgtagatctcgttcttagctttccggaatatcttgaatcgtctaatttcgagttgtattgaagaagttatggccaaactacgaatcacgtgacataaattttttggtaggaagtcatggccacggcgtggaagtcgtggacgcggcgaggctgctcgtggccatagcgaggaggtgatttctgggcaatttcgaatttaagaacccttaagctacaaaattgagaaagaaacttagagagagagcaaggaaaatacaaagattgcgacttctagtgttcttcattatagttcttttcttctccttaaactcttactatttattatgattttgattataatgtttagtttcgatagttttcttttagttaagggttatttcaaaactcgagacatgaatttttaatttcattattacatgttaatttctagcttccattatatcaaattgtttctactcttctatgttcaatgtcatgattattgttttaattttgtttagatgatcactaaattaggttttacttt

SEQ ID NO: 243581 - DNA, 2279 bp, Cannabis indica
ttatgttgacttgcaattgcattggttgtgtcttaaaacaaaaaagagagaatcctaagagatattattcttgttttattttaaagaatcatttattattttcagtttgagcagcaatagtactttagtggaatgattataacatcgtagtgattttgttcatacatttatagggttcttcccaaactctcatgtatctaactatcacgataatattatacactaattgttcccttcccctttcattgtttgtctatgtagggtgttctgccatcattccaatagtgaaagatcttgtgccaattttattgaattattttgaagaatatattccttctgttaaagctgctccattatatgatgcgcagtcattcgattgtatgctttgtttgctacagagcataaatctttcaatcaagttctatctttgttttacatatggagacaatttgaaactatggtcttcgtacaaaggacttgatgcaaatgtttgggctaaaactatctccacagtcatatcaaagaaattaatagttgtgtttcccctcaatcctgtccatcgagtttcagagaaggtaaagattgattcacatttaaacctaataaatctttctccctggactttttattttttaaaaaatgattcagcatccgtatattaatatcgattcacgtttgctagcttaatgtctttccgctaattctgttctcttgttacgtgtgtttcttggcaatgcatgaaattttcttaaatgtttgtgaatctaaggcaagactttaaaagttctttattgacagtttttctttgctcttgtaattgtaaattttatttgttttttgcattgatagggtgcggaaatgtattataccttgaattccacaatcaccgaattttttctatacttgagtgaatggatctctccaggtgtttcattagagcatctctttgaatttatcgaaagtgcactgcttggaaaggttagaattttgcagcactatattcttgcatctatataacagactacatggtctttaaactttgttataactgcataatacgtaaaaccattttatattacgttataactgtctttgttataactgcataatacgtaaaactgttatataatacattataactgcataatacgttaaaccatgttctttgttataatagccttgaaggttgagatgctttcattttcgtttgaagtttttttttttatctaatacgagtggggaggtttcacttgatgttaaccattttgcttatggtgtttgacagagtgacactcgctctgctaaatcagtccaggagaaaattttgcttccgctacttccttttattccacaactcgtttcacaattgtctagtgactggaagtcccgtcttcttaaggtatttaataatctttttttgatagatttaattacataaggtgtttaataatcagtttgagatattaatttaataattttgttaccatcttatctattttctgtgttttgctttcactcttatatactgttgtgccaaagaagtccaggagaacttacatgtatttgctaaactattgtttatgatttcaggcatttaccaaagcttttacggaatgcaagccacaatcctcacttaaattggcttgcattccgataatcgagcaaatgatatgtccagtgagtgttgcttttgcttctgattgctttttggctcctttatttatttttttttaaatggcacatagttctgattttaaaaattttgtcccatatgtgaattttatacaaatctacagacagaagccatggtgtatttagtacctgacattttggaccatcaaatttcttggatgcgagaactttcggagttgctattgctttgtgagaataatcaatcttgcggtgaggtaataatttacactacattataaacagttcttggatcaggcagaaaggtgtcaaatttaagcagtggtgtgaaggattatattgggtactgtatctcaaaagttatttttgcttatactcataagttgcatattaaattctgcaggctgtagtacgccttctacgccatattgcagtgagttgtggaaagaacccttccttggcatgtgaatttgaatttatacaatactcgctgcgagaactttacataactcgtcttgatgatggtaacaattaatttttttttagaaaagtatattgttttattacaagcgatcagaaaacaggtcaggaaaatactgctaagtgctaaccaccttattgtacctttc

SEQ ID NO: 243582 - DNA, 2562 bp, Cannabis indica
tataaaaaaatacaacatagtttgtaaaagtgtaaaaagaaattttaggcacactatgtaatgatgatatattaatacgtcatttgaagtgatcgtataagtattatgatgtgtattgtgtattttaattttagggtacatatatatgcatgtttccaaatttctaagctggtcgccaatagtggtcatcaatagctctaaatatagaacgattcatatgtgtttggtatgcagtcagttgcaccacatttgacccttataaatttatatgtatacatacattatatatatatataaattaatattaaaagtgaccatatctaaagacagcgaagacctctagttgttgataggcaagcgacccacgaaaagctagctcacatgataggcgtcaaaacaaaacgtgaagacaagtattgaaaagaaaaatagaaagggttgaaattaaaacaaatattataatgttttctttatctatgtaccaattaaatttctatgagcactctccattattgctttgtttgattgtaaatagcaattctagagatggaaaaaagaaaaagagatataataagtattaataaatctaataaagagagtgaaatgtacatgtcacatgcatgtgaaccatatttagagaatatatcaataattggtgcatttagaaaaggaataaaggtatgcacttcatcatgggtctataacccaaagatgtttataataagtttttgacagagcttctatatcataactttataattaggctttggattcttcttatgaagggaaagttccttaaattagtctcttttattttgatttatcaagacaatatcacacacctagtcattacatatatgtatattatgatttggactccatgatgcttttaatagtatatgtatataattatataggatcaataatcataataaaaacttatcgagggtattcaaattttatatatagtagtgttaaccacatttcccccctttgcatgagtctttaattatttagtttaagaggtgtcaaaataaatatgtagatacactttataattaaattgagaaaataaattaattacacatatcaaaaagaaataagtttatttgtagtagttactcctaattttaaatgatgaatataaatatattctatatattgataaagtgattgaataacagggagattattgaaaaataaaatcatgaccaaaacaatatatcagatagaaaaacaatattcaactcattttggtaaacacatgttattaattgtcaaaataagggaggaaattaagagatatatagtatgaagacacaacaaaaagacctgaaaaaacttcataaaaaaagaacctgaaagtatctttaattatacgtgggagggtggcgtgacttttgataataagagaaaattatgaagactcaagtgatacaaattcaaaacattgaagatttaattagaatatatagaaatataactatagaaatctatctattttcaattcaaaaacatttgaaagcaaataagtagttcaatgggaaaatcacccttgcacgtacaattttgtacaaaaatcccaagttaaaaatcaactaatacgtatgttaatttaagtaaatttggtttaagttcaactgtgctagtttggcttttcctcacgtaaaagagatcatatttagtagaatattggttaaaatatttagtttgataatgattattattggtttccgttttaacaatatatatagggacatgattttgtcttgtaattatactttcacggaatgtattcccatgatgtacagcagcgagtgaattactaaaattgatttaggggtaattagggttaaaaaatagtaacgtacactgacactaatctaatgtaccctgatacccatttaatgtaccacggaatatgaaagtacgggacaaaatcatatccctatatatatgtccatataccatgcgttatgtaagtgtataaatatctatctaagttatatatacgcaagtatatttgtagtagtttttgatgttaaaccacattataatgaatgagactccgtaatcaacttgtattcctatgcaatattgcaaaggccatatattctttcgtaagctttgaatgtgataaatatattatatagtaaaaaaatagtaaaagcaaaataccaggaaagaagaagacacaacacaattccatatcaaagaacaaaaaattaaataataatttaaaaagacaacggtgacgcaaaggaggtttggaattggatgatctgggaaaccataatcatcactgactttcatgactttcttttttcatgcccaactttatatttatattttaatttaagaattatatatatagaaaataagttgattcaaaggtaaaagtatatataaaaatattgagttagtgatatttacggtataaatattttatatttttgttttatatacttaaatattatatattatttttcgatgaattaaatattttaaattacatttctgttatttccgttattacttattagagtgaattagttgcttgag

SEQ ID NO: 243583 - DNA, 4840 bp, Cannabis indica
ttttattttgctagcagtttactcaacattcccagatcaattcagaagtggatagtgcgagtttcttccaaggttcaccgaagaaatcaaaagagagttatgggagaacaaagtcaagggaagggtgaaagatttcgttaaaatgttcaaccagaaactccatcaaaacccaaagatggatcatcatttcgaagccagagctgtaaatggaacaataaattcaattttgaagttgaaacaagtattaacacagctgtagctgatgaaaaattgaagatgcatgaggtaatatgcataatattatggaatggtactcacttctaattattggtgatgaacttataaaatctctgatgatattttagttgagtgaggatctgaagcactcagcaaaaccatatgcttctacaccggggagcccgaaccaagccactagcactggttagtaggtgctttaatctataatgtggcataactaaagagccattcaatttggcatagtatgtgatgtgatgtctaagagtgtttcaccattatcgtttcaggttcattcccagataactttaatgttaaagccgacgaatcagatgagcctttccacgagaacttccaggtataactacttgatggtataatataagatctatctaccttgggactttgatgagtaagaacattcaaagtaggactacaattcgaagttggaatgtcaatagatatcaactcatttctatccaattcatgatcatgtttttcttttctagtagtagtacagctgttaatgccaaacacaccctcacagatagagagaaaacattgaacctgaatgtccttgtccacaatactgatttgaccatgcatcaactgtccctgaatgcagtaaaggaattcaaactcagaatatatttgctaattaatgtgacaaaaatgttttattttataataaccacttacaaatgacttgacaatgccaagtcctaagccagtcccttattttaagttcataagtttctttgtcttggacattagttttcgaaaagatccttttgcttttcctttggaattcctttctttgcatcatcctcttcaaacacaaagtccataacatgtggatcattcatgacttgatcacagtcttcctcgtcggctttgttcttgtaaaacaagcatggcaatattcggattagactttgtcgatttgaggaggaattaatgggttaaacttggttttttcacccaagctcaaaaaactgtgtccatgttctggggtacattttatagcattgcttagaaaattgcctagaatttgtttaagctttattctatcacctttgacatgtgagaacttgatcacagagacaccacatggatccaatttcaaatcaacttttcttttagctccagaagagtagtaaagatcaactacctcttccaactgcatcattccagcttaaattttgctagtgtcaagagcagtgttcactatagctaaaagccataagaatatgttagtaatgtcacacaagaaacatttaatcatttgcataataatcatttgtaaaatggtcttttgcaaaatattattcaaaaagaaaatgtcattttgcagagtaacattaagaagtaaaaatccatttctaccaataactccaatgctagtatcttaagcgaacaatgtcacgatgaacaagcaccagcgtcgtgatgatgcctaagaccgaaattccaaaactgataatattatcttcagttatgtgaatcaataatcaacactacttgtatatgttgttttccattttacttaaatcttgtttggttgagatgattggcagataaaagaattaccccaaactgtgaatgacaacctggaagtggaaactggcccaaacaatcaagaaatccaggtaatgtaaaacataagactactcacataaatatataatgggacctctgaactgtttgtatctaaatagtacttgatatataataatgcaggaagttgagactaagattcgagagtggacaagaggtaaagaagggaacattcgttcactactttcgactttacaatacgtaagtgttgatgagataataattcatgtcaaaatccacacttgtatttgtttgtgaaagttaaactaattataaggctatgcaggtgctttgggctgagagtgggtggaaaccagttcctcttgtagatattattgaagggaatgccgtgaaaagatcatatcaaaaggctttactttgtttgcacccagataagctacagcaaaagggtgctgcaactcaccaaaaatacattgcagaaaaggttttcgatattttacaggtaccttcctaccaagtactactatcatttttcacaacccagttggctaattcgtatattattgtgtatatattttcttataatttgatacaggaggcatggaattacttcaactcattggcttcagtgtgagctagctagaaaatctacattggttatgtacatacatatatacattggttaaaactcgattggtttaaagaaaggcttggaatttctgtgtttgtaattgtaatgtgatcttgtataccaggaaaaggtgaatttattgaaggagtctggagcatttgttttagttgtatcttgactactttctttgaataaagtgtataaatggttttgttgcatggtgatgctgaaagtcttgtcaaaatcacttaactccataactctaactcattgccaattgctgcatagtatcaacagtttcttggttgaattttttttctcttttccatattggtaactttatgttaatttttagctttggacttgaatagaaagaaagcaatttagtgaaactcattcaccaaaagcttagtactttctactattatatagaggatttagtaagaatcgatgtgtttggaagtaacaatgtaattattatagtggtaattacatagtgtagtaatcacactatatttaaaatacaaggtgtatttggatttgaggtgataatcatatatgaatttttaatatcttgttaggcaaaacaaatagtaattatataagaaaataatatttttttttgttgttaatatttaaaatggaaatttatagtacttacacagtgtaattatattcaattctcataggagcgtgagaattaaaaagtataattggcactcctcatttacttccgtccaattacatagttacagtataattgtgtagtcagacaaacatatcaaatcatataattacctccgattataatgtggctttttaaacgcgcccttaacctgtcatcaatagagaaaagttggattttgaaacgtagtttttatagttcatatatactactcttggccttatatcagagaatgtagcagcaaaaccattcctgcctcacattggtttggtctctcactagattcaacaatagcatttaaggacagacattgccaaaatagataattcaagacacattccattcttgctcttttattagttcaacttcaacctattaaaaagtgagttatcttatcctccctgacaaggcaacaaagggcccaaccttaccttgcatccaatgccattgtcagcccaaagtcttattttccttcttcagtttgccttaacatgtggaccaaaatgtgacagatgagaattttctcaccatgccagagttttcggaagacttaagacacaaaatgcaatctatattaccttaatggcttcagcatttgagcctttaaaattgtattgaggaaatcactgtttaagatcataaaaatttgatccacacttaaggactaagccactaagtaatatccactacttggattgtgaatcctaaattagtttcagcagagattcaaacaaacttctttactattactaagagcccaatatgactacagtggccataaatgaccaatagatctgcttggtgcaaccaaattgcattgatcggattataattcactgttttattagaacaaattgttgtaaacaaaactgattatttcactgcttatgtcatttatttcattctttttgtctattcccaaatagagataattttaatattattgcaagaatttcaaactttggtatatccaagatttttaaagattgaatttttataacataaaatggtgcaaaaagattgctttgtgtaaatagaatcacaaattcttgaaatgactaatatttcattaattagatcaaacagtaagaagagaagctaacaacccaattagtcataatataaatgtttacagaagaaaagaggaacgagtaaaatgtgttgaaaccctaagctctctcgcctctgatcctacgagccaactgaatatccttaggcatgatggtaactctcttagcgtgaatggcacacagattggtgtcttcgaagagacccaccaagtaagcctccgcagcctcttgaagagcagaaacggcgctcgactggaatcgaagatcggtcttgaagtcctgagcgatttccctcaccaatctctggaacggaagctttcggatcaaaagctcagtgctcttctggtactttctgatctccctaagggccacagttccgggcctgaaacgatgtggcttcttcactcctccggtggcgggagccgacttccttgctgccttggtcgccagttgcttccttggagcctttcctccggtggctttcttgctgtctgcttggtacgagccattgagaaagtaaatgtagttgcttttgttgtttgtttctcgggaaattgatggaaaatggtttgaagagaatattagatttgagttggattttatagtaggcgtgaaatgaga

SEQ ID NO: 243584 - DNA, 2487 bp, Cannabis indica
tggccagcaagtctacccaacatatagtccacaaaaggcaatggaaagtgatcttttcgtgttatcttgataagctttagataatctatacaaattctccatcccgtaacaatatgcattagaatgagttcattgttgttgttatttactaccatcatgccacttttttttggcaccacttggactgaactaaccaaagcactgtctgaaataagataaatcacaccgacatctaactaattcaacacttggttttgaaccacttccttcatagctgggttgggtcttctttgtgcatctacagtaggcctactgttgtcttccataagaatacgatgcatcatagtggagggactaatccctttaatgttagctacagtccacctaatagcccttttacgagatcgaagcactctcaatgtgtttcttcttcaatttttgacaatgatgctgaaataattactggtaaagtctccttttctcccaaataagcatagtgtaaatgattcggtaatgaatttagttctaggataggtggcttctctattaatggaagtggtctctcgggcccttgtcataattcttcatacttctttttataaatttgttcagttgaattgagccaattaacatactttatggcttcagtaccatcataatttttaagatttgatgaagtcaaaatcacttccaatgggtcttcaacaaaacttcccattgaaagctcttctttaagaacattgatgctaaaacaacaatcacatgcagtaggatactttaatactttgaacacattaaacacaacctcatcatcttggacccacaaccttaattcacctttttgaacatcaatcaagggttttcccgtggataagaatggtctccctaatataataggaacatcttcatcttcctccatgtctaacacaataaaatctgtcagaaagataaatttctccactttaacaagaacatcttcaattatcctgtagggtgtgttacggaacgatcagtaagttaaagagtgactatagttggttttgcttctcccaatccaagtctttggtaaaccaaaagtggtattaaatttatacttgcacctaagtcacataaggcacgatcacattggaaattttctatagtgcaagggattgtaaagctatctagatctctaaacttgtggaagcttccactgtataatagcagtacactcttctgtcaaagccacaaattcatagtcttccatccttctcttcttggacaatatacctttttaaaatttacataactagcccttttttttagtgctttgacaaaatgtatattgatatgaagtttcttaaacacctcaagaaatttggaaaactacttatcgaggttagccttgcaaaacctttgtgggtgaggaatctttggtgtaggttcttcatacttgggcttttccttctttggaaggtcttcagtaacatcctctttttctgaactagtagcttgttgatcatttatcttctttcccttgtctttcattgtaggcccttcataattggttccactcctcaatgtaattgattgacattgatctttggggtttaccactattgaactaggtaaagacccttgattttgatctgacaaaaattttgcaatttgacccatttgaacctctaagttatgaattgatgatcttgtttcactcatgaattgattaattatgtcaggtgatggttattttggcacttgaggaggtggtggatgttttggtatttgtgggtcatattaatgtctaggattaagcccataggttggtctatgtggtgggtaaagaggtagattttgtgggtatatttgttaccctcgattattactccatgatagatttgggtgatttctctaggcaggaataagtggttgagtatatatttttattcgtttgtctttgataattgccaattacttggacctgctctaaaagaacatcatcaactgaataattattactcacaatagtacattgtgcataagggtgaggactaccacacatctcacacatggttgtagcttgtaatttcattgcttgtgttgccattgagttttgttgtttcatctgcttaatcaacaaagaaatttaggcagtaagcatggtaataggatcatttctagaacactcgacactttcttattttctcattcagatgtggccatctcttcaattcatgggcttcatttgcacttttactcataaatgtacctctagcggctgtatcaattattattcttgtattaccacatagaccattgtaaaaattatgcactaacttcaatttttcaatgccatgatgaggatactttctaagtagttctttgaatctttctcaagcatcatatagtgattctccatccaattgacagaaattattgatcttttctcttaaacatgcagccttggatggaaggaagaattcgacaagaaacttttgggctagttcc

SEQ ID NO: 243585 - DNA, 2385 bp, Cannabis indica
aaaaaaaaaaaaattaaatgctattctaaaattacattaacaaacaaaacaggcccgtacggagtagattgatttgcaatttggaaacggtgtttcaaaaacgcttgttttggtttttaaatttaagaattactagtgaatgaaattgtattaaaaactcgattggctaccatactgaagtaaaaatccctcatcattgttaactcaaaaaaaatgtagaacacatcttttaactaactattcaccaaagcaccttcaccaatatacacatatagatacagattctcatagaaaaaagcttttccatggccttctttgttggcaatcctgtcaaatgatgaaacaaaagcaatgaaagaaataaagaaatgtagaataactccaattaaagcttatgcactagtgagtagtgaggaatacaaatctcttgtttttataaagatttagtacatgaaaagaccatccatccttacaaatgaaaagatccaaaacaagagaagtagcattcttgaacttccaaaaaaccaacaacaatatatgtatcaaaccttaactcagagcatgttgaaaaagcaattcttgaggaccttcttctcctatctaaaaatccaaacttttcataatgttttaggcttttagcacaaactttcagctgccctaatagtaaatagaaacccattagtaaaggattgcaatttgatactatttcatggaacaagtatcaaacagttaacatcttcagtcgaattatcaagctagtcttacaatttcatataagagctacagaatcttccaaactatttccttaatcaccaaaatagatattctaatcaaatcccaaaattgatataacttaaaaatgaagttttgcacaaaaaacattagggttttaagttgaggcattataaccttaaacctcaggaggacgaagtagcagcagaagaagaagaaggcgattgttgagcattaattttggtagaatcagcagcagatggtgggacataaatgcgtgctttcttgagaatttcagccacaatccaattcttccgtttgcttataggtctcgaaggatccaatctcacctgaaaattgaatcgaaagcctttcaatacacacatatatataaagagagattcagatagagatgcaaaaagaagacatactcgatcgccgatgttgcattgatcttgttcgtcgtgggccatgaatttggatgtgcgcttgatgtagcgattgtaaagcttgtggtagaagagcctatcgacggccacaaccaccgatttctgcatcttgttggagaccaccattcccaccacttgcttcatctctttccttaaaccctaattttcagaaacactgaaacagagtgtgatgattcccagttcaacctttttctgcgtctgatgcaaatatattctacttatatagttttctcaatagtcctttcactatagtattatcctattttgacccctattcttttgatttagatacagtcttttgccacaaactccttaaaatagcataaagaccttaattatggggattggtttgggactggtagcgagggtaaccaactaaccatctttcaatgttaaaattcttggattattttcacttataataataataaagaaaaaaacttattgtattgaattgtattttgttagattctattgtattaatattatttaatacaatagattgtgtaaagttataacatatttttaataaactcgacccaaacaccgactgcgggtcgggtctaaggtttaggtccggatcctagtttaggtttcgggtccatttcccggtccgggtcttgggtttgagtatgagtccaggttttaagtcccgggtccaaagtccagtaaatcttttgtaaatactataacacaaactagcacataccatttattatctattaaataatacaacttacattgtattaaaaattttgatcataataattaatataatatgttgttttatctaaacataatattatttaatatttaatataaaacgatatttatactgcctactaaacgaactcataataatttaaatataattatattcatcaattcattaaagaaaaataaattagtttattatttataataaaagaaaattagatagggaacttgaaaaatggaactcataaaaaaaatgtacaaatattaataacaataaaaatctataattttgatttaaatattgaatgaattaaagaataaaaaattacaaaaagtgattctggaagaagaaaaaaaatgaaagaatgttaattgatatatctttatatatatattaaaagtgcctatctaacggcattttttggtttaacagaatatattttaaaaataaaagaatattctgtta

SEQ ID NO: 243586 - DNA, 835 bp, Cannabis indica
aaagcgactctaaaggcttgttttgtagtagtgaaactttgagttttatggttgccattccttccattctcttttcttggagtcaaaaaagtgcactctgattattatagtaaacatattaaagagaagatccaaattaagtaattatactagtttatgaattcaaacaaagatcatgataggtaaatccttattccccattgtgtcatgcaatgatggaacttattgtggccttagataactttttcattttattatattttttttttataagaggggagttggggtgtggctcttctctttgggtgtaaccaatagagctccaaccccactcacgaatattcgccaagactctttgaggcgggttgcccttactaaaatactaggtgcatgaatgcccctgagatggatatcaagggtggctagactggcaaatgttgtcctcgaatttaagattcctaaaggagttacctagatgacctctagcgcgggaaaacacttggaagtgagcactttgccactagcctttgatatcttagagatacttgaatatggtgttggcattgacaccttattaggtgtatttgaattgaaatttgctttgaaactttaggagtattattggaatttagtaagggccttgatactctggcactagtaccaataacctataccaattaaaaccacaaaaaaagtaagataatggattcaactaaaatgggaattttggtagggtaagttgaaaatactacttttattaatcaattgatcaaatttacttttaattttatatttaattaaaacatacctttttttatatgtattgtacccaaaa

SEQ ID NO: 243587 - DNA, 1131 bp, Cannabis indica
attgattgagaaactaaattatgtttgcaggattcccttgagagcaaaaactctgcctgtagtaaattcatcgatcaattaaacaattctctggcggttttgggtgatagattaccagtcgatgccaggtatgtcacctcaataaatttgttggatttgtaaattgaaacatggaataatggttggtattgtgatgttttggcagagtggcttactcaaagatgggtgaggagatatgcagcttactattgtcgggtgttggtgagggcagaacgcgcgatatgcagctaagctgcttcgacacagtgtctaatgctccaatacccgaggaagtccgatctagtcatctgcaggacgcagcctctcttttcacttgctttctttctgagctggctgcaccaacctaacctacactttttgcaaatctttgaatgtttttgctttcatattttgtacacattgagaaagtccaagaggttttttctattgtatattttgctcgagcaacctattattattccaagcatgtagttttctgacttttgagataaattagttctttgctcttaattgattcagtcccttaaaaaatatattgccaaatcaagtcattcaattttataattcgtaagtcattattgattatttttttttttttatagatatattaatattttttttttcgtgtttgatctttgtattaaaaaataaaaaattggaagtacacgtaaataaataaaaaccagttaaaagtaaaaacaagaaagaattaaggggtgaaaagttaaactcggagtcccaaagagatattattattacctggcaaagtcgaaaagtgagtggggtccaccataggctccttccttctttccttccttcctataagaacgaaacagagctcattttaccattctttttgctaccgtacgccgtcctcatcccaaaagtagccaaagagtttattaaaaaaacaaagcaaggaggggcgtagtacgcatcccaccaccaccaccactgtcgaaatctacaaacaccaccccattacttctctctctctctagaaacttggttaagcttcgaagctcagtcgctgcttctctctctcaatctctctgggtcggttcgctgcgc

SEQ ID NO: 243588 - DNA, 2415 bp, Cannabis indica
aaaaaataaaacaaaacatattttaaataataaattataataaaataaataatatttttattattttgtttcaaaattttttatattttatttttaaaattaacaaactaaattaacctaatttcttatatatttaagttttaaatttttttttacatgttataagaataatttaaaaatattataaagtatttttattaaatacatatgaatttatactttaaaaaaaataaaaatataaaaaatacaaattttttatataaaataaactttgatatatttaattataatatattatcattataataaaattttaattaaaattgataatttattaaacatttagctcagattctttaaattgttctgctagttttttctggaaacagagttacagttattttttctcttataaaaaaaaaaaaaaaaatctttattaacaattagccattcatgactcatgaggtcccgtatatctatagatgccatctagaaagtcaaactgttttttatttaccaatattttttcttcgttggctgttaaattattgtgtctgcaaaaagagcgtgggataaacagtaccctcctacgtgtaccatcatgaatttctagctaaagacaggctcatattattattgagaactgaaaaagtaaccgttgatacctttcaacagtccattttctccttcagcctgcatgtcaaacacgtccaaatgaaatcagagttgtagttttctcaaaaattgataatcacatttaacattaatacattaatttacactcactcatttaacattaacattatagacccttcatgctaaatgagctataattgagattatttaatcatgtatatatatacattggtagaagcgcgtggagatagctagctagctaactagctagttaggtagctaggcagctaaggtaccgctgtctttagcaattggcacagtgacaaagcacctgcactgcacctacatacaaaggcaacaaaagcaataaggaaaaaggaggtgaaggaaaagacactattggaatatatatcatagatatgatatgagtgagtgagtagagagtagtacataaatcaattgagacaccccaaccacccatcatgtttggggagccgggagcaccaccaaccttttaattttgctaaagatttgactccaccactctcacccaaattacaatacacatcatctttctttgctatcattattacgaaatgtttttaggacccagtgtatttatgataatatggactagtcttttgaaaaaaaaaggcaaaaaactattcacaagaggtggggttggggggagtgatgagttgagtgaagctaactgttctttgttgttgtattttgagaccatggtttcagtccccacaagtgaccccactgcaaggcatacctcacctcaaccaccttggtccatggtactattataaaatggggtttataaaactagagaataactgtagtacttagtgagggtgcccatatttttttctattgataggagcaattttgtttttataatcttttttaatgataatttacattgtatataatctcatcagacttttaaaacttaaaaataatttacgattttgaaaataaaatttcaaatttgaaatatcatacatatatctaaaaaaataaacacatataactaaatatttaaatcatatttttagtactatatataaattatttacaaattacattctataactgtaatatatactgctattattataaaaaattgttacttttagaaacaatcttttagttacaacataaattttttgtgattaaatgtgattttttgtcacaataaaatgttgcttgtaattaaaacatagtatttaattacaagttgttactaatttaattttaatcacaacaaatattatgactaaaaacacattaatttagtcacgataaattattgtaatttttgtgactaatacttttagtcacgataaattattgtaaattttgtgactaatacttttagtcacgaaccttttagttacaatacaataataataatttataattagtcacaatttttttttttaatttttaattcacaaattttattacgattaaatgtaaaattttgtatagtatctgcatatatgaaactactagaaacctaacaacctctaaaaaataatagggtgctcttgctataaatttgttcaaattatgaacaattttttttttaaataaaaaactaagagcatttccgacaaaatctgtactttttttaaagtccaaaatcaataccttattttttagtaatatttcacccaagttttatgttttttattttaatttttattatcttatagtacatgagattttctatatttttttctctatatatcattaaaataacat

SEQ ID NO: 243589 - DNA, 1379 bp, Cannabis indica
tgtatgttgaagatgaaaatcataattggtgtcgagattcctcgttaaatatattcaattttaagcataacaaattattgaataataatcaaaaaaaagagagattaaatgttgatctaatcttatcatgtatagtagatgtgtttcttgcgttgttttatttgctggaatgaatttgaatttgagatcttaagtcttttaattcagattctagagcttttatatacttcttttgatttacttcctagcttatttgttttcccacacatcagatgggcaaacaaatacgtatttctctttacccataactattcatactttcttttactacatttttgttcaattcttttttctgttgtaactgtacctatcactaatgtaatataagttaaaaaaaatacacaaattaagaattatttaatcataccattgctttttttgttgttacattttacaacgggataacaaaagaagtatatgatggaataattgtttatttatattttgagcatctttttatgatacttcttaatttatattaaattaatgataggtactaatataaaagaaagaagaattgaatgaaaatttagtaaaacaaaggagtatgaatgacacatcttttgaagttatgggtaaaaaaaggatggatcttttctcatgtataaatatggtatttgccaatctgatgtgtgggcaaacaaatcctctaggaaacgaaatcaatgcaaatataaaaaagccttaaaaatctaaattaaaagagttaaaatctcaaattcaaattctttctagcaaacaaaaacaatgtaagtgacatatctattataaatgacaacaaggttagatcaacatttaatctctttttaattttgattatttatttaataatttgtagttcttaaaacttaatgtatttatgtgcaggtttctaatcataatgtcacatctttacaactagtttaagttcttgttatttaaataatttgtaaaggttactaaccaataaattatgttattgttatatatgtaggccaaaaggttcgtacgatgcataacaatgattcccgccaattatgatattcatattcaacatacgatatactccagttgtttagtggtctcttattgcttttcaaggttctccccacaaaaacatcccatctaaagcagttaaacaatgagaaatagattaaattgggttaagggtagtgataataataacaattgaataagtagtttgacgctttggactaatttcgctaatactcaacaaaatggtctctaatactggagacaacaaaaacctctaaatagagttgtgcataaaatgatccaatctaatgagaactaacagtcaaatattagatatctaattg

SEQ ID NO: 243590 - DNA, 1277 bp, Cannabis indica
aattattacattaaattatttgaagctgaatccttaattatgtataataacttagatgatgtcttcagtgttttttaacattgtatcacataattaatataaaaaagaaatcaaaatatattgatcaatataaatgttgcagtatatatacgagtcaaataattaaaatattaaagcttttctatataatcaaaattaaactcaacgggaaatcacattaattatttgctgtcataaaattaaagcttcgatatatattgctatgagtttcatgtgcaaattaagtgtaaaaaacaaaaccaatcacgtacgataaatatatgtcgttaatttattaaatcaaatactacccaagaccaagaggccatatatatatttattgtaacaaatatataaaaagatatgtaatacttgtgtactgaaaaatatgtcaaattatagattcataatttcatgattcaagattaattaatattgacagtactgggtatatagctaactataccaatatatcattgttcttatataactcgaatttattataaatataatttattgacaaattgaaaaggggcttacggtacgcccgcatgaaaaatattattgcacagaaacaactttaatttatcatgtatattatgagtgattctataatgcccacattctttaaaaatagatgtattgatgtatcatctatttattttgatattaaaaaaaattaattaattttttttccaatattcgtgtacgttataattatttaaaatatcctataaaaatttgaaataatttacaatataaaagcaatgttcaaacagtttattttacacgcgtataaaataaaataaagcaactcgtgtaacccagtatttgaaccctattttcggcttaaaattttgcaaaatgctttaaataattgtaacgtgtatgaacatgccataaacataaaataaattgactaaaacttatttaaatatatccaaacaaataaaatacagtactctttttattgaatatgcatatatatatatatatatatatatataaatatacatatcgtatatttattcatgacagagtgtcttgtaacttcctagctaccaactgtcatcatctttactttacttatctcaaactttaatactttaggatcacatttcgaaaagtaacgttcctttaaaaaggattggactaaaataatatgtaaaagacaagatcgacgtaattggatatttaacatatatgatgcatgcatgcatgagtcgtttatttatcaa

SEQ ID NO: 243591 - DNA, 2605 bp, Cannabis indica
ttatagcttatccaaaccgcaatcattgggttggcttattaaaatacctctaacccagccaacccaggccatgaacatgcctaatccaatgataaaaaaatatagtgtaaaattattttctaataaccatattctaagttgcagcaataatatcatcggatctgacacaaaaacaatatttctggaatcttttgtttgtaatgaaaacatgaatcatcagtctcgtacacttattcatttaataatttcatagggttcacagattcaaaactaatattatagggtttacattattcataggtttgaaactggtctaacaggtttttagagttttgaaactagtttcataggtcttaagagttttgtaatgggattgatctgttttatgatgattttaagtttctttttattattttgtttctaaattcaaaactggttttcacaccttaaaaaaaaaaaaaaaatacctatttttataattgaggagtaatttttgcaaaaataaaaaaaaacaaataaaaaaggactctgcaataatcatagttaaaaaaataatatatctatctattattttattttatttattgatagttttaattaccaaagataatatttacctaattactcgaacatttttctctctcaaaatgtgtaaaattggaatgcaaaggatggtcccacgcgccgaaatggcaaagaagcataatgatacaaaatgatcatactattgtagtacaaaaactacaaattaacgtacgacctcaaagaccactaacacatatcgtactagttttcctttaccaaaaaaattaaacaaaatcagttggccactgtaccaccgcctccggtttcgtaaaaccagcggcggcgccgcctcaattactagttagtggttttggcctgttcattgcacctcactctttactattcttacaagtaattttcggacttttcttacccaaaaattaaattaatcctctaataatatttctttaatccattccccaattatcacataaccaagtcccataaaaactttatgaaaatacagaatatataaaatataaatagggaatttaagggaaaaaataattatacattgatcatatttgagaatttcagacaaagcagcgatgttttgacaactgcgcaaatttattatggtaatctataaactaaaacaccttaattagttcgaatacttggaaataatgaacaaaatcaccaattccattaaatttacaaaattacccatttttaagagaaagcgaaaaaacaaatagaatatgttatgtggagctaaaacgacgtcgttacagggacggtgaggtttcggaggaaggtgcgtcatcgttgtcgtcgaagctccagagctgaccaacatcgctctcctgaacactgttggaagccaccgactgcccatccagatatgggatctgataaaacttcatgtaattctcgaacgccattagctcttctgacaacttctgtacctcgttatcttcttcctcctcaattgtgatcacttccacttctttcatcggcatttcttcttctttcactttggtttgggttatgctaccattatctccggcggcgttctgattgtgacccagcattaatccggttgaagaataggcaccttctgaaccggacccagaatgttcatctccagaagtagctgcagggtcggcaccagccttaaacccattagagggaaaagctccaatctgtttattgagatcgtaaccaaactcaatttccaaactctggggcagagtgtcacgaggttgttgatacaggggagtattatgggtcgtattcacgagttgggtttgagtttggttagagcgagatggttggattttggagtagctgtcttcttcgttgggaaaattgaccttggctttcttgccacggattttccgagcttctctgtcataggctctggctgcctcttcagcagtattgaaggtacctagccaaacccgaacccctttacgaggatcgcgaatctccgccgcccatttgccccagggacgctgtcttattcccctgtaaagattcttccttggcctcttgggtggcttttcaacttgcacaccatctgtttgcgaaaatggctaactcagaaccagactaaccacatagaagaagaaagggtaatgtacaacacgtatacttaagctaacctgtagagggtgcggatctcttgacgggagcaggctcatcatgaccgtgctggctaaaatcagaattgaaaaagttgttggtgttaagcttatcaaaagatgagttgggccatatatcagacgaggaaactcgacggactcctcggtttccatggatgaattcagcaattatagcaccgccacacattttgaaaagagactactttgaaggttgaatgttttcttgttgtgaacttgagagagagatgagatttgatgatgcggacactgaaaagggtttaataattaagtttatggaatgcgaagaagaggagagtttcgaggggtttaagtagtaggacttggacaagactgggttaggtgggtgggtgggtttttgctttcggaattattaattgttttattttattttt

SEQ ID NO: 243592 - DNA, 2002 bp, Cannabis indica
gaataatcttcaccggcgccggaaatttaacaaatagtaatatagacctttgcgcgcctcagcagccttccttgcgtcgttgtggtctgtaaaactggaagagaagctctctcccatggggttgccagaattccctttaacggatgcctctgacaacgccatttcttgtgaactcaacatagatctctcataggaattcttctccacaagagaagaaagagatttcttacttcttactacaaaccctagtctctaaccctcaacaaaacacctaaaaatccagaaataaaccactccagctcaaccatacgcagctcaaatcccttaactttctctgtaacctaaatcaaattcctaattagtctgaaaatcagcaaaaacccaaatgattcagcccgtttacccgcaccttctctctcaaactatgtcttcttcagctaaaacactgcgtgagccaagaaccagaggaagaacaccaaacaaagacttatttttctctctctcttattcgcgtctgaaacaagagacttaaccagagtggtcaaaacagcgtgcaatgatttcaaccgcggtcaatttctaaccctccaagctctcacgcaaccggaagtaaccggtggaccttactttctgctaaagcagattaccgggtagaaccggtaaaccttaatcactaagcccaaaaaagcgacacgatctgaacgacgaccactgtgttaaatattgttattaatatttaatcagaaaaatatattgttattactaataaaataattaataaaaggcggcttggagacaggaaataagataaaagaaaaaaaaaggtacaaacggcgttaagatgttgccgtttgattagggtgacgtttcgagattggataggtgataagggtggagagcgtgacgggcgttaaggagtcgtcgtgagtggaaaagttgttgtgtttttattgggaaatggttttgtcgtagtattaacaagcagggggttgagattggatggatgaatatgaggtagtctcgtcttgtgtgagtgtggtgcgtacttaacgcacttgcttttttgaggcggcgcacgatagcacccttggtaccacactactccacccaccatcaatgacaatgtagctcttgtcactagtctattacctttacttttttaaatctcttacatttatgaatatcttgaaaaactaacttaaagattaatattattcttttaaattgtattaaatgtcctaaaatctcttcatttaatccaataatgccggagacatctaaatttttttagaaaaatatatgcagttcaataaattattgttaaaaaaattacattgtttgggtattaagatttaaaatattactccttatcaaaaaaatatatttagtttaattaatcgtgtgtcatattatttctaattttactatggtgtggtttataaatattttttttctttcataatggaatgtataattatttagcaaacattttaaaaatagatcattttcattttttatcaattgcacaatctcaatttctctttaagaaattctgctatttatttttatacattttcttatattgtttggtatattatcttaaacattattattaaagtatatgatattcttttctttcgtaagaatataagatatacataagctcttttgttataagctggattttataaacaaatttagagatcattgtcatgttacctgctataaatgtaatgtgtaataattaaaaaaaaaatgtaacatgtaataaaataaactttagaaaaaaagataaattttatgtgcataatgggtctgaatacaaaaatttgtaattcaactgatacaaaattcattcatgcgatttgtttaaaaaaaattcatcaatacgatcagcaagaattgaaagcctcttacaataaagtgaacaacagacagattatttaaaaaatcttaaaacaacatgatttagaataaaaaaaaaaacaaacttagacaaatg

SEQ ID NO: 243593 - DNA, 4343 bp, Cannabis indica
tagtctattttcagtagatctatatgattgttgtttgtattggtttcattttgatatatttttttaccgaaattgagagatttaattttttggtgtattctgtgtgctcgtatttttctcgatgcttattggatacgttcttgacgggttctcgaaacaaatgtcccaagctcagggacattatgatggtgtgggttagctgcttggtgttcgtaaatagaaggtgaatgatctaaccgtagaggttgccaagctaaggaaggagttggatgtaacagagaacacatgcaagttgaaacaggaggagttagacgctgccttgaagggtcaggaggacattatagctaagtattggaatttatcaatagagatattttatgagtgttatatcaataatctcgaggaataatacaggtatatagatactcctctttgcgaggacttgattgctcgtggggcaattttgttcacatcccgaccagcacagggtagcacaatagaggcctctgccagccagactgaccaagcctctgccggccaaactgatcaagcctctgccgaccaaactggacaagcctttgccgaggtacttgccagccaggttgacgaaacgggtcaaacttctgcataggtacctgccgaccagggtactggcaaggtacctatcgtgcaggttgcaggtctgctgagcctgttttggagactcttattgctcaaattattaaggttgctacctaggacccaactattgagagtttgaacccatgtactccacttaacattcctgaaaacatttgaaggctttacttttttcatgcttttattttgcacttttattttgttcttgtatggccctaaggccttttacatttgaactagtgatcggctaggaggtttttaatcttgactttactttcttttgttacatatagctgaccgtgtagcttttaatctcgaaattatgttttttatgcttaactaaagtttgccattcgcacatacttagtgctccatttcttgcttaaaaaaacttcattttttgcttaagtatttttgtgcttgttcgatgttgtgcggtgtgggtgctcccaagtgatcgagcagacttatggtctcttggttacttgcaattaatcaagtacaatagacctttgcctgtgtattttcttaggaggacttgtttgcatgcatcttgaaactaaaaaaaaaaattaactgtaaaaagtcaatttattagcaagttattaaacacattttgaaaagaaaattttcttttatttattcattggtcttacaaatgcgttgttgttgtgcaacttacatatatttggtaataaaatcttacaaatctaaagtctacttgtaaaacgtaaattttggctactcatgcacgtcataccgtgcaaaggccaccactgaagattagtggtaatatagctctttgcataatccgtgtacggggaactgtgtaggaactactgcttaagagtagtattttttacaagttggtttcttagtattttctgagatgttctcctttccagtatcttggtaggaggactaattctatcttttcgttgtaccgactgagtttgtaagcaccttgacttataatttccatcacttggtacggtccttcccagttaggtccaaatactcctgctgcagaatctttgatgtttaggaatactcttcgaagcactaagtctcctataaagaatttcctttatttgacttgtttattgaagtatttgcttgtaggcatgcaactttaagttagctcggtctcttctttcttctatttcatcaagggatttgtcagcaaggagtggtttgttccttggtcataggttatcctcttgtgggatggtggttccaatttgagggaaagtattgcctcatagccataagcaaatgcaaagggtgtctgcccggtggccgtcttctcggtagtcttgtgtgaccaaagtatctctgggagtaggttgggtcaatcgccctttacctcttctagacgttttttcaagcaaagttcgacgtcgttgtcagatgttatggcgatttctgatgtgattgatagcaaggataggcagaatggtgcgttattgtcgatgatataaggtattttgtttgagttgccaggctgcacacttcctaaagcgaaaatggtgagtaatggagctgattgaatgtcattggtatcattataaaatctggaccttgtttgaaccaaacaacaaaaagaataaataagcataattattcaaacatttatgatgcgccctaaattcataagaatttactctagaaccatcaaaagtctttggcttgttcaaaacatttccggtacaaaatttatttctttggattaatatttatgttgaagttcttgccaaaatgaaacttaatatgaaattaaattctgacaatatattaattattataaatctggatatctttcatgtctagacagatctcatggccagacaagataaagtaacatgaaattagttgatatgtgtaaatgattaaaaattccatggatctaaattatgataactcaaatacatttgcaatttgcatatatgaaaatcattataaaaacaaattatatatttaatagtttgatcttaatctaacatattattaatttgttgttcaaaaaaaatatatattattaatttggttatgctaaaaaaataccatatttcttatgtttttttgcacatgggactagaattccttcgtcaagggacactacatggactagaattggagaagaattagctgatcatgtttgtccctattccagattatgatattcaacatacacatcctaaagaaataatcacattctaaaaaaatattgggtctcactttaatgataattttaaatattatatatatagtggaacttacttttatattttattgctttaaaaatttatgaacattttattatcttaataatttttaaataatttataaatataccatataatatttatcaaatttaataatacaacaaacaaaagataatataaacattatttcaatcttatgtaactattacatttcaacccaatatataatattcttatctaatccttcgtcatcaaacatagagcatgttgggacaaaggatttaaatttttatcactagaattgatcatttagttagaaggctattgaaaataatattccaactacataattaatccatgtgataaatttgcctaaagaaatttgtgatattttatcatattaattttaggaaaatttcagtttatatgtttcacatgttttagtttttatatgtttcaagtgtatccaattatttctcttttcttcaatatacacattcaaatcgtatccacacttatcagacacaatattgtataataaatattagttatttatatttttattaatgctaaaaacactaatgatatttagcattttcgtaagtattatacgatcattaatacaattaagtattgaatctcatataaattaattaaatgacttttaaagaaatatcgataaccaatttaattaagtggtgctaatacttaataacaatatttttatatttttaaataaaaccatatatcacttttaattatatatagatgagattaattacacatcattttatataaagagtgtttataatttaaatgtgtcccaatcatttttcctttccatcattaccaaattatgctaattttttcctaactttctaaaatagcattgccttaccactactgttatattatatattaaataatataaaaataattaaaatataaaaatgtgacaaaaaaaagtttaatatataatttggttattattttatataaaaatatatttatttagtactttatgttttattgaaaaacatatttgatattttgtgtttttaataatatttaattggtacttcatatttttaaattatacatatttagtaccctaaaataaaatttaatcacgataattttatcaatttaactaaacagttttcagctatatataatcaaataattaaatttgaatttctaattcaaaaaattttagatagtttgtttgtatttatagaattttatcaaaaaatttaaatttaggatatcgaatatgtatgacaaagtacttaataaatattattgaaaacacagagtacttaacttgtatttagataaacacaaagtaccaaatatgtacacatccttccatatgttatatagtgtggtgtgaccaaccactacaacattcaggagcaatagcggcgggcccctcggccgctattgctccagtttttggccgctaaagggcaatagcgg

SEQ ID NO: 243594 - DNA, 2082 bp, Cannabis indica
aagagccaaagtttcggcttgtagtactgaaatactacctgaaaaaaaaaaaaagccaaaaaataataggtattagaaaagacaatctttgaattaaaaataataggctagattcagattaaaacacctaactgaaatagtctaaaactcaactacaaaaagagaacaaaaacccaactaaaacctaaggagaactggccaaagatgttaccctttggctagtagcaacaaagaactcaaaacaaaaacacaaaaactcaaaagaagaaaacctatagacaaaacgtaaccaactcaaacaaaacagtaaaaaaagaacttgtaacaagcaaaacagtaaccacagtgtgaaaaacagaaaaagaagacaaaataaattgcctaataaactacaacaaataactagaaattagtagaaacactcgaataactaaaataagactaaaaacgaaaataaaatacaacttaattaaacaaaacacaaaccaaaataaagaatcaaaaaatcgtaaggaaaactagtatcgaacttcaaaatttgatacaatattaatcaagatctaaagcaccaatggctaacttaatattctaataaattagcacattttaacacctcaaaactcaaaaatttgtttctgattaatcttaatgctatcaaaataaaagaaaaagattattaaatacttgtacaaaaatctatcaaaattgccttaaaattaaccacatgtccaacatttgagaggcttgcataatattgacctgatcagaggcagagccaaatgtgatcatgtgggggcacatgaccccactcaacttattaccaatttatattttgtaaaataaattttaattatttttacttttgcccccacaaattttttatttttaatatttgttcttatataatttataatttttatttttatctttgtaaattttcttcttcatctctataaaatttgcatttattttctaataacaattatattttcattaatattttttaacaaaaaaattgcccccctaacaaagctggctggctctaccactggacctgatcctattatcttttgataggataatagtccctaagccaactaagcttgtagaactcaacactgatgcatcaacaataaatattgtgtgaaaattttcttctagtacacttctaggtaaatcgattgaacaactcccaatcatcaagtttggatactattcttggaaccttcatatgctgataagatagactcataataactggctatccaatgaacaatctgttgtagttgtcttagttgttgtccgtgaataattttatttctctcagtttatattgccaatgcattaataattattttttcaaaagattctctttctaccacttcagatgcataaagtagcacatttttaaaattaattacctctttcactttatgacaaagtgaaattcaggaacttctaaatttcttgtgaaaagagacaccaaaatatagcatgagcattcgacttacctccaaaaccacatagttcacaaaaattgtttgtgactatattttttctgttcaaaccattaccagtaggtaagattttatgaaaacctctccacgaaaaatgaaaaaatttattggaagttttcaccataataagatagttctattcacattgtgttttacattattatctatttgatttctatttatttaaaaaattactatttgtgtgttgtagaaacgttaaagaatttttatataaaatattgtattttttttttcaaactttacatttatattgtggtaagagatttttttatatttatactatttataccttatttttttttttcatttttactattcttttatttatttcaacttctataattttttttctcctctcttctctctttctttcttcttcttattcaatgctggccttttttttaatctctctttttgaccttattttttctcctctaatttttttttatctttttatatatatatatatataaatataaatataataagtataactcattacatcttttttatttgagtaaatactattttagactctgtattt

SEQ ID NO: 243595 - DNA, 3083 bp, Cannabis indica
tttgtgtgaccaaaattgtgtagtcatttaccaaattttaaaagacatgatagtgtgtgatgatctcttaacaacaatagatgtcttgtgtcttgattttatatatgcatattaatatcacactgatatagctgtacagcagtgtaatcttgttgcttttattcccataaaactttccatttcttagggagtgtctcatttcatgtcactaagatttagtgcttgaagcaaaacttgctatgacccacaaaacctcaacttgcctaagttttgacatttcttttttaaagaattgatatttgtcttcttaaatatagcctttaaacttccacaattttctgtaagaattcaagaccccttaaaagttttttattttcattttttaatgaattaaaaagaaaaaatcaccttgttctcttagcaaattaaataataacattatccattctcatagattacacgagagaatcacccttcatgtagtagtataataatggtgtgccatatatattatattaatgacttgtaacgaataggactatattataacacattttgtcatgaggtaggtgtgacacattattattattgctacaaaaatagtggaattgcaataaatataggagtcatatattaaatatgaaattgcagttgcaaggataagaggaggcaatgaagagtaaagagtgatgagttaattggtcaaatgcttaattagcttatgtggaacccagtcatcacaacccctctatgaggactcttttttattagcctctcatcttttaagctgatgtgtggatgagtcggcagtaggcccttcaagactaagaccttagaaatatcatacaccctccttttcaattccaacacctaaccatgtcagcaaaagattttaattaaacaatgctatatatttataattcaaatggtgatcaagtatagaaaaagttaaagtcacatggtagctagattcaattaggggtagtgatatatgacatctacgatgtaagtatctagtttaagctagtgagatggaaaaatattgcataatatatacttggtagttttttcctccacatcatcaaatttccatgagtacttaccaacacaaacaatttggaaagatcttattttctttcccaagtatcgacaaatatttgatatttttttttcttttttgaaatcagatatttttcttaataacaacattttcattcattttcaaggtctttttttcacattaaatatcaacaatcttataaatatccttatgtaggctagctcttatgagtctgaaaacgtcaacaccaatactttttcatcttaaatttttgtgcacaagatccacaatagtatatagaaatcctgttcttgcttccgtaggaaaaggtttccttttatgtattttcttttttttccatgtcacaaacacatcatctccttctcttcacatgcccaccaaggacccactaaggagatcttcaagattgaaaaattaaatgtcatattacgatgagtagtacgtagcttgtattagtagagtgttagactaagcaattacaaaaggagcaaattagaatcatgcatgtgagtcccaacatagtacttaattggttattttattttattttaatatctatgcatctattgtataaacaataaggtaatgttactccctttcatttaagaacattcagttctgacaaacaaagacacaatcttatgcatagttttttctgttggtgcactatattttgtccctttccaacttaaaactcctcaaattaactaccccatcttttttgtttgtttgctttttataaatgtagtctacggcctgcctagtcacatgagcagctttacttcacataaaataacatctgtctatgtatgcatgttaccttacgtactttccttaaatgaatggctgattgtttcaactcttcacattattataggattattcacacgttaagtaacacttcaaatagaatcacaagtattaatatattattttttccatgtgatcatcaacgataatgctgatgttttgttccaaaacaacagttaaatatgtccttagtttcaggtggcacatgattttttctttggagcacaatattattattaattgaaattttttcatggcttactagctaggagttttttttttttttaaggaaaaacacaatttattaaaataaatttgctcttaaaaaaaaaaactcaaaaaatatggacaaacatcagtccatacactctcctaaacaagtaacagatgttgcccaaataacaccattcccaagttgcaaaatggtactgcaagaaccaccaccaatagcagctaataaagaattaatatctaataaaatagactgaaaactaaaatttgagtgaagattattaatccaaccaattacgatagtaaaattactactaataatagagatactgaaactaaattggcgcacaagagtcaggcccaatttaattgcaagcacatctgccacattaacagaaaattcaccaaacacaccagatgatcaagccagccacaccacaccctcagcattccgtatcactccacccaatttgacaaagcccctcccagtaatcactgaagcatcaatcacaagactaaagggatcaggaggaggaagcatccaccgagtaggtcatttttcaactgggtttgaatagcgcaatcccaaatgaagacccttccgaatatcctctttgaattccgacaaatgattataagctaattttagaacaacatctaatcttgactgcttattaccaaatattactaagttttgatcatactaaagctaccataagataatcattatcaattcaaaagatgcacaagataattttttaaagagaaagaggagaatttttggcattggtccatatatacaacgacggagcaccgaacatacccccaacaacgtcacattggaaacaaaccagagcagaaaataaagcatatttcggagtttcagattcttctctgtatcgtgagcaataaagaggtacctaaactttccaggagataagctatgtagctactggtaacg

SEQ ID NO: 243596 - DNA, 1770 bp, Cannabis indica
aattttttttttttttgtaaaaattaatttttttttaaaaaaagtgaaacactataataatcaacataaattgaaatacaaatgtataatcaagtaatttttttttaaacaaacaaataatattaattatacttgaaataaaaactcaaaactcaaatcaatctcaataaaaagtatatatagtttgtttgatgcaaatttcgacaaaaagttagagaaaaaatggatgagtgtgactagctgaagaagaagaaaaaaattagttgatttggttttataaaattgatttttttattttaattaatttttgctaaatgggtaatacaaacaatttaattagttaattttaatttattttttattttttaaataatttttacttatttttttaaatttaaaaataattaatttacaaaaatatcataaaatatatttttcttaagcaaattaattttttggacggaatgaacaaaaatttacaagtgctatagttcaagagtatttttgccaaacaaaataatttaaaggagcaagagtttacaagtgcaataattcgagggttttttgtcttttatattatagaattgctaaaagactttaccggtgctagtaccctactctccttggtggtatactcatattggtgtaattaagtatcgagccctatataacttaaagaaaataatttttagagaatatcgttaaccaatcatggagtatcatcttttaaaaatactaggtactactggtacccaataacaatgtattttatattataatcatcaattgcttatatttcatcgccaataataatcaataaaattgttaaaagatatcactggtacttaacactttattcgagtgtgattggaaccattataatttttttaaaaaaataacatttaaaaaatatcactaattactaattaattatggaaaatgtgcaataataatcctcttatatatgttataaattgactatatatatgtcgaccaagtggcggccaatgccagctggtcaaatctaggcctaacttgatttttccagcaaactcttgtaattgggtctttgatctaaccatatatatgtaattgggtctatgatataatcatagtggataattataaatttcaattatattattgttcttcgcgtggacatataatattgtattaaaaatattacatatgtacatatttaaataaaacttaaaaatattgcatatatatatatgtcgtaaagctaataatcaacccacttttactaattgaaattaatgcttaattaattatatatatatgaataatataaatgtaatttcataaataaattattgtaataacatcaactacacataattaattattctttgtcaaacatgctactccactagttcactattagatttgttgattggaaaacgactacatatattatttgtatgaattttttagttattgattaagatacaaccaataaccaagttaagatacaaccaatggccaataaccaagttgacctcaatcccacatgtgtaatatagtttaagaaattttttatttttatactttaaaataaatttttctttttaattttacaaaaattcatgtagaaactcacatagcaacaactcacataaaattactagaccaactatagaacaactcaaactgtaaattaaaaaaatagtatatagaataatttccctataacttaaatattacattaaaagtactaatattatttttataaatataatcttttattat

SEQ ID NO: 243597 - DNA, 5596 bp, Cannabis indica
ttttcaagcttttcctttttttgaaattaggagagggacgcattgaacttggaacctcctttatgtgaagagaaatgcagtatcactaggccatgcatatgacacataagatattaataaatctaaaaacataaaaaataaaaccctaaactaaattccttactccgtctaccactcaaacatctttcttcccttcatcactcaacaggcacgcagcatcttctctccttatcgcattcacccaccctcccatatcgcccatgcactcgctatccttatctcatcaccttagacaaaatctagtattttactatcaactattaagaagaaaaaaaatcttatttcgagtaatttcaaaagatatcatttgtgtgcctacaaatgttatcgagaatacattccattattaattaggaattttttttaaacatgtaattttatgtattatatgattgttataaaattgtatattgtttgtacatgttttatgatattttatgtaatttttgttcttattattgaggcttacgccttacgcatagggaaaatgtctcaattcccgaattaagtttttaaaatcttgcttagttttaagttttaaatttgttttaattttgaaggttgaaaccctaccatagatcaaaatttgatctttggagaataagttgaaatgaatgagaaatctaatatcgaatgggtataaaccatagatttagagaagaaaaggtaaacctaggttaatacaaccttcttcacttcctcttgaacagagtctgaaacttcctcgtagctccatcggaatacatggacgtcatcagaatagatggtcggcactgaggagatcgaagagacgttagagagagggtaaaatactacaataccgtcttacatttacttttatgtataaaatattatggtttgtattgtgttagaagtagttattgtgataattaatacgttacagagttttatccaaatatgatgttgtatttatttaatacaatacaaacccattatacaggtgccaagagaaaatacagacctaaaaactggttcatcaaattgtaaagtcacttcatcttggaggaattttcgtagagattccaacaatcaggtacagtctgtataaaacagaaagtgtgaaaggaaaaatgttatccatagtgttgataacatttgcaacattccatcaacatggaaccttatattcagaatcaaactatcaaaaaaatttgcaacaaaaaaatcatgacttttttttcgttaacgaaattaaataaaaataaaataatcaagggtcaggaaactatataaacctgcaacagaaccaacacatttgggaaatcataactaaatcgaacagaaaatgaaaattcaaagcactgaatttacaagatgccaaacaatttcaacacactttaaaccaagaacttgcacatagtttacgaaaccaaacatcaaggtacattgtatgacagaacagattacatacattttaatgtttcttgaccttggctgtttatcacatatagtgtttgtttggtaattaatatataattaaaataaagttctgttctcgctaatgcatgcacttgcctgctatcacttgtttgaaatatatatatatatatatatatatatataacaatcttttactgtacatatgaataattaattaagtattagcaggaaaagacagcaaataataattgtaagacacccacttgggattaaacataaagggcacccccaaaactctgttgggaagcagagaattcattgaagaagacttttgatcaaacatatgacagccactctcaaatagaaataagaaataaattaaattttttataaatccaaaaccatttcaaagacagataattgaaaatgaatgtaatgaaaatcaaagaaaggagtgtaatgaaaatcaaagaaaggagtgtcatgaaaatcaaagaaagaagatgataacactagaattccaaaacagaagataccaaacgtgacccttatggagaggtagaagaaacttaccacatatatattcatccatggagatcagagcgactagaaagaagatgaaccagttgatgttgatcagatctttgacgattggaatgaggctgtgagagagtttcgttgagtgagagtgtagagaatattacgagacttgataaaatattacaaaacaaaataccatctttttgcaagttgtattgcattaaagtattatgatagattatacatacaatacaatatgtatcccaaatattgtattgtaataaagttatacaatacaaaaggtgcttatacggttcaccaaacttaccctaaattatggatttaaatcgaaatcagattatgtctccagtttaatttgggtacaagacaaaagccttgttatctgtttcaatcagaatatactcttcctcttctgctcgatctttaaccacatacaacgaaaaataagcattaatattatgaaaacatcaaacagtatttaaccacgttagcaaagtacaactgctggaaaccaaagtctgccggagacatatcaaaagaaacaactagaaacgtaactaaaaacacactaaacaatagattgcccatccatcttgatcaatttccttttgtactttcttgatgaagaactgattgtagtcagaggagtaatctcttcgacaacccgaaaaattttaacatccaagcaaaatgagtcattaacaggactaccgggctgaaacacgcacacatcatattcttccaagttgttgtctgtagcaaaatgattccaaccagaagagagcgccgcagatttgcgaagctggttgtagttaaaccttgtacgccattctctctctccatatcgtagaaatacatcttggttttccaaagagatatatttcatgacccagtcagtagggagtaactgatcaagcaaaagataatgacaaccaacagtaacgatttagaagttttaattaatgttttagctttgcataaaactcaataaaattaaatgaaacacaattttaacagacatcattaatgaacaagatccataaggaaataacagttttaccacaaagaatctcttgtacacatgtgagggtttcatgactactattaagccctcactgtttgattctaaaatttgagaatgcgccaactgcaaggcaaagtttttctcatcttcagttacaggccttctatttgatgaatactgcacaccatatggtccagattttttggtaggtgtatgttcagcatctaaatcatttcacaaatcaaattaaccatgttaacagcataattctggaaaataaaaaaaccacagagcttctacaacaatcagagttttcgtggtgggtttgtttttcaatttcttctctccctttacaattcacaatcaggacaaaattagtcatcatttatagatatcaaaagagaagagattaacattgcaaaggtattttatattaatagaacggtacataccggagacgtacaccaattccccactgacaggggaggatccttcgttaagtgtattgtgactgcgtgtggttcttacggggcgagtagaagtggagttcatgccagcctcatcagtatttgggaagtcgaatgcctctcctgatggtaccaagctgccatcgttattgttggatactatgcgacgacgaacagtagattttctgtgaccccccttatcattgctcaggctgataacttggtctcctgattgtagccacagaccatcaaaattcctagactttttcacctgagtgcattcaacattctcaaaagagtcattgttggtttcatcacaagaagttctcctggataccttcttactcaaggtaccatgatcatcctttttatgcccacaaatcttcacaaaatatgaaaattccttctcacacatattttgtccattgaatataagaacctcaaaaacagacttcccactatacttaaagatcaacaaatcattctctgccaaaccgtgatcattcacaaactcttgccagccatgtttgaagtacaacgtgtcaccggtggttgttactcctacactccaagtaccaccaccaggacctttaagggtcacacattctggcaatttctctcttaggctactggaaaactttttgggaatggcctgcaatttcatgcagagtatcatctaaacataagagccagattctacctttaaaattaaaagcataagataatcaaaattcataagcctgatcaaactaatacatgcacaaaggggtggtacacgtgaaactgtgaaatctaaagccaaaataaagtaaaacccaaaatcaactttttttacaggatttgcgatgtctgtgtaagccaaaccctaaaaagaagggcaacccagggttgacatgaataacattttgcccagaacacacaataataaagattagggatttatccaaaaattaaacaaaagaaaaacataattataaagaaatctcagttaacaatttattcatcaaaaagaaaaacaaacaagaacaagaaaaggaaaacagaccagatgccgatcgaaaccagaggccataatctgagaaaagtggatgtcttgaaaacgagtccagtaaatttcttcagcccatttagtgcactccacacacgaatcccccattttttaacagccccacagatctgaacagcttcaaatacaaagaatgagttgtaaaagtagaaactaaacagttgttgaaatcaagtcaataaaccatgtatgtatgtgaaccggaaaaaagaagaaaaaaatgaagaaaaaacctccaaaaatacgataaccagaagaaaatagggtataataggctagccaggagaacactggaggaactgaatttgggcgaaatattatttgaactgactagattttggcacctgcgagcgaatataataataccaaaagataagaatgacgtgttactaactatctcaactggactcaaatccaatatattttaagcccaatatggcccaatatcattccaattcatcttactttacaaaaaatttgcagaaataccattttttattagtcatattcacaacatatttcttgtttttcccactctctttacacatttattcacagcggttttctttttttcattttatggggaaataacttttttccaaattttgtgggaaagtttaaataaatgctaaaaaaattatgggaaaaaatagtgattttcttaatgtgttattatttttttttatcttagttataattttgtcttgagcaaaattatttataaaaaaagaattttttttttcggctaaaccatctcaactattactttacttgtactttaccctttaagctcaaattttgacagtaaaatccttcaaattattaaactgcttgcaaatttaaggtgtcatttattttttaccgttagttgccaatatgaactgtttatgtgtatacttttatatatgtgtcaaatttatattgttacacctaatattattattttaaaagtataaaaattatttcaaaatttatagtattttttatttttaaaatgttttatttttatttttttat

SEQ ID NO: 243598 - DNA, 2395 bp, Cannabis indica
ttgggtttatttgttaacgaaagatcaaacctattaccatcgttaaatttaacagcatattcttttatttttaaggtatattctgttaaactaagaaatgtcgttagatagacacttttaatatataaagatatatatatatatatatatataaggtatagggtgctcttaatataagtatttgttgttcgaattttattataaaataaaattatttgatactagattattagtaatacaatttagaactaagtataattaaataacattgaatagtaattatagaaatttgatagtgcaaaccaactaagtctttctccttatatctttaaaactgaaacaaatcaactaactaacaaaatattagttaaatctgtaacaccttacaagatgatctaatattactaaatatatttttgtaaatgtgttatattccttgtaattattatgacaaaaacaataataaaaactaacattgttaagaaataacatataactaagaattttaccctccaaattatgacatttgtatataggggttctataaattattattttttgtaaaaaatttccttcgaactatgggaataatttcatattttctcccttaggttgcattttgcttatattttgagataatttattattgtggcaatgattcacgcgtataattatagtacggggcctgtttaaataacttaagttagctgaaatcaagtataatgatcttaaacattcataagttaactctaaaattacggaatacaatcctatattttatctttagattattcatgtaattatttttttgcctagaacttaaattatagtagattacctatggattagttttacgttatgaaattgtttgcgtaaatgaacgaaatgcaaccaaatgggcaaatatattgatatttataaagtttgaggaaaattcttacccaaaaaaaaaaaaactgaggcaaaagtctataaatgtcgacatagttcaaggtacaaattttatttttaaaacaagaaaaaaaataaaaaattatttttactaaacatttggtagagtagaggagcccaatctgatcttggcgattggcaaagaaggcatacatgtcagatcaaagtctttgttttttagtttaattaatttggggcttaaatagtgtcaaatcgatcaatatactttttccaaattatctttacaatttagaaaaagaaactaaaatataaaatactaaatcatgtttcattatttaaaatcgtcgtcaatcacttaaaccacactaattataataacgatcgaagtaaacaatatctagagtttttgaaaaaaagtaagaaaaaaacttgcatggagatgacatgctataaagaatagagatttgatatttggaggagatggttaaaccaaccctaactagaagccattaaaagatatgatcatcatatcaaacattaaataataactaacaaccatatgtatagcttatatctatattttgattaagacatacaccaactttgacttcacacccttcatatcatcccctatatacatattatgaacaaaataataataataataataattaatagctagctaatctaaatgttgattcaaccattaaaacattcatatggataataataacaacctaggaattattatgagatgattacaaaaatgggacccattttcttataatataaaatagagaagagaaaatggatttcacgtcttttagtgccgattttgacataacggacggtgcatcgtggggtatccaaatctttaagataaccacttacacaataatttatccaaatcaaactatataaatctacatatatatatatatatataataaataaattgcttcaatattatatatatttataataattaaagatgaataaaccacattactactatattaatactaatttatttgtgtttatataatattacacttagtagttactgaaggttagtgctaaagtacgtaaattttggagttcttgtataaatagtttaattatcattaaagtaatataattttgatagtaaaactttttaaagctattgaaagtgttttataggggcagttttaatattattaataaaaaattacaaaaaaaaaaaagttgaagttgacaattgattaaaatgagattttctaccactacattgaatactgtcaaaatttgtattcaaaggtacaatacttttaattattgagaattacattgatttaaaaaaaatattttgagaatagtattctaccgcgcgattagcttaaaaacaagatttaaaaaatatgattttgtagaattaaactatattctctaccgcatcacgatcgataggttttgcagtaacttcagaggacacggtgtgcaa

SEQ ID NO: 243599 - DNA, 8228 bp, Cannabis indica
tagggcataaaatccaacagctacgccaccttgctattgttatggtagtaggttttattcattcatggcagtggattttagttttgtttctttttgggacattaataaaatctcaattggctcaatatatatttgtgttagtagcatgagagagattctcaaatttttattgacctcatggtttatagtacgattgtttgtaacgattatcatagttatggttggtcgtttagttatttctttttattctagattgaataatagggttgttattataacaaatttatattatgagatctttggttgattgtcaatgataaatgtgatttgtcccgtgtgtatttagattggcgatctagtattcttcacgcttctttgatgattcaacattgtgagcttattggtattttagttgaaagtgttattagagatttcattcctatttttgtaaacaacatagtttgtctatcttgttgattattctctttgagtagtatatcatcatgtaatgatatttatttggattgaagatctagtattctttgcgctttctttgatacttcaacgtttttgacttattggtattttagtagagtgctattagggatttcattcctatttttgtaaactgtacagtttgcctatcttgttgattctgctttttgagtaatatatatatcatgaactattatctctgcatattaatggaaatttctatttttctctctctaacaaaaattattgaaacactaccaaattatacacattttgatattcaattaatctaaactacacaattaaatgtgatgtagttcttacttagttcttaataatgatttttttaaatggaagaaatttgttaacttatcgtaattacgtaccttcactattttaacttttatcaatgtccctaataataaatgtctaatatatctagtacacattattatgtatagtaaatatgtgcatagcattacacaatataaattaaacagaaacagaattgttattattccatccaatctatggaagaatatcaatttcattaaacgtttcattaatcaaagcttactctaataatttctatatcaaaccaaacatgtgaattaatttaattcctttcccctaccaataacaaaagagtgataagagagtggcatttgttatatagtcaattatcacgggcaaagattaatataacacactataatagtataaataattgttataatgtgacgtgtaatgcagcaaatatttatatcaatataatatataatcattattaatttaggctgtatatattcacaaaatcccaaccactctaaaaaatatatttagaaacacttaatttattttaggaaaagagtctcaatcaccaaaatagcaagagcaacaaatactttaaaatgatgagaatgatgatttattcaaaaataatattcgttatcaatcctggatacaattaggattctgtggccaccaaatcataatactacttgttgttaatataagtttggccaatacatgagcaataccattacaagatctcttacaataaacaaaactaataattttgagcctattgcaaagactaagaatattatctaacattagacccaatgaagtgatagcagagatattataaaatggtaaattagggttattaccctaagtatattgtgtgattaagtatgtgataataaattatgtgaatgcatgtgaatagttattatgagagtaagaaataactaggttagactcggtaactaaaactgagataatccctattaagaccttaaatgtaaatgagacgtgtgagcgtaacacgtaggcctatgttatataggcaataaatgtgatggcattattacatataaaataatgtgatatttagtgcggaggcatagtattatacgtacagaggcgttatgtatgaaatatgattattataattgttcatactgtattattttactgttttgctgggccttggctcacggatgctcttatgtgcaagcaatggtaaagcaatgttgggtcagtcaagagtttgagggttttgaaaatgacttgtatatgttccggctaagttataccacgagggttaggtctaacaaggaattatttaaaaaattcgattttgctatttaggtcgacctctaagaaataattgaataaaaaaaattacgggatcatttatttttgttttgtgatttagtcaaggtgtcaactacttctctatgcatcaattacaatggacactatttggggatgtctcaattcaaagttactcctagagttgctcattgcattgcattaaaatataaagaggtgcttagtgcaatattttggaatggattaatattaattttgatgttgctaatggtaatggaaaaaattcaatagagttaggagttgtggctcattctcatacaggagaggttctttgggcttgttccaaaataattgccacataatttttagttgtgattcttaaagagttcccacattgataatgaaggtttttgtttttctcaatatgtgatatattgcccattaaactaattaagaaaaatgaaccaagaataaataaaaacaattgacgaaaaatatagtacaaaattatataattatcatactcctagatataaaattttggtgaatagaattataaaaaaatattttatgtgtaaatttaaaaagaaaaaaaaaataggatattaggttagaggtagatcctagcacaagtttaggctacttatgccaaaaaagacttattttaatccataaaaagtctgacccggtagaatcctaatttaatgaagctttatcttagagtcacatatgactaacaatatcattaattcaagtagtatttgcaaatatttttttaaagtcaacaacttaattatgtttcttatgacaattccaaattcattatactaattcttaaaattaaagttcttgttttctaaagcatctagaaagatccaaacaaacaagtattcaaaatagttaatgcaatttatgaatccatgtccaacgaggcaagatcaactaacataaaaattagatgtcatggaattaagttgaaattggaatctaatatgcctaacaattattacaagcgtactcaatacttcttattaagattgtgagttactcttgattaattttgagataaaacattacatttataccgtacagaaaatttttacttgaacaaattaagcttatgaattggagaagaaaaccttgaaagttccttaaagaatcaccttcttcccttcgacttctctcttctttctctctctcaattctaactcatatctcattataatgattctctctgtactagtgaatatatttgatttgatggaatgaaaattctaatagaatcattattaccattatattatttattttaacttttaaagttttgtaatgactttacaatataatgaccattacatcatatattgtaatcctcattacattataaaccaattaatggtgattacatagttagaaagatatgttttcgcccctttttttacttttatttaactataaataataaaattaaggatatttttgttaatatactttttactttattcaattacaatattcattacagtgttaaaccaaacatcataatactatttccattagaattcttattccattacattaccattcatattaccattactattctcattacattatatcaaagcaaacattaccaaaccagcatttatacaaatgaaaagaagaagctgactgaaatgctaagcaagccaaccgaattaactaacttcaatagttgtcaatcttcaatgtcgaatccataagtgccatgtcatcaagatgaaagactaggagttaataaaggtctgatgacaacaaaaggaatttaaaaatgccactcaatgtttccatgatgttagcaataccattacctgttgtattaggctgtacttgtaataaaaaaaaaggacacacacataacaaattggttgaactctttaagcattgtaaattatctgaaatttcttctgtaatgaccacataaaaaatcattttaaatttctcaattacaccatatcctactataggttatagctcaaactattccaaactaacatgtccatgttcaattctgataatcaccccccaatccccactttttctttggcctacctcttgtcttgtatatttatacttatcaaaatttgacaaaagtgagaaggaaaaattaagatttaaataattctaaatggaacccaatactctgatatgaaatccaaatggtgaatggtgcgactgcaaaatttaatagtaaataaaaaaccaaaataataatttcattgcccctgaaccattacttcttcttatacaataattgagtactgaacagtgaatacaaacatacaataattaataacatgaatgttctgcacatattgcattaactccactatcatgtccacaaaatatatgtccacaaaatatatgaagtaaaacccatcatcatcatcatcatcatataagaaatcaataataccagtcagagaaactcttgctggccaaagcttcccacacctaaacctagctcactgtctcaagtttctccaagacacatataatatggacacaagaaatataaaaccaaaacgaacctaaataacattttacaccaaagagtaagaagattagaattggaatagctctactgttacaaatgttattgacgggggcgattctgttatcaagacaaaccaagtagacgccttcctttaaatctttcaaagacaattttgttttcctcgtctacaatggtttttccaacaagagacaaagtttaatgctattgaggacgttccgctggcattctgtacagagaactaatttttcattgtttactattcttccccaacataatctgcagatcaaaagcccactggttctagaataagaatcatgattggtgaaccttcagcagggctcggtggaacatatcaatgaattgatcatcctagcacaaaacaacaggaaaaatcagcaattggttaatagatactgtctttcatatacttaaagcaactaaaaactcagtgacccgggcgtattagtgtacagcataagcgcaagaaggttaaatatgacatatattcaatagattactgacctgaacaagcactagaagtgcatcgcgaactttgtctctggtaataaagagcccatcagtagcaacaggaagtgatggactaggagttagagatggtggtggattgggtggtggaaaaggttgcagcaatggagtgccatatgtacgttgcagatttgggggagcatgaagagcagcaaagttcggcatgggcgaagaaataggtggcatcatcaatgaagatgaaggagaaggttgtgggaaaaaagaggacggcttaacaagattagtattagttacaagaatgctgttgttgttgtttggatcagaggtgccatgaagtgggattggtgtagacgaagctgaaagaggaagagttggaacttgtggagtaggtggtgcaggagtggatacaacactaggagcatatgaaggttgagagacaacattggaagaagagtgatagtttggtcttgtatttgttgcattcaaagcgccacctccaagattcattgctgcctgcagcatattaaataattgctcagctcagggacacgagcaaattttgtatgtagcttgtcaaaaacatggatggagaattaatggaaaatttacaggttttacaaaacagctgacaataaattagaaaacatacactaaaaaagttaacaaaagaaggatcttcaggggcatcagcagcagtggaaactgttgatgattgtggttcaagtggaccttccataactaacatgcttggaactgcctcaagttcctcaaactcactgaagtgtaacatcaaagaacaattaaagactacaacagcggatgtaatgagcaaacatatataaataactatctctagcaatatgcagatggcagggtgcagaagaataccttttgcttgaagatacttttggctttgaaggaaccttcgagtatgcactgagtatcctgtcagcaaattgctcaagaatttaatgagtatgcaatgtagagaagctatgttcactattcaacgattcaaccaaatttaattccttttttgttttgaatttctcaacatagaagaatgtttgcaagtccatctctataaatcataaccaaacaggccatttaaagctagtaatacatgtctataaatgctcaccactccacacatgcaatctggccattcacttcaaaaactacaactctttcgttctagtggaagccatggcattttttttgtgtgccttgtagcatacatgtaaacaatagatatatcacgtatattgtgtaacacaggatagaagcacccatctaagagtattcgggttctttttttgaaaaaagaaaaggctcctaaccctacaatatttggataccagaaaactatagcaattactatgtaggtacccaagaggaacttaaacctcagaccttgtgggagcagaccacatgcctggccatattaaaagagttaaagaaatttcattttggatgtcatgatcaagaaagttaatgatatatgcaactcttcaactttgctaaccttccagcattgaaaagaagttcttctattggccaaaacatatgttaattagtcatgaaaggcttcaaatttctaatttgaatattttcagtatatctaacttccaaaatcctttttttagagttttaaagaaaacaagttcaaattataataaaattcatggacatccaagtccatatggttatccacactgttcagtaacaaaagttttacatacaagtgaatgatcaaaatatcaacaaattggaatggataagaaggatattaaacattaatcatattgtaccttgtaaagagatttgcaacttcttcacattcacgtggattgtaaaaccaaatgccattaacttcttgagctgcatttcggtataagaggtatggaacctgaacttcatactcaaaatctcccaataggttctccacaaggttatctgttcagtataggaattgatttaagaaaaatgcaaaggcatgtaaaaaccaataacataacatttatcctcaaaattatcacgaagagataacagtcatctacaatgtgggataacactaagaaccaactgagtatctggacaccttacggaatattcaaatagaaagataaagcccaacttagtaacatgctccaaatgtgatgtcaacagcttaataataaacaaactataataaataaatcggctgcattgccattgtattgaccatcacgagcacaaaaatgagtcaattcctaaaatgaattacaaatgagtaataatgcgaacctgtgttacgccgattcatgacaatgaactgaaaccgaggttgagtattccttaacaacaaaaagatacagtgaactaggtgagcctaagcgaattacaatttaaccataaagaaaaatcccaactgagaaaaaacaagtattactagacaattacataacggtcaagatagaggctgttaccttttaacgacaaagagagatccctcaacgtctttgcgactctgaaaccaaacaaagttgcttagaaatggaattgaaaacagagattcattaacataaagcgaattcagtctcaaagagggaagcaaatcgtaagaatttaaggatctaacaccaaaaaagaaaaaatctaaattcttttgtgcttgttataaattctgaacaagcaaaatggggagctaaaacaggaatgagacaccaacccattgattgctctcgatattgaactcgtagaaagtgacatgagcagcggtgatcagaatctcttcgataaacggatcgattctctgaagcacgatgagattgagggctttggtgctatgttggtcgagattaggcgttaatttccccgtctgagacattttttaatttttattttacagaaaccctaattttcggaaatggattttcttggtgaattttcggtagtattttcccaggaaagtgatggagatttagcaagagaagaaagaaggcgtggaagcgaaggaccctgttgtgttgttagttgtttattacaaaaatgggagttaaatctcgct

SEQ ID NO: 243600 - DNA, 2877 bp, Cannabis indica
aataaaatatgtgtcagtatatttagtaagtaaaacatagttgtgttataataatgtatgttattaatagtaaaatgtacattaatcttctaattgaaaaaagttctattatctcatttcatatctaataatagctacacaactatatatttatagactttcacattctttgcaaattactaataagcaccaataatattttcatattctaatatttttcaaccttctcctcttggtggtaaaattaaaaataaaactaaaaataagcacaaacatataaggtaaatactaattacagcccattttatctttttttttttattatttttttaagcccaagcccaaaaatctctaagccaacacaatcaatcttcttttatattatcttttctagatattttatctatattttcttttttaaaaaataaataaaaaaattattaatattctcccaagataggtttgttagagagatatgtggctaagatgatttttttaatttaaaaaagtgaaaaacaaagacaatatttctttcattgtaaaatttattttagacaaaaaattgaagggaattcaatcaagccccaaatgtttttctatacattttattttgtcatatttataatctgtccaaaaacgaaatttacgggcacttctgattaggtttcttttgactaagtgagacaatgtataataatatcctacgatccaggcaaagaatttggggcaattagctaggctaggctttactcagctgaattcttatatctcgttcttgcattcaattctatcatcaaaatacacaaaaactcaaatgaaaaagaaaatctagggcaacaacaatcaatatcatcaacatgcagatacaaaaacacacacagtactggactctaaatcacacacagtaaaatccgatcatgaaataatttaaaagaaattgaacgaaccagcgctgcaagaggtaggaggatccttttgaagatccttgagctctttcaagatccgcttggacgccatggctgcctaccttgctgcgattattaggatattattcaaaaaagaaatcaatcggagaatagaaagaaagaataaagagagagagagaactgacctgagctgagttgagttgagaagaagagatcctcttcttcgaatcttcttcttctttcccctcaatgctttcttctatatatatatatacttattattaatttctttcaaaaatatatataatatacttattatttaattaataatttttcaaaataatacttatcatgttattacatcttcatcttgtaataaataaatagtttttggtgaagtttaaaattaaataaatttgtataaaataaaaaataatttttttttaattatttttaaataataatattaggtgtataaatataaacttgctacatgtgtaagagtgtacacataagcagttcatgttggcaattaactgtgaaaaataaataataccttaaatttgctaacaattctgtagtttttgagagttttactatcaaaatttgaatttgtaaggttaagtatgcgtagaatgataattaaaaaaaattagctgcaaaaaactcgtaaataaataatgaaccttgttattgggtagcaatggtacctaacattttttatacgtgttttcttatagttgattggtaatactctctaaaagttattatattagactggaaacttaattgaaagtagaagagtgatgtattttagcattctcataaataatatatatttttagaatatttgcatcataaatcacttatattttcggttccatacttttatatattatatgtttttttcaaaatattaaattcttcaagttagatttttgttacttctgtactaccatttcgttaaataatattcaaacacgggaggatttgaaacctacatacttaatatattcggttcatacacttatatattacttgtttttaaaataattaaactagaaaacatttcaactgaacctttcattgcttgtaccactaccaaataatctatctcaagtgccatttttgtctcttgatctaacttaaagtttctttcacccaaatagctttagtaagttctagccgaacactgctagtaaagcatcaagtgattccttcaaactgaaaaccatgatcattcctaaccaccattccaatacagatgcatttacattgaccataacactattctcttgaggcccacaccaacgctcaagaccatccccgacacttagactaggggtgttcacggtgcggatggtgcggtttttaaccattttttcaaaccaatccgcacatgcagtttttccaattttttaaaccgcacccgcatcgcgatactaaaaaattgcaaaaaccgcaccccaaaaactgatgcggtgcgatttctgcggtttatgcggtttgaactatcacatttttttttgaaatcatcataaattaattaaactattattaatataattattccaaaacacttaagaaaatacaacaaacttgagactaataaaagttataacaacaacaataagtcaataatctttttgaagtttcaacaacacacctaaatcaaataacaaacttgaaactaattaaattctaacaacaatataaaggtacaactaatatactttcagcaatagattaaaaataaaacaaacataaacttccaactccaaatttcaatacacatgtatgggcttgggtttgttgttgtcttgttgaaaagaagagagagtttgtgaagagttatgaattttaccctaagatttatgggtttgggttgggctatgtataagcttaattaaataaatataaaaattgaaattttaaaacatgcggtgcagtg

SEQ ID NO: 243601 - DNA, 1736 bp, Cannabis indica
taaattcatgagtgattttaatcactttgtaaaaaaaaaaaaaaaaaaaaatatatatatatgtatgtatttttctacctttaatcatgtaaatgcttttttcatattttaagggatattgttattaatagtattttataattaaaaaataatattgagtttcatcatcttattagattattgagtagttgttaagccttactatgaggagtcttttactttgaaattagaaatttgtttttaaatatttaatgccataggagttattggggccaatactataagatgcgacatataatgaatcagcgacggactcaaaatttttttctactacaagtaatgtttaacataatatttagttgtttatttttttttaaaaaaatgaattattaaaactatataggaagtaaaatataaatattttgtacaaaatgatcaaatcattgaatagtaagagcgtaaatataaaacaaattacactataacgattacattataaatcgaaaaagtcactcatcttaatggaaccaataattcttagccaactagcggctcaagattgttgattccatcaagatgagcaatatggttcattattaaaagattgtgctcgtttttcaaagtagaaaattgcgaggatgggcaactgcttaatttaggcttaatgtggatccgtcaatgcaatgaatagtaaaaaattttatcgaaatttatatattttatttgtgctctttttcatttgaaaaatattttgttttgaatttaaatatgagagactcaatgaatgagaaattgcactatcttaaaaatgaaatgtatataacatgactcttagctctggctcatttggttatggtggttggaatgtacctttcaatttttgttgactggtaagaccaacaattcagcttctttgacttttttaattctcattttttttttcttttaatttaaattatcttttctatttttgacttttcttagtgtcggtagtatagaataaaactattattaatgaacatgaagacatgatgttaagtaattaacacttaaaattccaatcttagtaccaaggattggaaaccaataaattaagaatttgttgatgttaaatattacttaaattaaaatcattgatttccttaaactttttcaaatctaaatttgtaactttgagaagaattttattttaaaggtgtgctactttaataataaaaataatatatatcacaaaatgcatagagggagtagttaatgaaagcatgcatgaaaattttgaaagtatataaagttctttggtccattataattagaccctaccaaaaaagctaattagaatcagtcaagaaattactgatttttcaaaaaagcaaaattataaaatttattttggacttttatgtgtgaattcttttatatggatttttttttaaaaaaaaaaaaattaagagtattaaacttgaatataatctaagggatgtgagaattaagagagtgttggtgtgaatttggaattttattatgtattaataatgttagagcaaatgctcttatatacaaagctaagttatactcttaatttggtgtaatggtaatcctaatgaaattattattataattctactgattcggtttgaaaaattttgtaatgcttttacaatgtttagtattaaagttatcctttatacattttctttcatactattatttattgaattaatttaaagtatggaaac

SEQ ID NO: 243602 - DNA, 1640 bp, Cannabis indica
aaagaagagattatttcaaaattttccgccagacctctccgcaatgaaactgatgctagaatcctcacaactataatggcaaagattgggcccacttatgagcaaatagttgaaaccacaagctgagctttgcatgtccaaagaaccccataaataccctgagcccacttactttccttggccaatttatgccaatgaaattagattggctgaggaattaatgggcccaactcctattgataaattcaatcccactcctaccttgtttcatgaacccattgatgtttctaactagatccatcactgtccacaacctaagaaaatgaaagcaagtctcaacttagtccttttcattcaaaggacacctgaaacaacctgtaaattctctcaagaagtgcctcagctccctaaattttccccggggccacttgaaactcccatcaagattggatcaagtgcttcatcatcgtctctaaaaatatataaaagaagaaagaatttctctcgttccaaactgtcagcacaaggaaaaagcaaaaacgaagcttcagatgggatcaatctcgaagcacaaaggaatcttatggatgctttgaatctggttgaggttcgggttgaaagtgctcaaaattttcatttaggcgaggaggcggcccttatcaagccccccagccccatgaaaatctttttgtggaattgttgggacctcgcgagggacccgacaatccaagccttacacacttgggtaaaaaaatacaatcaagattatttttttttatggaaactatggttaaaaggagtaaaatgaaggatttggcaaaaaatttggggcacttaggggctgcttgtatcagtgcagatggtctctcgagaggtttctgtttgttatggaataacaacattaaactccatgtaaattaaagtgttcatgtttttttcgaagctactgtttaggatttcttaatcaaccaatcttggaagttatttgcgatttatggaactccttatgagaaagataaggagatgttttggaagaatttggaagctgaagtaaatctttgtgtcattccttatatggttatcggagacctaaattgcattagtaactctaaagaaaaggttgggggagccagagttaaatcatgtgacacaaaatggttgttggattttttcaacacactggaggtgttgaccgcttctttaaagggaacaaatttacttggtagaataaaagattcaagggtggcttaattcgtgagagactcgacagagccataggcttttgcgattggatttctaaatatccttccttgggtatactaaattttctaattacaattttagatcatggccccattcttttttactttcatatgtttgctaaaagaggatagatcccctttcacttttttgaagtctagtccacgaaggcctcatggcgagaagaaatagttagggcctgtcatcactctaatgctgaggcctgaatatctcttcttcataacattgatagtaccaggaaaagcattaggcttggaaaaaatactttatgggcaatgatgagaggttgatcaaatgcctagaaaaaaaaataaaatggcttcaaaatcaaccaattttagttaactatagataggaag

SEQ ID NO: 243603 - DNA, 7372 bp, Cannabis indica
tcaagaacttaaagggtgtcaaatctatttggaaaattgagaactacacaagaaaatgcaagcttctctatacttttatgactagttgtaattttttttttattactaaaacctctaattttacggcctataatatgaccaaatgaacttttgccaacaatgtttccggtacgatagaggttcgaatattatcttttgtaataattatgaggtccgactatttttttctattatataaacgcttttattaaaaaaaatataaaaaaaaaaaaattaaggtcctttacccagcaaaaagaaaaaagaaaaagtaaaggtccctttttaattaaaaagctcagataattttagtgcgtctaatcttggctatatagtatattattgcagcttctaatcaaacacagctaaagattgaaaacctaaactaaacagtaacaaaataagattatggcagaaatagttaagctttatggtcttagggcaagccgtttcagtaacagaataaacatagctctgcaactcaaaggtgttgaatacaaatactatgaagaagatctgaagaacaagagtgcttccctcatcaaatacaacccaattcacaaaaaagtccctacctttgtccacaacgaaaaccccatagcagagtcacttgtaattcttgaatacatcgatgagacatggaagactcaccccatcttgcctcaacacccttacgaaagagctcaagcccgtttctggtgtcggttcatggatgacaaggtaacaattcttcttctaaaataaatattttattttattttttcatttttttaagcttgaactttcgtcgaacaccttatgtgcgtattgtaaagcaacaatttgattttggccaggttatggctgctgcatggaaagcattctttgttaaggaggagcaaaaacaaggattggaagaagtaaatgagtatctagagattctagagaaagagttgaaaggtaagtactttggaggtgataacattggaatggtagacattacaggaaacttcatagtccgttggatcccagctatacaagagcttatgggagtagagatatttacagaggcaaagtttcccaagcttggtaaatggagccatgattttgctactcatcctgtggttaaggaagtattgccttctaaagaagaactcattgttgccttcaagcgttttttgaacatcaccaactaaaaaaaatgatcattatatatatcatatcataataaataataaatacactggatgttgttggtgttccttttataattaagctgcattgtttctttaaatctgtacttttgtttgtaataagggatatattttctattatgtattccaaagtttattaagagtgtcatgtgaaaaatatgactaaaatgatcagacaatttttttttaagtccattagaattaggcaatcagtactcagtagcatatatttaagagtaacaatagggaataaagatagagagtttgaatttccaatacatttcacaatatcagaaagggtagagcattcattatataaatgatctaacattgttaaagtacactccaacacaatttcatgcatcattatgtagatttagtgtgaaaatatgcttttgtgattggttcacaatctaaaaacataacagaacatgtgactggaagatataaatccgaaaattatattattttcaagggttccaataaacgatcatagcttgataaatataagtagtttataagagactaagttttgatcaactgtaaactcttctaaattgatttataaaatctaaatttcagcatattataaaattgatatgtatgggttgaccaaaccattacttaaaacttttgaattggtttttatttatcattcttacagaaattaagttgaaactaactaattaacaaaaattcagcattgcaaactgagatgtacacacatgcttgaaacttatcaaaacagatttgattttttttttttttaacaaaagaaaactttattcaaaaccgagcacttacaaccaagttggagcaacaagtaatagcacaaaagaacaacctgctaccgaaccagcagcccccaacccagctaccaatcttgaactacattaattaaatacaagtcttttttacacattataaggacacatattcaaaattctagtttaaacaactttcctaatttcaaaacttaaatttctagcaaaggcacaaaccaaatcaaagatacacctgtttctattcttctaaatcatatagatagcagcagcatacacaacatttatgatacgattttgaaagttacgagagcctctcaaacaccactgctgaaggccactgatagaatccggccaaataacttggccaagccacctgttgatttcttaaaaaaaaattctcaaaaagacatagagtgacaaacagggcaaagcacagagggaagaagcatcagagtcacaaacaggccaaagcacagagggaagaagcataaattttcttaataaatcctgagtaaggagttgaacgttaagcatctgcccaaaaaagaatctatgtttcagagtaataagcttattccatataattccagcatatttcacttcttgagcctcaataagggagttatagaattttttaacatgaaacttaccacccttttcggcttggttcaaagttacctcattggtactcaattaaagtttcagcagttttttgaaataccaactcatgtcttgcttgatgggaaggctccatatactatgctccttaagatagattgagtttatctatttcacccaaagattgtcttgcttactagctatggcccaaagaaacttggccatcaaagatttgttccacttctttccttcacaaaactcaactcccccaagctttttaggaaggcacaccttctcccatgaagctagatgaaacttgctctggttccccacaaaagtcacgacatctcttatcaatggcagtcgtaacttcacttggaagagtaaagatactcatccaaaaatttctaactctgagaagaactaagtgtatcagttgagcacgacctgcaaacaaaaggttcctactagcccaacagttgaggttcttatttatcttgtccagaatcactccacagtcagatgttttccattttctaggacggagattcaccccaagtattttagaggaaaagagccttcttccattttgactaaatcaagaatatgagcttccatttcatctttaaccccaccaaagtaaatattggattttgacttgttcgcagaaagactagtagcttggcaagacttcagaaaggcttcatgtaaaagacttactgaattgagattacctttgcaaaaaatgattagatcatccgcaaaacacaaatttataagccataggtgtttgcataaaggatgaaacctgaatcccttcttttatgagtactggactatgagtctggtaagatactccataatcaagaaaaataggagaggggacatatgatccccttgtcagagacctttctcccctttatatttaccctaaatttttccattcataagaagattataacttgttcccttcaaacagatcattatccagctgatgaaacgagatggaaaacaaaggagcttaagcaaatcgtccacaaaaatccaatcaacagtatcatatgccttactgagattgatcttcattatacatctcgctgagatgttcatccttgagtaacctttgagaagatcctaaaaaatcataatgtagtgagcaaggagtctatttttcacaaaagcaccttagttactttgaacaagagaaggaaacacttcaagagccttgtacaaatcattttcaaaatacatttgtagatggtgttacaacaagcaatttgtctgtagtcactagctattttcgggtctgccaccttaggtatgagggatatcactatttcatttaagttcttaggtaagcaaccattttgaaagaattcaagaaccgcccttgaaacatcatctccaatatccctccaaagttctttgaaaaagccagaaccaaagccattcaaactaaggctttttgaagactaaatgcttaaaattgctttcttcacatcacccttactgaaaggcctgattagattcacttgttgctccaaattgagacaaatacaaaggtttatgctctctttatctattctaatggtagcaaggcttctacttcccatctattgttcaaaatgagaaatgaaatgctttgtcacctcattaaaattatcttcaattctatctcccttagagaaagaagtgatcctattttcaagcctcctttttcacatagcaatatggaaataacttgaattctcatcgctgaacttaacccaagttatcttgctctgctgtataagaaagttggagtaatttttctaaagcaaactgagttgttgcaaccaatccaaagcagcctgctgaagagattcatctgctagattcgaggttgcttcacactgtaacctgctgtaactctccttcatagctttgtaattcaaagctatgtctcccacctcatccctactgaactttttcaaggcatgtttaactcgaaacaattcttgcacaattcttttaagccctaaaatcttcactggtttgcactagtacttcaaaactgtttgcttataattcagataagcagcctaataattgcaaaatctaaatggcttgtatcccaccttattgtgctcatgaccatggattatacaataactatgattcgaagcaacatcccattaataataagcatcagttttaggaaaaacatcccagtcatttcacattcgtaaagactatcaagcttggaaaaaataaggtcaccaacctcgtgcttgtttgacatagtgaagaaggctctcaaatacttgaactgctcaacttagcttaaaacaagccaattttgcgcatccttaatatctttagcttgaatttgtctccctccatttctatcttggaacaaaatcatagcattaaagtcgcccaagataatccaaggcaagttcggttgacctatactagcaaatttctcccacagcttcttcctttcctccattgagttactaccataaacaacagtagctaagaacaaatctttttgactatcaaccttgatcttgcaatgaacaagttgcatatcctctaagactacctccacgtgaacaaacttggcttgccacaataccaagattctaccagaaattacattgctcgaatagtaatcccaactgggaaagttattctcaaagatatcatgtaccttttcatgtttcatcttagtctcaaacaaagctccaaacccaactttattcattctacaaacgttaagaatagctttttgcttttctcttttattcatgcccctcacattccaccctaacatattggaaacttccctcaagtacatgggtgagagtagggaaccataacctcttcaatagcctcttgtaagactgtataaccattattactactagctttgttgggattctctgctaacctgtcagtcacggctaaagccctcagccctttccccttgggagttatccaatcacagcagcagctttatgaatatcagcatcaaaaccttgtccatcaacagtagtgatcctctaaattttgtcactgttttcctgatctaaagccacaaccctaactttaacttcaatgtccccattggcctctattttctctggtttctctagaccaacagtaggtattgtattatcgttttccttgtcaattttttacctctttcactgctttgctctttctcttcaagttcaccccttcctctatgctacaattaaccactgtatggcctagttgtgtgcacatcgagcatttggagggaggccattcgtactccacttcttgctccacgaactatttcctctcatcattaaaggaaataactttaggaggctcatctgaaatctctacatccactagtactcgtgcaaatttcaccatcaattgattttgcatgactttgtcaaccataataggtttcccaatcgtgctcactaaagcaatgagattattcttaccccaatattgtaacccagtccattcaatcaaatccaaactggaacagattacaccattcagacagagtccatatctattgtctaaggccgaagtataaccaagttttttttttttttatcaaagtgagtcacactagtttccagaatcaaatcacgagtagtttcatctctaaagtttaccaatgtaaatcctgagtgcattctagctaatttcttaactcccaatttaccccagaccctcttaacaaaaccttcaaacaccttcaatggaggatttgatcccaaaacaatacatacaatagcatttttccagtaagaggcctcaacctcaacctcttcaaggtcaagtttcacaacaaggtgatctccaactttaaggagttttgtaaaggataactgggttgaaggagttagtacctggtccaatttaaaattgctccacatatccatgacactagcctgaaaatctaatttctcgacctcctcttcccaactgactgattttggagagccttgaccacccttcttctcctcccgaatgactggagcgcatttgcgtttctaaaatcacacttggttcatgaaattcttctttctggttattctcgatgctttcctcttagatcaaaggaatgtctgtctcttgattagtcgtctctgtaatcgtgggaatcagcttttagataaccctcttcttcttcgccatggaagaaactcaggggaaccacgcacacctatttcttgtaaggctatttaaagttagaatctcaaaatatatttgatttgcttttttgttcttgtttggtatttttcttcaaaataaataaaatctaatttgtcattcttaaaggattatgttgaagttgaacattgtaatcttggtaaagaaaaataattaacaagagaaaataacaccacaatatatatattattaggttaatattatgtctaatacacgtatactgaattatattcttaatttttattttagttatatatttttagtagtataactataattttttttttttggaggttattcaataaccaacatcatattttattcaagattggaatagagtaatttcacatataggccatgaattttagtgggccagaggaaaaaaaaatatattttcaagccttatttagtaaaaacatatggtattttacaaaatcagtaaaaaatgtttatttttaaaaaggggaattttttttgggcctcttgactaggtgggccctaagtacaaac

SEQ ID NO: 243604 - DNA, 2196 bp, Cannabis indica
aaaaatatacaaatccatatcgaaattaatgatatagaagaaaactcgcacacagacgagatatttttgacataaatagctgaaacaaacaaatttctcacatccataattggataggagaaaacaagcatagatgatgatcatgatctcattctcactcaattaaatacatacatggcaagcattaaaaacctaatcttgagaccaaaaagaaaattaagtcacaaggaagaagaaaaaaatcttttgttttttttgtcttttctaaagaaatactattatggattacgtacattattagaactttttttgtgtgtaataattattaattagaacttgtttataatttagtttggttttaaatattatcatgaagcgtagatatcgcgtatctagccattgcttatttaagcgctattacatggttagcgtgttcttcctccaaaattgatattttactcatcttctaatggaagctccaaaaccgttgacttgtgacatctaacctcccaaacagctaagaaatatacataaacaaacatgcttagatctctttttcttttattgtaaatttaaaaagaacaaagtcaccaaagtaaactgtaaaaacggccatgtctaatcaatattagccacgtgtcctactttagcctccgagtctattccttgtttgctttctctccatcctcattggtcctcaattctcattcccaatcccaaaaatgattctacttccatattaatccttaactcatacattgtctcaaaaactctttattctttctctcaagtctctaaacagatcgacgagattatgggtaacgttttaagattattgtacggacattgttgtaagccggccaccactactacaggatcccacggcgtctccgcccttacccatgatatcttccaattcgagaccacttctgaggtacggtaattgttttctgctaataagattgatatgcatatcattataaactttcttctgatctttcttttttcttctttacatatgtttctgattatgtttagtgtatggaattgtcgtttaattaattaggtcccagatggactgagtaagcatgttgtgtcgtccaagaaggctcaagctaactggtaatctgctcatgccaatgatcttgttttaaattcatacattgacaaattgttgttgataaacataagctgtgtgtaattatatatatttatataaaataaaggtatggaaaactatctgaggcatggagaggagccaacccacctccaaagacagctgaagaagcaactaggcttgtcgtccaaaccttgaaaagacaccaaaagaaagatgttgaggtataaataaatatatatattgctaatcaagaaatatgatcattaactgagttataattcttgaagcttatattaccaatttaatgggctgtgtagggtttattggctttctatggtttgcctcttcctcatactcttgttgaagttcctgttggggtcccaacttcaacacctgctggagtaaagttcgaattgcaatcactaccggtaaggacacaattctcttttgtgaaaaaaaaataaaaggaaaaataataataataaaagcttaatttatgagcagtgaaacggaattttagacaacataaatagaatttttgctcacccaatcattatcactttcaaatggtattctctcaaaatattaccactacaattgtgctctatgtttaaaatttggggatactcagagtatggaaaggttatcggttaatgtatgctaaattagcttcttttttttaaaactcaagactatttttaataatacaaaaaattatttttatctcaaaactaactggatgagattagaaatttgtgctctaattttgatgatgatttggaatgttttgatgaaaaccagatcgatgccaagtcaattgcggatggagatacagtgactgtttatgtcagcacaacagaccctagagaatcatcatgtcttccgagagacgtacaaaggctgctgatgaagatccaagtgcgtgccgttaagactatacaaggcagatgcactcacaagcaaatgtgatgctggatacaggtaataagagatctgaaatagtagaactttgtaacagatcagtagatttgttacttgacttaggcttttacagtatgatttgagtttttttcagt

SEQ ID NO: 243605 - DNA, 2600 bp, Cannabis indica
ccaaagttgacattctccctccacattcaccaggggcattttacgtcctcctaaaaaaagtgtttagtaccgtaccttacccttttttttctctctaatttctcttactctttttctttttccatacttagatagtacaatccaactttcggcaaaaatacgttttggggccttatctactctcttctcatacataagagattctctatatgactcatatgatagcacaaagaaaaaaagtaataaaataaaatctaaagcttgcttcctatagcataagctccacacctccaaaatcaattagggcattttcgggaatcaatctaaacgaacctttcaacttttccaatccattccttttattcttatttttattaacaaaaaaatgaagaaaacaaaacaaaaagatatacatattataatatataatgtttatcctttcatcctctctatatatataaatctcataacaagtccaatttcatctcaacaaccaaaaccaaaatcactataatattactaatttccccatatagcaaaactagcttcctctactacattatatatctctttcaccactttttggcttattaatataaacaaaagcattaattatattatatatggatctagtggggaaattggcatcgcagaaggcagtagtgatattcagcaagagctcgtgttgcatgtcccatgcaataaagagattgttctacgagcaaggagtgagcccagcaatatacgagcttgacgaggactattcgagaggcaaggacatggagtgggccctcatgcgcctcggctgcaatccctccgtcccagccgtcttcatcggcggcaagttcgtcggctcagccaacaccgtcatgacccttcacctcaatggctctctcaagaagttgctcaaggacgctggtgctatttggctttgattatatatataattaattatatatttatatatgttatgttaatgtaataaggcttttagtttattagattaattaactttgatcttcaatcttgatttcatcatctttttgatgatcttcttgatttttgtgatggaagaaaggcggctttaattaggacatgtcactacattttgtgcagaaatgaatatatatatttataatgagtctaaaaatgtatatatatttatgtacgtatatgctagctataaatatatatactagtattactcatatataaacttgtgttggcattgttattataattaattataagctccaaaataacaaagtgttatggtataactcaataaattaatacttagagaaagtgcatgtaaatattattaaattttaaaagtattatttttgggtggtgcacctaaaagtagtttaatattttgacataaagttgtgacatatgtattgataattaaacaaagttatatatatctatatatatatatccacatatatattgaggggccttttgtgaagattctaaggtacgtacgtatgcaatcacataacgttttggaataaatggctgaaaattctgcaactactacgtgtcatatatatgctctatattttcaaaggtcacctcaataaaaatggatatattcttgatgaggcaaagaagtgggatcaaatttttatcgaagagctatatttatgtacatatataatttgatacatatattctcatttatagtgttgttccatcactccatatatttttgtattcatggcctttgccctttggggtacttgtggagctcaaaaacctaatatgaaacttttacacataaatcacataatattacatacactagtagtagtactttgttggattaaaatcctatgggcatgtatattattgtaaagtatgataaaaagattaagtgattaattatataatgtgtatcaaaagagtactaaattataatgaaaataatgtgtaaatattataaattaatgtataatttattgaggatcaaattataaatacttaaaacttattttataatgagtctatagtggtctctaaaatatactaggattcttgtattctctcattccccattagagaaaaatacataaaggaaataatgtattcttagaagatcataattttttatacattctccaacaattgcttcaggttagtacttccgtcgtattcatattcttcttttttaatttagcaaaagttctataaaatatgatttatggtttctatattaaagtacttttagaaatataattaaatatgtgtatttttggagtgtttttcaaattttaataattggtaccagagccatatttgttcaattaattgaagatttgatatttttgtttattaaatttggattttctaaaacttagaatttaattttcctttcaataattttgcccgtgcatcttttagcttcaatgcatttatttatgttatgcgatttatgcatttatttatgtataattttattatatgtttgcataagcattggctaaataattttttttgggatattgttggaattatataacagattagtgagttaaccttagtaagttagtttggtaaactggtctttaataaaaagttagttagagtattttcat

SEQ ID NO: 243606 - DNA, 1601 bp, Cannabis indica
ttttattaaatgaatataataatcagattaatattaaaatgaaggtagtttgagaatgctaaaattttaacaaaacacaaggttctaaaaagagtagtttttacaaacagagagtaccaagtgtgtaattagggttttttaaatttggttcttctaatgaagtctctggtttttgtttcttctaacaatttctccccttgttaatgcagtgacccccggttcgtaattctctgtaaaatttgtttcctagtgaaggggaagggctttggaaatggcagcaatctacagtctctatattattaacaaatcaggaggtttaattttctataaggtattattatttatttgtcttctctactaaactgtaataacatcatatcatatgatcatgtcaatccagatctatttgtttcccgagtaaatgggatttaagacaaaacataattttgatggaaaatttgttacatgaagattctaggtttgcttctgatttgtttttgaaatatttaactcacgtgtctttcggaaattgcaggattatggctcggcaggccgtatggacaccaatgatagcttgagagtggcaagtttatggcattcgatgcatgctatctcgcagcagttgtctccagttttgggttgttttggaattgagcttctccaagctgacacatttgatctccattgcttccaatcactaacgggtacattaattatttgtttttagcaggagtctgtagagttgtgttgttattttgtgagtgagccttttatttatgctaattttctggggagagggatatatggtacgataacttatttactaatagcaatatcccatatcaatttgtatagacacagtcaagaattttttttttgaaataggttatgaattgttaatcaaggatttaagtgaaaatttgtagtttgtaatgaagtaggatattatgcaaacatacacatttcatttttgttgaggctgtcactgcttgatttcccatgaattcaaatctcttaattggagatgtttagaagagagagcagtaaatatgcgaagaacattgaatagggacaatggggattacaaatatattttgtaaatttggtcctttgttgtagatttgtattgccgggtagccagtgaattgttcttgtcaaaatggcttacttaatatggaatttattctaaggaatccaatattgttgcttttgttgtggggtgatattaaagaataatttacatgcatagttttcctcataaatttgttagttataagttcaatttttagtgcagcagaaagagaaaaatatgaagtatttaccaaaggttctattcatgctgaatttgttatgttgagtactactactagcccccttgttattattttgttttaatttgtgaaaacatgataaaccatacctgaagctatagcttacaagtattgggatgataaattaatatagtaaagcctggttttttgtctagccatattactatctagcaagcagagaagaggatccatatctaaggtgagacatggtttgtatagaccacggtgaacgatattttctgtaccgattcatctgatccttgttgagaa

SEQ ID NO: 243607 - DNA, 1025 bp, Cannabis indica
cttttaacactttttattttatatataaggacttttatgttttaaaaataaataaatttattaataataagaagatgatgaagaagaagacttattcaacattgaccactatacacagtctataaattcaacttgcgtagccttcaatattattctctctcgtacacaaacacaacacatgaacacaacacggtcctctattttaatacgtttcttaatcaataattaattaacttatatatatacacatataatcaacattaaatctattaaataatctccacttctcaaacactcaatcacctttatataaatacacaaacacatagtcattttcttactacaacaatctttttcttcaaaaatccaaaacatggctatggacaagtggcttttgcttaccaagttaagaaccgcagtcaagaaagttaaggttttgataaacctcaacgtccataggtggcgtgtagcctctattataggtggtcggccgtctttagcacctaaccaacgtaggtttagcttcaacgaccgaccaggcttaatagcagcctacgaggaggaagaggaagaggaagaagaaggagaaaataagtcaggagaatcgtctgaagaagggtattattcagcaacaggctcatcttcttctaattctagatcaggatcggtagtactacaacttcaaaggactacaagttaccctagtgaagaaaattgtagtaattatgatgttgatcaaagggcggagatgtttatcaacaattttcgtcgtcaattacaaatggagaggcaaatttctttgcaaattcgatattccaataggcttaatagctttaattggaggagtccttaattaattaaggataattaatcatcatcatgatgatcatgatcaaaggtttgagcttagctaaattggctagggtttattggttttgaatatttgattattattattattatttaattaaataatgtggtattaatattaaggtttgttgaattttttcattttttaattaatt

SEQ ID NO: 243608 - DNA, 2208 bp, Cannabis indica
ttcctgaaacctacaaaattagcgagcacaagtgttgttaaagaatttcacattaattatgtgtgaaaatttcatactatttatattttattcatcacttatttttaatatgaaccatatctactattcttcaatatatatgtatctataattacaatatgtttcctttatgtataaaaatatgactctgtcatgttatcaaatttctcaaattaaagttacaaaaaaaaaaaatattttagatgacttggtgaggccttttcctttcaaaaatatatataaaaaaatcaaaatttaaaatttaataatatattcaaaagcaataatttgaaaaaattaaaaaaaaaataacaaattaaaactctcaaataaataattaaatgttaaaaaaactataagaactataatttcacaaatataattttggttaattaaattcctaccatctaaaaaatttgataacaaaattccaaacataactttaatgattgggaattgtgacactcaaaattgcatgaaatattacacacaataataatgtagtcccatatataaatatttatggtaaaaaaacgtgtacaaattattataaattaaatcttccatgacaaaaatacctaataaataatattttgcagtagatatattatacctatatttatttataaatgtaagaacaattaaatattgtattagctatattgaacaaaaattctttcatacctagacaaccggaacaactcctgcgattttttctgggatgttgaagaatcaccgatcgaagaagctcaagaagatgaactggctctggattaccatcaatttcgatttgtaaagatttcttgtacttttgtggtgccatgacattgtaacgaataaattccttaattgacactttcaaatcttcacatttctcttcactacaagattccatcaaaattttgagtatcgaaaatggtatttgattctccaacatgaacaaatcttgttgagcaagagctattggtcagttttaatcttcaaaacccttaactcatcattgttgtaactatttatgagttgaagcattgaacacccatcaaaaaatagcatccaacaaagagtgtcatcatcataacacttgacataattttcatcgaaacatttctttagttccttgaatttcttctcgattttgttgtacaaaacctcggtttttgaaccactgcttctaatgaatttcgcggccaatgcaagcttgtattgagtttggtgttgtagatgtggcttttggtgatgaattgggcctattgaaatccaccttggctcgaaatacttctctaaatgtttgttttttcgaagaattgttggaaccctttgaatcttagggttaaccattttcgattcttgatgatcaagatcttgacacgaaataatttcatcatcttcgtcttccaacttttcgagtaatttcttgtagagtggagcaatgttgtgattagacatgagattagttgcaatgaaatttggatcatcaacataatcatccattttttcattcatggaaattgaatgttcatggcttttactcatcttgatatgtgtttttctctctctattttgatgatttttgtttattaatttaattcttattatatggttatacatatatatggctaaacatgaataattaaaggggaaagatgaagtttagcctaggaagattggtatctaataattaacgtaaggaactaaagtagagacattactaattattccttaattgtttcttttgactgttaattagtagaacaaactttacaagaatggcataaatatatgcattatttatttattagaattattatgcattgatgacatgtttgattagatgcttaattattacatatatagacaaaattttaaattcagcaatatattttaaataaaaagaattttttagagccaaaaattttaagagcatgatttagtacatgttaaaatttagagaataaaataatataatccaatattattatatacaaacatcactttgaaaagtatctcaaatataaagtggaaattataattattaataattaaagcagatcgagttgtaatcactattggagaagcaatgttcatgaacacgtcaaccataaaaaatataggccatgcatgcatatatacgtacacaaataattataaaatttttatatatctttatat

SEQ ID NO: 243609 - DNA, 5267 bp, Cannabis indica
tttagataaggatgtgatttgtagtatgttgaaaagtgtgtaaggtttacaagtgttggagggttggaagtgtgaactgagaaatggaattgggattgtgtaaagcatgagggttggagtagattgttgaattgggagatgcagatttgtcaattttaattaattatttatttgttaaatattgtttgggaatgcatcttcttttgtaggaatttcaattactaatgtggtaacctatttcatttctgggtttggcaggtattacctgatctgaacatatgttcacttagtactgttcttgcacaaggcatgaatcagaagaaaaaacatgaagtaggttattaccttattgaatttgtgcctgacattttttatggtttgagaacctgattttcaagatgagcttttaaaagatatgttattgacatacttatctctgaaagagatatattttttgttttgagcaatgaatgttagtgatacttactgaagccaaatagttttatatgagcaggttgaagttctttctgcggtcgtcagttccatcactaactctgttacagctcacacaatagttgatgttggcgctggtcaggtacatttgcttttaaagaatctgtgtgatgactagtttgattgatgattaaacctgcttaaatgtttcattgtcttgcacctttttttttagttgcctaccttgtaagaaatgcgatcacgtcttacatagtaaaagtacccaataagatggatggtataactttaaaaggccactgggagactgaaatgttcccttgtggatacattagagtcctagcagttttaacagtaaagcagtgtgtcaaaagatttcctataaattataatgaaagtatttgagtagtttcttattttaagagaaatttattagctgtttcagccgtactttttttttcatcagaaaattgcaataaaataaaccctgtatttatttgtttttgtttatgtacaatgccatgttgttaatcaggttgctcttttagggttatcttgcacaagttctttcattccactaccagcactctgtaattgcaatagatgcttcttctcatcacggaagtgttacagatgcacgtgcagaacgaataaagagacattatacttctcagatgcgtaaatctgagtatgatattgaatctgtttcttgttttcttttcttttggaattcttttgtccagtttcatattcttctgtagtttaaattcttgttggatgattatgcctatttcatttattgtgcctcctaatcatggagttacatatctgttattccaaggagtcgtttgatgggttgaataacttgagttggaattttaatggtttattgttttgggagcatcttgatttgttattggaagtaggctgcttagttttatatcttctgacttcagagaagctttaccttttgcattaaactgatatattattcactgtcgcaggctcattgttttgaagttggcttcatagtagtcaatatatttaagaaataccttttattattattgttaagactggttgttcatttattatcttttttctcactagatcagggaagagaagtttgattgtgcctaagacaatcacatgccatgtgatgtccattgacacgttaaaagatttgacctccgctgcaagggttaacaatagtgggcaagattgtgacaataatgacacagaactgcaacaatctttgcgccacggggacaataaaacttcagtggttctagctgggcttcatgcttgtggagatctttctgtgatgatgctaaagtgagtgccaaattatgcttgaagctcaacttttctagatatggtttatcacagaacgaacattctaatgaaatagtttagtggttgggacattaaggagaagtaaaagttaaaagcataatttttatatttcataagagagtttaggaatcacttttgcatgcttaatctttacctcggttatctaattgatttctctcaggcttcatcatttatcccttattcttttttgtatgagaattcctagtcctcctgtttcttctctttgtcctttatggaagtaatcttggcaggattcagaatttgagaaagttttattaagcccaaacctcacaaccaaaggcttagctagaggagtgccttcattcttgcaccttgtaggcagagttttgcaatgcaagacctagagacgaagagatgaaaacattagttttttggctgaagcctgtttttattttggatataggcaatgatttatactatcaaagtctccagtgcttaacatttttaagacttgtatagataggaaatctcaactcatctatgaaaataaatgacacccaattacatagacagaatgtaatagctccaataaccacagacctgaaacaaaatgaatttcagggagaaaaaaaatctattaggttcttataggaacaacggttgtgtgtgtgtgtgtaaaataaacaaacattgcctcgggaagccacataactatcccagcgttctctgcccactactctctactgcctccttgaccccatttgttgttatgttggccgtggtattgtattcctcatcagcatcacacggcaccatttgttatcttctggtgaaacttcatcgtcctccctgcaattttttgagaaccagtgtcacaaacaccatgaaatctggatttagagccagaaagagtgaaccgtgtgacagattcattttagcattatctgatttttatcccttctcttactgctttaaaatccttctgaactttggatttaccgttgtcctttgttgtttgttactaccatttgtaatattttgcttccttattcattatcctttttgctattatttagcggtttgatctgaaaaaatcacatgtttttcttaatagggcttttctggattgcaaagaagtcaaagcagttgttagcataggttgctgttacaacctattatctgaagaaggttttgaccatgtcaattctgagtatggttttccaatgagccgtggagttaaatcagctggcttgccacttggcaagagtttgcgtgatcttgcttgtcaggtagaggcgtatcctttgtcactctaatccgtaccaaaatgtgtgtgtgcatttgacaccagatattatataatttcttaaataatttatgttctagacttcaacatctttcatatgaggtcccttcccttaaaatattgtctttcactgtggattttataatttaaaatgttttgctgtagacttctacagatattttgctttaatacatttgtagtatgcactcatgtaagcattgtttgtctattgaagaaaaactttacttatattattttgtcttactagagtgcagagaggtggagatgtctggaaactgatgctggagctcacaactttgagatgcatgcttttcgtgctgcttttcagatggtatcccatttgttttccttctttgcatttattcttctcattgtaatgctgttacaatttgtaaatgcaagttttgacaacatatatgcagttgaaatccattttattgccaactttaattgggtacaacctttttagaaaaaaagtttgatacctgtttttccaatttctcttctttcaatttaaactttattgtggatgacacgtgtcctgtttaaaggttcttaataaatattatccggaagtcatgacaacaagtccatcaatcgggcgtcaaggaaaagccttgcgtcgtctacagaaaagggcgacctttgactccccgctgaaccacaaagatagcacttgtgcatcttcacatcagatgcaatctaagctgaaagaaagtacagagccagaaagaggtaaagattttgcttagcataatttaacatggttatgcctacttggtttttattctattatgttgtattgatggtgggctgaaacatgtctacgcctactaactcattctgaagcatataacagtgtgaaaatgtaatgcaggtgatatctttagctcggtatctgagacaacatctttatctggtagagattctctcagtggctctgaatgtgagaacgtcaattgcaccgccaataatgattttcttttcctgagatacagccagtctggattgtgccacctaggtctcaagtctttgcaggatattgaattacatagaatatggaaggaagttgagcccttttctgtaagttaccttttactatttaaaagacagcacttttttttttcttttcttggtaggacagcaggctgttttgtcaaaacttgatggatttgttggaccatattattttatgcttcatggatgaaatatttgcacctttgaactcatcctttgtcgttgttggaattggaaccattgtggttctccttgaatatcaactttcaaggtaatattgatgtgataagatttttattctttcctgtaaatacaataaagtctaagcctaactaataaagtagacgaaaaatctactagttagtttagcaaaaggaaacaataatccctaatagccagccagatgaaagacaggaaaagtcttgtctctgttggacatttctatcaaggctggatgcttcaagaaggatcctaggcttttgcatctgaatgttatacatgagggttaagtcctttcctgtgtgcacttctctgaggctttagtttagtcttgagttgctgaggctaatactacatttgtaagcccaatgagattaattcagcttttgtttgctgatgttggaggaacaagagactatcaatctttttgtaaatgatctctccatagtgcaaaaggactaaattaaaggtgaagacaattaaaccaaaggccaagaaattggtagctgctcagctaattaataaataaccggctatgagaattgctgcttgatgaatttaatatgggagaatgaatttacattcatatgaccatgctttgtgatttcatacaggaatttattggactttattggtctcttcgagctgctttggggcctctcttagaaacatatattttgctcgatagactgttgttccttcaagagcaaggaaataccattgaagcactgatgttatcaatttttgaccctgcattatcaccaagaaatgtagcaattattgcaaaaaagaagtgacataaatgtaatggtaatcttctgcaccttatttttgttcatatggtttgctatgatcattaattcttagaaatttttaagccatttgataataggct

SEQ ID NO: 243610 - DNA, 2560 bp, Cannabis indica
gctaaaattttaccccaccccgaaaaaatagcctcacgcccgtgcaaaaataataataaaaaagacctcatgaccatacagaaaaagagtcacaagagtttggctgcgaattgtattcaatttttcggggacgctggaggaggcaacttgggaccacctattttcttagcaagagttgcctcaagcttcttgttcttctcctaaaagagctccagaacctccttaggattctctagaaagtgaaagagaggttcaaagcgattggccttctaggtcataaacaccccatcctcatagcctttcacgcaatgttggcatgtgacgggagttacaacaggaggtgaattcatgttcgtgatgtcttggatcgattgattagcatcccagaggcttcaaagttctttaagctcaatagaaatagtggtcacactctgtaagtcagcagcatgaagctcctcaaccttaagcacctttgcttagttgtgtcaagttttcccctggtattgttcatttccaactatgctttggaaaaattcacctctttttaaatgaaggcctattaagatgccaacaattcccctggctctgctaaagttattttgagacttgactcaattcctcctcaagattagatggcttcttctggtctcgctccagcaacaccttctctgacaacatgttatcctgaagctcctcaaattccttctctgctagcttgaactttccctggaccaaaacaagaccatctgatgttgccatggcatgaccctgtcgatcaagttctcatataagacctcttttgcagaagcctgtatcataaacaattagtaacaataataagggtaactaatgaagacagatggttttgaatattttacagaggcaagacaatttctcaggtcctaatattggaagatggggtcgactgaggcacacgttgaaattttcctggtagagacatgcaccatctcagcagccagactactgatcatctcaaaggccaatagaagtagttctgacgcaacatagtcctacgacgagtcggttagggatctaagtttaatttatacaccccagagcctaccatcttgtcgatcgttaatccatttggccagaaaagtttcctaaacattctccttggacatctcgtccaaggtaacgttatgcctagcaacctcaagtccatgtgagcatcatctcgatgaataggcgtaagtaggatatgtaaaatctctggaaattgagctatttcaggagggatctctcaaacttgaagtcccttgtgatctggtttggctggctaaagccttagtgcatgacctcttagatgaggtagatatggaaggcagaaggcgcgctttgcgcttagaatatcggttctcgaagggaacaacctcatccccttactctagtagaatgacctcctactaattctaatacttttggattgggcctccttgagtcacaaccactttcaattattatgcaaccaatgcgttctcagttgcgtcgagatctatggttgtataactaacacttgctggatgatcaaatgagagaacatgacatacaacaacgagtgctagttacacaacctagatgatcgagaacatgataaataaattagcaaaggtcaattatataaaagggatagtccctacctcgaagctttaactatcccttaacaaaagcgtaaatcatatatgtggagtcatttttcgtgagatatttatctaaggggataaacaagctagagatagtatgagaattattatctaataggattggtagcgaaggctctaactgtaggcgggacctacctaaaaaatcccctagatacaaacaatgcttgtttttctctatcctctcaatgagaccgtggcgtactaaacctatggagtatctcattaaattgtggacttgacttgagcatactttcaaccttggggtgcataaactaaaggtaagaggggcttacaagtactagagtagctgactttagaagcccctgcattaggcaaaagtaccttcagatgggtcaatgagtccctaacttattggctgcctttcaggcattctcgtagcctagagcactttggaagagagccacactgtcttttccttcttgcacctctagtaggcattatggtacactttagttggatttcgcttaattaagctagtagaatatgatagaatttgtaattatttattagtcgagatttatttacaatcctttatagtaattattttgagaatttcttaattagtagaagttggtgattatttaattggcttatttatttaagtgataatttaatacccgttagttaaaaaggatttatatatacatatattctttagatatactgttagttagttagatttgattaattgactttttttaccttaatattaatttcctaactctaggagatgacacctagctacgccactcatcttagtgattcttatcaattatccatcatcttaattttacccattaccataacaaaagaagtccatatctctcatttctctttgctcatatacgaccaag

SEQ ID NO: 243611 - DNA, 6127 bp, Cannabis indica
ttattttttaataaatatttatacatataatttaaaatttctataagcagcacgcgaaacgcaagttgtttactaattagagtaatttacagcataaatatccaagtttatcttttagttgcagtttaatacctaaattaaaattttggcggtgcatatgccttctgttacacttttggaaattctgtaagtacctctccggttttttgacacactgagtgccagatggcaagacacatcattaaaaataatgtcacatcattttattaataagcacctaatttccattttggtctacaattaatataaattaaactaacaaataaattttgaaataaaaattaatacagttaatataataaaaaatctgtaacaaaaactaaaagtaatctacattaaagagaaaacaaaacaaaaaggagcgccagagtggggtttcgttttttctctctgtttgctctggagcagttaccgtttttcctgcaatcttctccacttctcttcagcggttatcagtcatggttgtgaattcatcttccatgccctccttccatggaatcgtgctccatgatggcacttcctccagtcagtttttcatggtccgtggggctatatatgattcccagcatcgactttttgccttatacctccatttcttgtttgattattctgcttcccttctctttatggattcaattttacaagatatgaattctcaattggtttagtctgagaaggaaagagcagttcactccttcactgatgcagacctcgtttctgaaaaccctgtcccaaaattttttcttgtcgcttgttgtctatcgaatgctatcaatcccaaaaatttcattaagaaaatgggtaacttctggagtaacaaatgtcgcttccctgttgaggtatctgaaatgcattctgatcttttcttactgacaattggttgtgcaggggacaaactcagaattcagaatggagaaccgtggcacttcctcaatcatcttatcctgctgcactcccctattcagttacagaatgtctcaaggaatgatttctctaagtttcaattcttggttcagattcatcgactcccttttctcagcaagtctcgagcattggctacaaaggttggtgagtggattggagaatacattgatgtctatgaggagtcttttcacgaaggttgggggtcttttatccgaattagagtttggatagatatttctcttcctctcatgaaaggcaaacttgttaatcttccgaaagtgcgtgatgaacattggttggaatttcggtatgagaacctccccaccttttgtttccattgtggtagaattagccatccttttgataagtgcagtgggtttttggaaattgtggatgctggggttgaaccagacctccctttcggtccttttatgatgggggataaactcccaaactcggggtatgatcgctacaggtatgatttctccaaggcaaatgtgtatcctttccttacaagaatggcccgtaaatctatcgcttccactatcccaaacactaactatcaccaaaccagattgactaccactaaaccatacccgtctcctcttactgttgctgaaactagtaattctagcaaaaatatgctccctcagaaagagaccattcctgttttaccttcaccatttcccaactttttccaaagcctctcttccaccatgctcacttccccaactaattgtcacattacacctaatactcctcatcctaactacaccagccactctatgtcatcaaatatctatgccacttatccaccatcagaccacctccctcctctttcgggtcaagggccacaaggtctcttttgtgattccacaatcacatctttcaaggataaaggcaaagcggttttagttgaagaatcctctcttgatgggattgcacctagtaaggctttcaagagacacgttgatcctgaaaattttcgaagtgtgttaaaaagatgccgaaataacattggtagcagtaaggaggtcaatgaattcaacaatcagcaaatttctaatgctcagtcagattccaatgaggagaattcatttttttcagcggaggttttgggtcagcaaccccgcatggagccatgaagattattagttggaatgcgaggggattgggcaacccttcggcatttagacatctcaaactgcttgtcaacaagcagcgtcctcatttactttttattatggaatctaaacttgcttgtaattcagttaacagggttcgttcctctcttaagtttagtcatggtttagaagtacctaggaatggtttgaagggggtttattgttattatggaaggatgacattgatgtaactctgaattcattttcaatgaatcactttgatgtttttgtttcgtatgatcgtggtttccggtttcactttactgctttctatggatcccctgaatcccatcaaagaattcttacctggaatctttcaaaaagctttgcatcttctactgcttcttagccttggttaataatgggtgactttaatgaacttttatcaaatgatgacaaggatgggggtcctttgcgaagagaaactctgatggaggattttaggcaaactgttgattattgcaatctgactcctctggctttttcgggagacaagtttacttggactaatagacatttcagtggggtactcatcaaggaacgactggatcgtggatttattaatgaaaaatggaaggaatttttttcagaaaatcacctattgcaccttgactattttagttcagaccatcgagctattgaattttatgttacttctcaccatcaagagcagccggttcgacaaaaccatagcagattttgttttgagcagttctggttaactgaccctgaatgtcgtcaggttattctcaatagctggtcatctgtgacaggttctttaccgaacttgttgcaaaatatttctgcttgttcttctgctcttcaacaatggcataatggtaaatatggtcagatgaaaaaggatattaatcaagctcaatttatggctgcttctttacacaatagtatggacaattcccctgctcacacggccaaagttcttaatgcagagaaaattttagatgacttattggagaaagaagaattatattggcatcaaagagctagagttgattggctaaaatgtggtgattccaatactaaattcttccattttgctacatatataaaaataataagattaaaatcccttatctctggtgatggtagagtccttcatcctgaagatgagtttgctactgaagccgtctcctatttctcaactttgttcactacagtgggtgttgataatgaagcccttaccactactctttcagcaattactcctactattacgaatgagatgaatctgatgttgctggcaagttttactcattctgatgttgatgaagctcttcattcgatggctcctgacaaatctcctagtattgatggcatgtctgccatgttttttcagcgtcattgggatgttgttggttcccatgtttcggattgtgttctccaaattttaaacaatagtgtggatattactgatataaactctgctctcatcactcttattcctaaagtggatcagcctcaacggattggtgactatcgaccaattagtttatgttcagttctttataaacttgtttccaaggtcattgtcaaccggtttaaaagggtgttgccagctgctatttctcaaaatcagagtgcttttctaccgggtcggctaattacagataacgttcttctagcttttgaacttgttcattgccttaaaaataaaaaaaaaaaaaaaggaagacaaagttatgctgctctcaagcttgatatgagcaaggcttttgatcgggtggaatgggttttttctcaagaggtgatgctcaaaatgggttttgataagaattgggtggaacttattatgcggtgtatcgtcatcttcactctctttcaacatcaatggggctgtgaatggctcggtgagtcctcagagaggcttatgccaaggtgatccattatcgccttatctttttttgatttgttctgagagactatcagctttactgggaatggaggagagcttaggcaatctgaaaggcttatccatatctcggggtgccccatcggttactcatcttttgtttgctgatgatagcttattattttgccaagctaatgattcctcttgtcaagctatcagccgtgttttagatgtgtatcaccgtgcttcaggacagcttcttaacactgacaaagcagttatgtctttttctccgaatgctagtgcggatttgaaggcaagatttaataatgtgttgggtatgccactttgtgatcttcatgaaaagtacctaggcctaccctcttatgctggtagagggaaatctgaacgttttagtaatatcaaagaccgaatttggacgctcttgaactcttggcatgcaaagcttttctcaattggtggtagggaagttctactcaaagccgtggtgcaatctatacccacatatgcaatgagttatttcagtttacccaagaaattttgcaaacaacttgaagaaatgatggtaaatttttggtggggttctagcacaaacaaatccaaaattcattggaagaaatggagcatgttatgtcaatctaaagaagagggtggtatgggttttcgatctttcctccactttaatcaagctctccttgccaaacaggcttggagaattttagaggatcctcactcacttttggctcgagttttaaaagcacgctatttcaaaaatggggatttccttaacgcttcaaagggtacacttccatcccttacttggcagagtatatgtgatggtcgagaccttctcgttaaaggacttcgttggaagattgggtttggaaataaggttaaatgcgcttcagatccttggttgccgggtaacactactttccttccatatacctatcaagctgatcctctctttactgttcaacactacataaccaatgaccgccaatgggatttaaaccttctccaacagcactttggccaaatcgacattgactgcatcttttctatttcgattagtcctaatccaagagaagatagattgatttggcatcactctgaaactggtacatattcggtaaagacgggatatcattttgctgagagtattgacaagattaacgattcatctacatcctcttctaatagcaattggtggaagcaactatgggctctaaagctccctaaaaaagtcaaaatttttgtttggagagtgattaatgatgctttgcccactgctgttaaatctcttgcacaggaaatttactcaatcaaatgcttgttcattatgtaattgctcaagagagtctttaggccatgctctttttctgtgcactcgagctcagcaggtctggtctctatccccttttctcaaggctattccaaatatgttccatctgaacggttttgaaattttttcttccattgctgctgccacttccaactctgatttggagagaattttgtgtcgtatgtggagtatatggactgaacgtaataaggagatccatggcactaaaccaaaaccggcctaccttatttgcttttttgctgttttgctgacaattatattcaacaatacataaattcctcttttgcagcaaacttcttccgattcttgctcccttgcacagcctggttcaagcaatacggagcaacggaatgggaacacgagtcccactgctacagttaaatggtctcctccgcctgctggtttttttaaattaaatgtggatgccgcatatgacgctgctggggctgttattggtattggagcagtgatcagagattattttggtgatgttgttggggccttctccactcctttgcggggttgctattctgtgaaggaaatggaagctatggggatcattcacagcttacattgggctaggaatcacggtttgcacattcacttcctacagacagattctcttattgttgcaaatgctatcaacaaaggatcttctacagcccatgtaacaccctaaatagcataggcgtattacgtgat

SEQ ID NO: 243612 - DNA, 2048 bp, Cannabis indica
ggattgatggaggaggcttatgagttattgttagagatgtcaaggataggattggtgcctaataattttgtatacagttctttagttcatgggtttttgaactgtggcatgctgaatgaagcattgaagctagagaaagagatgaggcaaaagggtttcgttccagatattgttatggtcaatataattattaatgggttttgtaagcagcgaagaatggatttagctatggaaaaatttatggagatgcatctgagtggactgagaccgaatatcgttacttttaacacattaattgggggttattgtaaagcatttgacatagtttctgctgaagagtttgtgcatagaatgtatgctagtggggttgacccggatattgtaacacataatatctacgcccatggtttctgtcgcagtaggaaaataaatcgagcagtgaagatgctcgatgaattggttttggcaggtatagttccagatacagtaacatataacaccttgttgaatggtgcatgcggtgacatattggacaaagctctgattttgactggaaaactgctcaagatggctttcgttccgaatgttgtcacgaccaatgtattgctgactcacttttgcaagcaggggatgcccgagagggccctaatgtggggtcagaagttgagtgagatttccttcgattttgatgaaattacctataaaataatgggaagagcctatcatagcatagaaaaagatgctaatgttgatgtaagagaaacatctgcaaaagggtttttcttggattcccttatgtacattacatatgactatttttgtagaaatagaccctctcaggaggaagtaagcccaaatcctcttacactaactgaatgtaggtttaaggggtcttgaaagttggcatcttcgacttgtctttccattctcaaattttgagcatcctcagtccatgacattcagtcagtagctatggagcaccagagaaattaaaaagtaccaaatgaagataggagtgggaaaattaaagcaatgagaaaaatatgtgatggttcagcaagttgttttgcatatgtttctttgatgggatatctttgtagcctcaagcacattgagatgatcgatctggtctgagttgatccacacagtgtacttttgtgtgactcagaaacgcaaagaagttagaaaacagagtcttaacagtatacgatttccctcaagacattaaacttgacttcgaaatcttgatccttcaaggtagtgctgtatctcttttttcctcacttaatagaaatatttgtggtttaggtggccttactatgtccacttatttgatatttacaggatggcaaagttaaagttttagcagccaagcatgctggtacaaaaatttgtatcagtaacatatgatgtctcttctatagccattgttgctgaacatcattcaaccaaattctggattatacagaagcatctcgtacacaagaaaaagcttgagatgatcaatttccgccccctagccaggccaatgcacacagaaggtcgatctgcatcaaatgtagtacactggttcactggttagtttgttgttatgttataaggttattcagtttattagaaaacatggattatcagcataaatgtacctgatcatctgttctttcgtaagaataacagacaatatatggccatagatttgatcagtatgtatacttgctaacaatattagtatattacttttgactgaactttgtgaggatgatcatcttttaatttaggatgtacattcatatttataaaacacaattttaaacttctaattagtatctgtaacacattacatgccttctataatcaatttcagtatatttacttctggtgtggcagattatgtggtttcttctgcatcaccgtaccttactcaatatagagatgcacagaagaattctgtttttgatgtcaacaagattaagatcaatgtagatgcatctatttgtgcagggattgatttcacctgctagctaaacgaactctgaattatgctgctt

SEQ ID NO: 243613 - DNA, 2438 bp, Cannabis indica
cagtgaccaaacatctcataagattcttatcttttgaaaagagacattgggaccagaaatagaactagactagctaaatgaaataataaaatgtaatatgagaacattattccactgttaaaataagacagaactaagtacacaaaaaatatatatttatatatatgtaattaatagtgtgggaagcatgtgcaattaagtagtgtagtttgagggttcccacattgtaagtgatcctgatcctgaagggtaacttacaaaagacaggaggttgttattggtagcaccagcattttgtccttgtacagctgaagccctagaaatcgcaggaggaaggaaggtactggtttgatgatgatgagaactcattgccactattcttacttgttgctctaacctctctttctcttcccttagcctctgtctctcgacgcgaagctcattcttctcatcctggaaattattatatatattcagtatatatacagaaattaaacaaatatgtatattttatatttgaataattaattgagtaatcttacataccttgagttcttttatcttgtcctgtagatcgtcaattgtttgtttcatctgacgagactcgctgcgcaattgagtcattattcgaacagcatcactcagtatggcagccttgtctgttttaggcagcttcccgagctccatcacagcaaccaattctaggaacctacataaataatattcatgagaaatcccaggagaacaaattaagcacaaaatttaacaaatatgcaaagtattattaattggaaggatttatatatatatatatagctatagctatagctatattattttgtatacaaatatacctctcatttagtctgtccctgcgcaatttttctcggcatgccttgtagttggagcaagaggcacccccacttgattccgacctttgcctagatgaacacatataatgttataacataccagtcaattaattatatagtacttgttatcaaataatgtaggtttttaaaaaaactttgtgataaaaagaaaagcaaagtaggtcttaattaataccttttccgggagccaacaaccttgttgttatctgaatccccagatgaagataagtcaacctccacactacaaaaattgcaccatcgaaaaagtatgtcaacgaaaaagggtacgtaacgccatctatgcttgaaaccaacagctttataaatgaagagcctaattactgttactctactatgtgtgaggatataaaagacatatgcatgtactaataattcttaatttgaaattccaaagaagcccggaccggactcattcatgcacaaacaatattacagttggtatatatggaacggtaatgaactcactatattagttatatgatcttcaattaattatgacacgaccctcatgtcatgcatgatgtggctaaaaagtacgtgcatatatataaattgtaattgtatcattaataattcaaatattaatttatttaccactccaaccaaatgaaatatattgtttttgacttttaaaagaatgtcaatagtaaaattaatttccataaaaatatataattttttttttttgaaaaaaataaggaatatttatattctgttgcttgaaattaaatatccatttagtaagcagaataatattattcatttattgactttttattttataatatatatgccctgattaattaaactttgataaatttaatgaagacaacaaattaattaatttataagaacaaacaaagcccacacacaccttccattagtggaagcattaagttgatctagctgtggaggccaaatgaaaccggtggctgcaaccggaaattcgcctccgggaataagaatatcgtccattatggtatagtcatatagccaattacagttttctgtggaagccatggccatctccatttctaattatatgtatgcactaaattaataagagcaagtagggaaagacgaattaggaatatgatatcacagaatcgatcaataaagagaagtagagcttagactgtagctagaagtttagaaatattcagcacagtactaataaatcccagtccgatactgtactctaagtggagatagagtagagatcagtagttattagacaaacaaaaaattaatattgaaccaactagtggattgacaacatttatttataacacttctcctcaaagagttgaccaatgataaatcattaaacaaattaaaattccaagaatatgtcttcggtatcttgagttaagtaacatgattttcaaagcagttggaattattaaattgatttgagttttgttattgggataaattttctctcaccgccagaatgacttcattaatgaactcacattcaaggaaaggaaagcacacctcgcatatatttaatgaaaccgtagt

SEQ ID NO: 243614 - DNA, 1815 bp, Cannabis indica
tgtgtttaacacaaaaaagtgcggattgaatcggatcgaacacccctactagaaaacattgcatgcatgcatgcaatatgccaatataggtttaacaactagtgaagagggagtaaattaataattaatttgatcgatttcttacttaatacgatttttatttcttattaaattatttatccctaaccagcaagaaagttgaacatggtgtcaactcaattcccttcatattacaatcggttcaatagacaataggtatatttgtgtattttaatcctaatgaacaataaacaaattctgaacctcgagcaaataataacaactactttacatgaaaaggtgtattcaattttttttttaattagttttataattatgcattagaatgctaaaattaaattgatgaaaatataagtcaaagcaaatatcacaaaattattttttatgtcaaatatagcataatttttacatctctcaaaccatctctaatacaagatttaaaatttgtactaaatttgaccaaaaaaaaagtttgtgctatagttagccaattatttacgattatattccaatacacgagatatacaataagtaaaaacaaaatattaattattattaataatcatttaataatattttattgaaaataaacaaaattattttttttattttttattgtttaaataacggtaacttagtaaataaagtacgtaaatttttgtaaacgtcaagaaatcataaaattagtggcacaatttttcgtatgttgcaaatttggcatgcttctagaacgccattagagtaatattatttttaagtatgttaaaatataacactctattagagatatgctctcatatctccaatatgaatgatgtaaaaatttatactaaatttaactcgtcaacgttgtatttagcctaaatttaactattaaattttaacgtgtaaattaattaacttaaaattaaagtcaacagagcttttttattgaaagtatacatatcatattaaatatattaattaaataaaacctagaaaattattaattatatatattaattaatgataaaagagtaaataaaaaataatatttattgtgctataaattaaattagctcatcttataatttgtagcaaatttggtaaaaattttaacacgggagcatttttaattgagtgctaaaatagtagtataagctatattttagggaaaaaaaattcttcattattgtgctatttcttgcgttgaatttgggctatagcattgtttcaaatttgcacaataaatatagttttttttcattacaattttatcactaatcactaatgatagatattaatacatgattttaaattattatattatcattataactattttttaaattaatatttgatttattgatgatcactaattacattttaccttctgtactaatttacatcttaaaatgattatgtgcattagaccacaatagcaagtattatagcaattttttgtactataggctaaatttaacataatatttagactttgtataggagatatagtcttatacaccatatttatagccaatcaaatataccaaaaaaactaaatgtatatgttttgtcctgcattgttcatgtatatgtaatttgtgagataaaatgttagggtgttcattcaatctaatctgtattattttgctcaaagtgtattcgatccgcactaagtgcgaatttcgtattttaaatccaattcaatcggcataataactcaaattcaatccgcaaaagtacaaattggattgattattttaaatttgttac

SEQ ID NO: 243615 - DNA, 1385 bp, Cannabis indica
aaatgtataaaaaaaattgataaaaaatttattaaattctttctaatcatgtattggaatgatctttacttccatttcaaaatggaatagtcattccactaaaatggtaaaaaaattattctattggaatgacattctaatactatgcaaccaaacaaatgaatggaaggaaatttgtttcttttcttttctatttcattctatttcattacttccaaccaaacgccaactaagttcttgccagttagagaaggtggagaggaaattttcataagctttgacaataaagcattggttgatgtcctaaaaggcaaggtttctatgccttgctggaatatctcagctggtgattttcctatcttagagtttgttaatcttttcatgtttatagttgtaactacatttgtagtttgtggccaagttgatgctatcaccaaatgttcatgttgttaagattattggcaagtttttttaggggagttgccctttgtcatagccggtttaatatatacagaagaaaaacaattaaaagttgtatttgtgaaagaaaataaagaggaaattttttcatacgatgcgtgtaaaaaaatagtttttttttttcctgaaaacgtggggaaaggaaaagaataataaataaaaatagggtttgggaaacacttaaaaaggtccattttcccatatttttaattgtttttttctttaacttttcccataatttttttttccaaaaatgtcacattttttggaaagaatgaaaattccccaaaaataaaagaaggaaaagaatatgtcaacaataattgtgtgatgtacattgatgaagctaaatgatctcatcctcacataaaaacccaaagctcacacttttggattttatttcagttagcaaattcactcaaaatagtacaagtaactatgggccataagaggcttgatacaaataggcccaaaagaagaagttgtctcctataattataggtgctgcttttaatttttgagtttacaatactacatttgtatgaagaaataatgacaggtatgctacccccttccaaaaaaacatataccctaattatttgaagaaattatactatatactttttttaatttgatgtttttaattattattttatctttaaaatttaattatgtttgtttttttaggaataattacataagacacaattttttgtaaaatatttatatttttacgttcaaagaatgtttttttacatttttacggttttccaaaaaataacacgaaaacaacataaaatcaacaagaaaacaacataaaagtcacataaaaataacatcaaaataacaacaaaaaaaaaacaaaaaataacatacatataacaaaaaattaacaacaaatgaac

SEQ ID NO: 243616 - DNA, 1897 bp, Cannabis indica
caatacgacctaatacggcgttccaaacgagccctaaaactattattttcccttgctgccattaaaaatttgcatttacatcacatggatataaacaaccattttttccatggaaaatcaaatgaggatgtttgcacgaaaagaccttaaggttacaccccctcaaagggagtgatacctccaaatattgtatgcaaattaaaaaagattctatatggtttcaaataattatcatgatattggtatgctaaactcagcaccattatattaagacagggctttatacaatccaaaaatgattgctctctattcttttttcaggaatcaaatattttcttggcattacttatttaattatatgatgacattatagtttccactaacaatactgctacactaatcactttcatttctactcttgatgctcagtttaaacttgaagatcttggtgacttaccttttttctctaggccttaaaataggtcactgcaacaaaagtatttcagtcacacgacaacctttcaccctacaccttttacaagaatcgagttttttggaactaaacctgtatccacacctatgaaaccaaacatcaagttgcacaaggattcaggaccaccattgcctgatcccactcaatataggagtctaatcagcaagcttctctacctcataataacaagacccgacagtagttttgatgttaacaaattaaggtatcagtcccctcgacaacaacacttacaagctgcctatagaattttataatatctaaaagggtgatctggtcaaggtctcttttactatgccgctacctcaatgccactctaactaaaagcttttgctggtgttgattagggtgcctatatggatactcgacgatcaatttctgattactgcatttttctaggccactcactcatctcatggaaatttataaaacaaccaactatatctcactcttctgctgagtcgagtacaggcaatggcgaacatgacgtgagcttacttggctcatctccatcatcaaacatttcaatatcgacatcatcctttcttatatcctctattgtgataataatacaacaatacatctttaaaaaccccgtatactataaacacacaaaatatgtggaaatagattaccatattgttagagaaaaagtcacaaataacactatgaagatgaaaaatatctcctctaagaccaatctaactgacatatttactaaatgtttgttgcctactcattttaatgatattgtattcaagatgggtgtgaaattttttacactccatcttaaaggacctattaaattagttagttagttagattggttaggttagttaatgattcttcgccttcctttttctgttatttagtttatctcgttttaatcaagaccctatatataaaggctcctgatctcttctgtaatcttcattcaaatcaataaaactactttttctcccaaatgtgtaaattctaataggcaaccgactctttatgagttgttagtaatattaaattacatttataaccattcacgtacatacattattgaatgttacatgaattgaaaatatctccagtacaaaacaatatgagagacaatatatcaacatcaagttcaactcaaccacaaccaaaaattactgtcatttttcaatggaataaataaaacaatgaaaaccatgtaagagatttaaaacaaataataataaaccaaaaaataggtgtcataaatagtcttattatttaatatcacattttaaatattttagttggcgtttcgtaacacttttttaattggttttctgtttttaaaagtggaaaagtgaaaatatttttcaaaatcatgttctataaaattgtttttacttttcaattttataa

SEQ ID NO: 243617 - DNA, 3901 bp, Cannabis indica
acgtccaaaactcttaaaaaataacttgtaatagatgaattatagttttttaatatctttattcatggatattaatattatatctttatatttagctaagttttactagcttgattaataaaatgagaaaatcgtaatcagagttaaaaatgagggtcactattttcaaagagccatgttatgtggtctcaattgagcaaaacatcatctttctttctgaattcagaaactgattaatttgaggataaaattcacaagaagacaaaggagaatagtgagcaaaaaaatatacaaaaatgttattaagcaataattttcacttaaaaaaaaacaataattttcacaaaaataaaatttaaatataaaaaattaatcataaaaaatcaaaatttaaattagaaaccaccaccctttcattgcctccaactgctcctgtttagccatgcatgcaaaaattaccagactatttggtggtttaaattctttattattttttaaatgagtattaataataataaaaaaaatacaaacatataaattaaaaaaaaatgtacaacatgcccaacatgcccccatatttggccttgccttcaaaaaaataaaaataaaattcctgcctacagaagaagaaaacaacacgcaaacaccagaacaaagagattaacaagacacatttcttgaggccttctacatattgtgttggatgggaacaaatgctggtcaaagtcaaactcagtttatctttcactgcagaaactcactctgctgagctattcttggccttttcttcttggagaagaggacagaccatagccttgtaagtcctcttatcaggaattactcccttaatcaccatatagtcatgcaattcaataacctcttctgaactacaattcttactgaaattggttatcaaagtggtatatgtaataaaatcaggtaccacaccatgaagaatcatcaccttcataagctcctttgcatgttggaaacacccaaacttgcacaataaattgactaatgtattgaatgtcacttcattgattgagactcccacctttctcatttctgaaaccaaatcaaacgctgcattaaagtttcccataatacaaaatccatttatcaacgtgttaaaagtagttgcattaaaactcccaattctccttaactcatcaaataaaagttctgctatatcaactgatgatgcctccttgcataaaccattcatgacagagttgtatatcaccaaattgggcttcttgtcaaccttaatcatcttttcataaacttgaactgcactttctaagcttccttctttgcagtgaccatcaatgaaggtcccataagtgatgagatccggcggtaaaccgctaacaaacatactgcccagtaactgctttgctgctccaaagttcttagttttgcacatatgattgataaggatattataagaaactatatcctctataattttcttatcaagtactagtttatgaagcttgagagcttcattcacattaccttttctgcaaaacccatttatgaggattgaataggtgaacttatcaggacatatatgtttttcaaccatgtcagagaaaagcaaggaagctccctccatatcaccttctgagtaaagccaatgaatgattgtattgtaaacaatagcattaggggtcaaacctctttcagtcatttcatcagataatctaagtgcatcttccaaactccctactctcccaaacccatctactaatgttgcataagtcctaacattacactcaatacctgctttaatcatttcatttctaagcttttcagcaaaaaaacagcaccaattttgcagaacccgttaatgatgcaattgtaagagactgaattgggcttaacatactcacctgacataactcccatcttcttgaaaagcttcaaagcaagttccaaatcaccaatcttacaagctccatccatgatcatgttaaaagtaacaatattaggccaaacaccaatcttcaacatcctataaaaaactgagattgcttcaagcaatttacattctttacaaagtgcataaacaaccaaattaaaactatatacattttcaacatacccaaatgaaaccatttctttgtacatattccaaaacctaaatgtttcattcaacttcagaagatggctaagaaagttattccaagcatgaattgttacccaaacaccatccaacctaagcttctccataacttcataagcaccttcagttgctccaaactgagtacaagccctaaccaatgcatcaaacacagcaggacatgaaccacatgcttcatagctcttaaccaaaccttctaaaatctccaatggagaaaccacataggaactcattaaacttcccataagattcaaagcattgtcatacctccttgaattgacaaaaacgtgaaccaaagtacaagaagattctaaagagagctgtgaaattgttttgctctctccaatccgattgtaaaattctaaagccagcttgggcgagttctgaaactcgcgaagaacacgactcacaagggaatcggtaagactgggtgtgatttgctccaagaacttccatttcttctgtttgacattaacacaaattgctctgaaaacaatgtcttcagcagtagcagttgggttcttaaactgcttgcccaaatgaaaaccacgccttaatagttgaaaactagttctgggtagacaaaaactcatcaactgcaccacttttattgtactgaaaaaagctaaaagaactcagcagagtatgaaataaagataagagaagtaaatatcggaatatgggcaacccaaaaatggtttcttttgatttaaagataaagtctttgatagaaatttgaagtggttaggcccaagttaccattgaagctttgctaggagtaatttggtgccactgctagttattcttctgttctagcctcccaatttctgatatttaattttatttatatcaagtccctgaatttttgaattattaattttttggtctctaaaaaaaataattttctaactctcccataattaagaaatctatagcgataaaatactttcaattcgatcctccgttattaaattgatagcaaaaactagtcttttttgttttatttttattttattttctcaatcagcacaaactataattaacataccaactatatcatctagacttatttccaatcagccatctgcaattctccctaaggaaatcgcggtagctccacaaagccttggccattttggatgcattagatggaataaaagttgactagtacgatttgtgattgcagaagttgatatcctgaaacttcttaatccccagccccccacaacttgttggcttgcaaatagtatggaagactgaagttgttcttatggaagttggctcatgatattctgcctactactgaaagaatggctagttggtttggaaatcatgtagttaggtgctctctttgtgacatggagggagctgattcctttgatctgaggtgtggggttaccagggccatctggttctcttgcaaatggggtatcacaagtgatcagctgggatggtcctctggaaaagaacttgtaaattgaattcttaatccaacatcaatccagggtgtgaaggatgaggataacaattggataccaatacaattataaaacaagtaaattggaggcgtaacaactgctccaaattcgatcagctaccattgttttagactgccacgagctcgtcaatggaatggaatttatagatcaagacctccagattggagagtgggtagtgccttctactccatgctcgaatgtcttcaatcaagggaagggaacaaagaataacagagattgggatcctgtgtaa

SEQ ID NO: 243618 - DNA, 1566 bp, Cannabis indica
cgagaccaaagggaatgaaaacataaaatccaaaatcaaaacaaacctcccctatgtctcatctcatctctcttgtcttcttccctaaaccaaaaccctatttcccattcgcgcctcaccctcaacctttcctctctcttgttctctttacccagaccagccctctcaacccaatttctctctctgtttctcgacctatctcaccctctcttcttcgcggttcctggtacgactatgatgagctatcatcgtcggctaagggctcgaacaggagccaccaaggacctagttgactctcaaccttgaggaaaaatggagcttcttcctcccataccataatttctctatctccatcattcgcctcagtctcggcctgacatgatttaccaccttcggctgttgttcaccaaggaataaacacggatggtcttcctgtgctcttgaaacccaatgtcaaatgggtcttgtgtcctctctcatctctcttgatttttcggcagagccacgatggccgcgatgtcgaatgggtcccgagctcttctcttctattttcctttgacgagacctggtgctcagctgcctttcatggaggataagaattacatgctcagatctaaaaatgaatcacggttctaatatattttatctatcctgttttgtaactagatgtagtttaatgtatttcttgattattctctttaattttggttttgaaaattgtttaatttttataaacttaaacttttttccagcttttgtttgaaatttgagttatgagtatctgattatgggaaacaaatagatcataaaatataaagtttccaatacattatgtctagtaactgttctttagtgttaaatcttgtgtggataagtatgacactacattacattgatgaagctttagtttgtaaactttaattagcttgaagtgaagataaaatcttcaattaaaaacatggagagtttgtaatttgttatatacatgtattctctcctaattgattgttcctaaaatgctataacatttttcttcaatcctacaacctatcttgatcagtgttttatcagtcaagtacttgattgatcaaatggcttggtctagaagtataagtgctagattatcagtcaagtgctactgaaagttcataacagagttagatcactttttcatttttcttgcttattttttgttagtgaagcttgcattaatctatgagtagaagtataatttctatgaaaatatttccaagaaggttgtttgtcctaattagaaaagccaagaaatgatatgtttccctttcaatattaatttgttttcactaattaaatcttattttaagctttaagtttctaacacaattttcattttaattggcacactctaacagtggatccatgaattgaggcaatatgctccaaccgtccctattgtgctagtgggaacataacttggtatatttcaaaatgttgaccacattggtgaactactggaaagctgttgtttgtttaggactttttggggatgctttcaaactaggttgctagtctagattatactttttc

SEQ ID NO: 243619 - DNA, 2459 bp, Cannabis indica
attagtacggaatatttctctcatcacagccgtccataacatagtcaaagtcaaaagcttcaacctgactaaccggttcctacccggttattcctatttctcattttcgaaactgtttttttttttggtcatttccacaaattttcgaattattgcagaaactcaggtggtcactgggtcagtactaagaccagttctttattcatttatttcctctttttatttatttttttttctccgatcccaatctcttaactgattttcttttctaaattttattattaaattaaattaattagtaattattgaaagaaaaaaaaaaagcccaaatcctaacttcaccaaaccctagagagagaaaatcgagagtgttggttgggttctagagagagaaagttcaagaaaaagccctaacaatttggctatggcgtcgtccaaggtattggcgtcgtcaaattcgagaaactcggatctctctcgaaaatcatcttctgcttcttcttcagctgttagaagacccaaattatcgatctctgatcaacaatctaaaatcaacggtggtgatcgcactgttaaatcctctttggactcgatgaccgtcgatggctaccttcgcactgaagcctcagctatcactgctgagtctactcttttagatgcacaaattactctgatcgacccgactccgacaacctccatttctgctgctgcggtggcagtggctcctggagatttgaattccggcagcattggctcatctagtgctcctaagactgttgatgaagtgtggcgggagatcgtgtctggagataggaaggagtgtaaagaggaggagcaggatatggtgatgacgcttgaagactttttacttgccaaaactgggatcgcttctgttgaggatgaggatgtgaagtctcttcctgctccgataacagagaggttgagtggtggactatttgctttcgattcgatcccgcctagtccgttgcaggcgttggacaatgttgagggttcgataattggttttggaaatggtgttgaggtgatcggtggaggtggtggtggaggaagagggaagagagggcggaacgttttggaaccgttggataaggctgcgcaacagagacagagacgaatgatcaagaatcgagagtcggctgcaaggtccagagaaaggaaacaggtgaatttgatttgattgaatctggcagaaatggaaatttttcttcttaatctgtttatgtggctgaatttttatgatgggttttgaattttgcaggcataccaggttgaattggaaacattagcagtcaaacttgaggaggagaacgatcggttgctcaaagagaaggtactgcacttttttggctttcagttctggaatctcttatgactttagttttgggtcaaaattgtattgatcatatgatagattattagtcaaattggggaaatttgatgtttgtgacagcattttgcctttctaatgggcatcaaataagattaagatttgtagaaacgttagtacttaatttaagtttttactaactgaacctttttcgggattatgatgcttaaagttcaaatttattaacgcaaaacccggctattatgaatttttgttatgcaatgttccttggcgtttaacgtattgaatatgtaagcaattgctgagccaccacataagttagacacacttatatctatttattttatctatatgtttgtatgaattatctgtgatttgcttagtacatatggatttccttacagttccatttttcagttgtgtatgtttgctctttacagcttacaaaatctcatatttagagtttacacctattatctattttgtgtgcattcccattacttactgtataattcttgatggtggaattaacacttgtattttcaacttgttttgggtattgactaaattctctagtatctgtatgagattagtgacagtagcgatatgggtagtaaaatctagattatttatttagtatctgggaatgggattactcaaagaagtattattgtgtataaatttttcagtgggtgtatattttcttttctttgatcacaaccttctctttatcagcctaaaccaaagaaattacatgtttgttctcacagaacttttccttttatgcaggctgagagaactaaggaaaggtttaagcaggtactgattacacttctgatccaacctcgtagtaactttatatccattgtagaagaaaaatttgttcgtaaatttcttgttcgatttaattatactgatcctcaaggaacaataaaacaaataagagtaagaacaatactgattcaaggaataacaaaaacaattaaggttgaaatttatgtctatgctttgaacaatttttcaaatgaaattagtggtgaagcatccagtttattacttttctattgttgaaatgggcaaacaattacaa

SEQ ID NO: 243620 - DNA, 2764 bp, Cannabis indica
tagtggctaccaaaatgtcccagatctatgatgacctacatttgttgcgaaattcataacaaaacttccaaatataaaataaaataagtaaacccaaaagaactctagtacgactggaaaacaatggcaaaatctgttagaaacaacgattatcaaaaagagtttaagcaaacatactgtaacaaaattcgtcctaacaacaagccaaccgcacataaaagcagactacctaaaacaaaaggcacacaagaagatataataccgccgtttttcatcaaaagacaatgcttaatcccaactctatctaactgtgacaatgtcatcaatcttcaaaatcatccgcacacactctgtagccagggttattgcgcttgtgctcacaagtagtggttgcaccacattctcttccaagatattcgtgatttgtcccttcctcacattgatcccagcattgatttccccctgtgcgtgcctattcctcaactcggtcacaattgcaattgggtttaatcctgcattctcagccagtgtgtaaggaataacctcaagtgcctcagcaaaggaccggacacagtacccttccatgccatacagaaccttagcccatgcacccaattgacgagacagctcaatctcgggtgcaccacctccagcaatcaagaacctcttgctcaccaaacaccttatcacacaaagagcatcgtgcaaactccgctctgcttcatcaagcaccagctggtttgacccgcgaacaagaacagtcgttgtcctccccatatccttaatacctgtgatcttcacaatcttcccatctcccagagaaagctcctcgacaagatcagcataaccgagcttctccgagcgaaaatgctcgatgttggcaatgggcaaacagttcaaggtcttggtaatgaactcaatctcgtcacgctctacatccttaactaccaaaatcttggctttcgccagataatgcagtgacaattcagtaacagcatccctcagaatactcttttgaatcaaaagaacattgcagccagtggccttgatcttcttaatcatacccagaatgtaatttctctcttcctttaaaattcgatccatctgggtgtaatccgaaacaacaatactctgttcaatatcggttttggggggagaaatctggaactggatcacagctatctttgcgttctccattcgagtaggtcctccagctgcgtggctcactttcttatcgaacactaaacccttgacgagctcagtatcgtcaactgttccgccaagcttcttgacaattttaatgtctctcaaatcgactaactcaggcgtcgatggatccacaaccgtgagaacagaatccacagcgaggggcgcgagcaaagtggagtactggctaacaactttgctgttcagcgaagtgctagcagacttgatcagcgaatcgcgatctgagagctcgacggggacagccatggcagtaagaacatcaacggctttaatagcggccttatgaagagagtccgagatgacagtagggtgaataccgttagacaaaagagtgaggcactgcttcagaagtgcaccagctatgacgacgacagtcgtggtgccgtctccagcggcggagtcctgggacttcgaaagctcaacaagcatcttagcggcgggctggaggacctccatcttgttgagaatggtggcaccatcgttagtgataataacctcgccattggcagtggagatcatcttatccatgcccttgggtccgagactggtccggacggcattggcgacggtgcgcgcggcaacgatgttggcttggcggatgtcctccttgcgcttgttgtcgacataggactcggtcttggaagaggatcgaggctgggaaactgctgctggtaccgccgccatggacgatgagatgcagaaccggaaaccctagggcttaggagataatgaaagagtgagaagggtaaaatagtaaacttaaaagaggtttcgatattagggaaaaaaaaaatgagggttagagagaagaggggtttcgacgtaggaaatggaggtgaaactgagccctagggagagagcgtaattacagaagagaaagcgggagagaaacaagggtcgagttcgagagtgttcaaaatattacgaaaatatcctctcttttttttctttgggtggttatatttacacccccacaaaattctaactacactccaaaattataattacttacttaacctttaacctttaataaaatgactaaaatagatatttttaatttctttatatattttatataagtacacccccaccactcaaatttcaatagaattatatatgtaaactgatcgtagaatcttttaaaaaactcctcgttaaaagaattcatacctttttaatatttttaaacctaaaagcatccatcaatggaaaaaaaagctttgatatttttaatatttatgttttttgattgagcatgggacttagtagcagttacagaaaagtaaattgccattaatacacatcaaaagaagaagataatcccattttgttttaaatatactttttggagaaacataagggtatataaatccctactccgaccttcataaattaatccaaatatcagttcaaaattttcagctaatcaaatcagtaaaatagcccatctatttcaaaaaattttacaacacaaactcaaataaatagccattattcccagcaagcatttgaattgaaatctatgtctaaaccattc

SEQ ID NO: 243621 - DNA, 1606 bp, Cannabis indica
gatggtgtttgtttgtgtttccgaacatttgttaattttggtgtagtgcttttcactttctacaatatcacgccacctgtcctcccattacttaccctcaccagtcaccactcactcacttaccacatgcctataaatatattttcccacacatggtttatatttttttaaaaataatcgtagataaatgataagtggtattttattgtacaaattattaaattaataatgcatatcacataatttaatttaataaataatatataaattattaattaataaaaacacgatatatcagtatagccttgaagattatatggtgctgataacaatgtatatatattgtacaatattattggaggactactaagatttattcgtattttttatttagtataattataactatattaatgttacaacaaacatctcattaagttttaacaacaatataagtgtagatgctaaaatatactttaaatatttttattacacgtgtatttatctttttatgtgtctgcgcaacaaaaaatcttgaatattaattctaatactttattcaaaattttactataataattattgagatgattgctgtaacttgtaactatattatacacacagttatatatatatatatataaaatcctaactaactctttcaaaggggattatagtacctaacacaaaaaaattgtataatattattcaatatcaaattcgatatattttaattcaataaaaaatattaatagaccatttacaaagtatgataaatagcactacactaattaaaaataaacttttctattttacattttaatttttcttttctgaaatggacattttaatttcttcacatattagcaatacatatcccaatcatccaattataacttcatgtgttgaacacagttactattattaatattgattaccgaattaattaaacattgccttatgttattatagtaaactcgtttcttttttatataaaaaaataaaatatacatataaaagtcaaaatatactatggttggcaatgcaattttcttcacatgcttaatttgaaattaaactctatatttaaattactagcaagtagcaagagcgtggggtacccatgacacacgcatgtatataaataaggtaataagatattaccgctaaatcctaaaacaaaaggattatataacgtgacaatcattaatattattgactgcaataatttccaaatttggaagtttataagattgtgagatgagatcgcctccacaccattctcatgcatttattttaattttttataactaaattatattcgaatccttgctttagattgacgatttttttcatgcaaaaggaaaaaagtagggagtagttgcgtatataatgagtaaacagtgttatctttttcacatgtactgaaaagacactgtttataactacatccacacctttcgtttaatacttgataagatattaagaattaataaaataatatacatacaaaactttacgataagctttgaagtggaggtggtttattcttggccaataaaaaaaaaaaagagagagagagagagagagagaggagagagagaga

SEQ ID NO: 243622 - DNA, 4410 bp, Cannabis indica
aacgtacaatgcggtgataggccgcccaatctaaaaggaaataaagatattgtggcataaatctaccacctaacgatgaaattgcctacacccgcatgtgtaggattagtgagaggagtccattcagactcacatgaatgttacaacactacgatatccagaattgaggatgttccacatttagagaagcccaatcttaatcctaaagtccttgattagacaaacacagcacaagccactgaagaacctagatggttttgcatggaagcattcagacatgtttagaataccacctgagatcatatgtcaccaactgaacattgatctcgatgtgcaaggattacgacaaaagtgttgtaaaatggaccctgcgaagtaccaatcgctgaaagaagttgactgcctactcgcatgcagtttcatcaaagaatcatttcacccaaattggttagctaatgttgtgttaatcccaaagcctaatggctcatggcgcacttacatcaattttacaaacttaaaataaagcttgtccaaaagatagatttccttttccaagcattgaccaacttgtcaatgcacccgcaggtcatgagctactcaacttcatgcacacgtactcggggtacaaccaaatcttgatgtacgagccaaaccaggagcatacctcctttattacagactgaggtttttactgttataaagtaatgccttttagtttgataaatgcaggtgcaacatatcagtgatttgttaacaagatgttcacaaatctgttagggagaactatggaggtgtatgtcaacaatatgctcatcaagtctcagcacgactgatcatgttggtcatctggactcaatgttcaaaatcttttgtctgtataagatgcggctcaacccactcaagtgtgtctttggtgtgggctctgggaagtttcttggcttaatggtaaaccaacgaggtattgaacactactaaaaaaccccaaattctcgtcagttttacactgtcgggtaaagaattcctgacagtccataaaattgtcgcctatatgcgcgtcgcaaatactaggtagaataggcaacggttaaatatatttaggaaaatagtatgggcctcaatttaaacccgtcaactatagtgaacactataggcgacggtttgaaatcgtggcctatagtataggctacggtttaaaaattgcgacctactatagtaaaactatctaaattcaatgtatgatgtaagcatacttgtatatatatatatatgcatatataacttctcaacgtaaaaagtctacccttattgtgccagcatttgagcatattattcatacaaaatgaaaaagatgatggggctttttggcacaaaaattgtggatttccatagaattagagaagctaaaacaagtagttaccaatacatagtgaccatttcattatactgacacgcacacgaatacttttatctaagattctacaattgaggacataattattaagcatattcctcttgtcgtctatatgtaataataaactaaaaaatataaaaatacccaaaagttaagtttcaaaatttaaacagagcaaaaattattccaaatcgttgaattcgccaaaccacataatcaaaccgaacaagttaacaaaactaagcgacattcaattaaacagggtatgaacattatcaacaaatccccatcaaaactaagcaccaaatagttcaaacaaaattattaccggtggagggcggcatagtggctttgggcagtggaggggcagcggaggtgcgttttcgtgagagagagacctgagtgagtgagatcgagggtttgagatgtttgaactatttggtgcttaatctgaatattttgatgagagagaggcgcgagggtttttatattattagccctattcccaacagttttgaacccttaggcaaagtatggaccacgatttaaaactgtggctaatactttgcttgacggttctaaaccgtcgggaatagtgcattatttttttctctgcagttataaactttcgcctaatctatacgagtgttaaaaaccatcgcttatagtattggcaatgattttcaatactcagataatttttttagtgatggtccccaaaaaaaagtatttttgggaccgttgcgaattctaccttttgtagtagtggaagccaaccctaaaaaaatcaagacattatggatatttggaataatttttgctctatttaaattttgacaagtattggccaagctcgatacatctggatgccttcttaaatggtaaaatgagctcatccaattcgatatttgatacaaatcgcgatccgcgaataaatgccgatcccttgctgactttattcttgaatttccttatgaacaggtagcaacaatctcagaagaatgacttgatcaaaatatctccaaaggtgcgggttggactctatatgttgatggagcctcaaatagtgaaggagtaggaggagggattatgttaatcattccaaacaaattcaaagttcatgcaactttaaagtttggatttaatgcttccaaactataatcaatttttaatttcctaaaaacaactatttttttttttaaacaaaaaaaaaaacaaaacaaaactaatctttgaaaaatcaatagcataacaagaatcaatactttgtcgtcattgtcaagatctcaattgtcattgcccagattcatttcacaaggtcttcgttgcctagatttgttcacaaagtcgtcgctgcctgtatccgtttgcaaggttgttgccatgccatatccctcctcaaggttgttgttgtctaaatccgctcgcaaggtcgtctccagcccacccagatctcgccctccctacttgtgacgtcgttgccatcgagccgctacccagatttccacatcacattaattctacatctcaaatctgaagaaaatcggtagaaagtaaagaaagaggcttgctaatatacatttataatggaagaaaaaaaaaacaaataaaaaaaggaagaaaaaatatacaaaagaagaaggtggacggtaagaataaagagatgaagtaaaaaaaagtagtctttttttttttggtttattttgatctaaataaaataaggaaatagaattataaagtattctcatacttctcaaatacataatgtcacttgttgtagaacagctccacccatggggaatgttttgcatggccctattgtaaaattagtatatatgtaatgaaaaaaaaacatagcacaaattttgtacatagttcaaaaattcatttgaataatcgatcacgttcacgtccagctaattaaacttaattagatcatcgcttggttatacctatttttattcataatgtattataacattaatctatagcttggttgcaaagagtctcaacgtaagtttgcttgatttggttattatttttctttgacattaattggtgtggaagatcaaatcaaagaccaggattattaaagataaaaaatatctcaaatacaattttttattaataattaaaaaagcattgactagaccaaaaatcattctatgaacttgacaaattaaggttattgaagtgtttagcaatactaggtcacgccttgtaatttgttagtgattttttaaaatttttattaggtgtgatctgatattaaattgcattaataacaagtacaatatgagaaatgttaaagggcaccagtggtgccaagcactctcctatgtgtcaatatcgctattggtctaactaagtatcgggtcccatataatttaatataatagcttttaggaaagctaatcacaacgagaattgtcgtaaaggtactaagcacagcaatgctctaacaatataacacctgacaaaagtgctaatacgccatgggtttagagaaatgtaaagagtactaatagcacctagtacattccaatgtataatatggtagaattaaatatattgggtctcatattttaatttaataattattaatatcgctaactagtccgatacatttcagtagagtgttaattaccactaataataccttataataatactcctatatttgttgataaaaagttggtagcgtgaatatcagttcattaacataacatatataataaatgggaagtaaattatattattgatcataacttgctgcatttggaataaaccatggctggctttcttcaatatatgtaaacgtctcaaattaaataataattaaaattgttacccaatatattagctatatataaagccaccattggtggctttcatttcatcatcaaaaccaactcaaagctagctaattaaagtagtaaaatttatattattaaattcgatgaatatgatcatgagaggtacttatcatattattgtta

SEQ ID NO: 243623 - DNA, 1464 bp, Cannabis indica
tagttatactaaatacatttcacttgtttttgaaaaatttagaattatttatgatatcgaaaattaaagtttaaatatttagttatacacgtgcaaaaataaacaagtacacatgcaactgaatctttgaatactctgtttaattacaacatcgtaaattatttgaaaacatttcaaaagtaaatgtagatcgtcacataaaatatatatataagaaaattagcaagtttttcaataatatttagttattcatatttgataggaagattaattattatttagattaagattaaatatttcttcaatttcattaagtggctaattcattaagttattggaaattgctaatctatatatatatggttcaacgtgaccttgctttgagagcattgttatagggtactaaagtgtctattaattattatgaagtaacgtcgtataattagttagcggttttttataatttttattattaaaataaaataagagattataatacccaatggcaacaaaagttaattagggtcataattaattttttgttctatcaacaacataaaattagggcaaaaggttttaccataccatagatgcaccctaagaaattactcaattcttcaaattatacttttgttaaaatatatattgacatatatattttttaataatgcagttcgtgagaaattcaatgccggaaaatttctttgttgagtacaatgacaaaggagaaactccagaaacaatattcacaaaagaccacaaaaatcttgtcaaaagtggaagtgaatggatgagtaaaaccgcagaatcttgttcccttgttgccgccctcatcgccaccgtggcattcgccacgtcaacatctttacccggcggaaccaatgaggagaatggaaaaccaatgttggcaaatcaacctgcatttcgagtgttcgccgtagcttcattaatagctctaagtttttcggtcacctccttagttatgttcctaaccatcctcacatctagattttcggagaataatttcgagaaaattctaccttggaaacttttgatgggactaacttctctttttttggcgatagtctcaatgattatcgccttttgtgccggtcacttcttcgttcttaacgatagtatcaaagtggccgcgttcccggtttatgctgtcaccgccatcccgatttctttctttgctgcagctcagtttccactctatgtggatttagtatttgccacatttgccagtccatttggtaatcctcaaaatattattgacccagaataatagtgttcacatatatataggtaatatatttacactaaatattgttatgtttttttttggaaacaattattgttatgtttttaattgggtttgattgaagaaatacagtgtgcttgcttgtttaattatggtattcaattgaacattacgtatatgtagaaacttaatatatatat

SEQ ID NO: 243624 - DNA, 7468 bp, Cannabis indica
tcaagattttctgttaaaagattgtattttatagtgtattaaactaatttcattgtgacatatcaattaatttgagcattttaaggggaaaaaactgtatatataggtggttaattttttattaaatgaaaaattagttgacgtgtcaaatttagattagtttaacacagtatgacacacaactttttaacaggagatcttgattcacatagcactagctttagataacaaaacttgattggctaaattgtgatccatttaattggcttttctaaaaacaaaagataaatcacatactaggatgttgcaccaaacttccttttagtacaccattaaaacaagttttttttagaaagtgagcattattttaataatacatcaatttaacataccaatagaaatgttcttaaagaataaaaagctaagattatgcaaaatcaagaaagaaaaacaaaagagcatctttcattcccattcaattgccagatcatatggtaaacataagtaatatatttgaaaataatcaaaattagtaatcaccctacagtacacaaattacgatcttttacacaaaaacacacaaaattctcaactggagtcaattgaaattagtatttgctatctcaaagaaaaaaaaaacacaatcaatcagttggttcttattttcccttctaaatcctaatgtaacacaataatgataataatagacgataccataaatagttgacaacccttttgaacacctaaataaattaacatttagcgcacccaatcccaagtgtggaggtagaattttctgttctatggaaaatcattgtgagtcttttaaacatgaatatccttcttagataatcaaagattggttcatttgaaactggaatggacttcacaaaccaaccaattggccaactgacagccgctattgcaatgcaacccaaccattgccaccaattgagatttgtggtgtcagcaaacttctttaaaaactccaccatcaccacttgaagtacaatagtaaacccaataattcccaagaaaagtttgttcctatgaacacctttgaacacattcttcttctccatactccttgaattgaactcgttaaagacttgacaaagcacaaaagtattgaatatcaaggtgtcatttacttccttagagacatttaagatggactcaccattgaattgcaacaacaaaagaatggcaatttggtagagagattgagccaacaggtttctccacatgatgtttgttattaaaggcgcttctacccaccggccttttcttcatgagctcgttgctcggcctttcagtggctagagccagagctccaagtgtgtccataatcaaattcacccacaagagttgaactgccgtgagaggaacttctccagcagaaactgctgctatgaagtttataacaagtgctgcaacattgacagttagctgaaactgaataaatttttgtatgttgttataaacacatcttccccaccttaagactgtgaccactgaagcgaagttgtcatctaagatgacaatgtctgagctctccttagccacttcagtaccttggatccccatagaaagtcctatatcggcttctttcaaagccggtgcatcatttgttccatctccagttactgcaaccacatggcctagctctttcaggcattgaaccatcaagagcttgtcaaatggggatgaccttgccattactcggatgttgttgattttcttcattctgtcttctggcgtgtagtttcgaaattcaatgccttccaccacttgtccctcgctagcttcatcaccactggctacctctagaattccacactctgcagctatagctttggccgtgaaaacgttatcccctgtgatcatcttaatagccacccctgcatttttgcaagcttccacagctttcttaacacccggtctacacgggtctttaagtccaactattccaagcaaggtcaaatcatcttctttgagccttctatgtgtcttctcttcatcgtcaacatactcaatctcatcttctgaaacttcacattgagcaaaggcaatgcatctgaggctgctagccgccattccttcaattattttctcaaatttttgtttcacttcttcatctaatggcttcttattaccattactttcatagtaactcgagcacattgctaaaaccatctccgcagctcctttccagtggacattgatctttagattgtcgtttgtgattttttttaacataaccccacttcgttttttatctgagttaaacgtttcaacatgtaatatctcataatcatgctttaacgtttcaatattcatacccaaattcaaaacagcccaagataatatagctttctcagttgggctacctgaaaactcaagttgaacattgctagattgatcataatgatcaggtttgtaaacagtacccgtggtgttcaaaccaacaccttgatagaatagttcacaaacacttgttgaaattgaatttgaataatctttttcattgatttgttcttgaccaagccaaaatttagtaactttcatttggtttaacgttaaagtaccggttttatcagtacaaataatagttgctgatcccatagtttcacaagctgatagctttctaaccatagcttgatcagccatcattctcttcatagagtaagccagagttaaagtcacggctagtggcaatccttctgggattgccaccaccacaattgtgaccgcggctgccactatacgaacaaccgcgtttaaaacatcatccacatctgtcctaccactgatgtactctttttttccaaattcatctttagtattacccgtaaaataacgaactaacatgactacaagaactaaaaaggcaactgtaagtcctacctttccaattgaagaggtcagtttgtcgagtctagcttgtagtggtgtcctctcgtttgtatctcgggttatggagctcatcatctccccccaagccgtgttcatcccaacagaggtcaccagcatggtcccatagccatcagccactttggaaccagagaacaagaaaggatgcttcactgaatcgatctcaatgtgatcgctttcgcctgtcatgcttgactcatcaactagcaatgagtgtccatttaagaacaatccatcagctggaatttgatctcctatgttaagcaaaacaacatctccaaccacaatatggaagatagaaatttcttgtcgcctgccacctcttaccacatcaatcttgatgttgtcgcttattttagaaagcttatcaaattgagtctcttgtctatagttgctaagagctgagccaacaataacaagcagcacagctataaagatacttccaccttcataccaaccttcctttccaccatgttctttaattccaaagcctaaagccagagcagcacagaccataagaatcaaaatagtggtgtccttcaaagcatccaccacaaagtaaaacaaccctttgggaggaggcttgtgataagtattagaaccaaagactcgacgtcgtttgtcaatgtcttcctcgttttcttggattccattctcagggtgagtcccaagagtggtggcaatagcttcagcccctccatgtatgcgtagagatgtcaagtctttttccttgacaatctccatgatgagtttatgatcaaaggctttattgacttcatgattttttgtaagtagaagctttagtagtagtagaggtgttgtttggagttttggaaggtgagagcaaggtctcggaatagcttcttatttctgacacaacaacatgtttgggaagcgatagcatgatccggacaaaataaatagctttgtaagccatgcgccatcgtttttgggctttagtgaattcatacagcaatttcccacaattaataggtgatctgtttatactcgacatggtttattaattatacaaaggtaagagctgataccaagaaagaagttcattcatagtatgcaaagcccagtccttatatagatacgaaaaagaaaaaggaaaatctaactgtgattggtcagcagccattttgtgatgcttacacacacagaatttcgtcgaaaagtcatcctttgggaaacaacaaagcagtttcgtgcctcaatatggcggtttatgtgcataatacaattaatcttattttttgaaaaataaataaataaataaaaatattgtgcttctccttgctaaattcaatgtaaatggtaaaactaaaagttcattctagctcaaatctgggtgagagccagagagggttttcttgtataagatgacatattttctgatttctttaatggttgacgaatttattacttgaaaatgaaatatcgtgctagggaagttatacatgagatgatcacttttactttctaattctatggccttgagttgttaaattttctattgattatttctattcaaactttctattttatccacgagcttcaaaaaggaagtttagctaataataacgattacaatattattgaagtttagctaatcaatcaggtactataacgaaaaaaaaaaaaaaaaatcaggtactataacgataaccaacaaaacattgttataaagtttattctaaagtctaatagtcatcgcattacataaaaagataagcttttggtagttgaaattatagttcatcttaataaaaagaatagttgaagtatcaccaactataataataattttaataattattgaatgctaatccaatccaatttttgttttacaattctaatttggatcttattgactctcacagtcacatatcacatgccgctatattgttaataatattttttataggccaaaagtccatttaatttaagtgttttatttatttggcacatcacatcattgtacggctttttctaagtcttttttttaacattcatcatacatactttaaaaacattgtctaaaacacgtctaaaacacgtacttaaaaaaaatatttattagttgtacatgcacttaaagtgaatggtaaattaatttagattgaagtttatacatcttttcttttgatatgcattaactcttggttgttgtttataagagtttaatttcaataaaaaaaaatacttaggaaaagccgtatatgtgatgtgccaaatatttaaaacatttaactcttgtactggtcttaatgatgttttatcaactttttttagagcctctcgtgaggtaataaattttgtaaaatactaaattttgtttttccctaatacttctcaagacattaggaacatttttttagcacttttcgtattgaagataggccttttatagtaaatacatagggtttccttagtgtttgtttagatctaagcatcactcatttactttttttaaggataaagttacctttgtgcttcaatcttggcgttccaaatggttctttaaggcgagaaaagaaatcatccttaaaattgtggttcagaccattctagcatgtgttatggcttgctttagattgccaaacaaactctgtaaggaaattgaggttgcgatggctaagttttggtgggggtcctctaaagactctaaaaaaattcattggaaaagttaaaaagttgtttgccaatctaaatttgtggggggtttaggttttgggtcacttgtccatttcaaccaagctatgcttgctaagcaagcttggagaattttcaaataccctaactctttgcttagccttactcttaaagccagatattttcctaactcgtctactctagaggttgttctagtcacaatccctcttttttttttttggaaaagtatcctttggggtagggattttttggcctcgggtatgatctggaaaattagagatggggagaatgttaaaactactgaagatcattggattccaaacaacaagtttaaatgcttttgtgatggttgcacaccaacttcgaataaacttttatatttcattttaatgcttttggatcctgggatttgaataagcttaaggattactttgatgattgttatgattgatgacattttagatgttccagttattgggtaaggatgagctagtttgggaaagggagaattttggttttttttagtgttaaatctgcctattatctagctctctttggacaggatatcccttcgtcctcatcgtttcaagcttctaaaaaattctggagtaagatctagaactctagagtccctccttaggtgaaacattttgtttggaggattatctctagttctattcctatggctactttgctttctcaaaggcatattatttcctctcctttgtgccctttatgcaatcttgctcctaaaacgttacatatgctttgctagattgcgctagatccaagaaagcttggaagtcctcgggttttgatatttattataatatttataaacatttagatattatggattttatatataacatgtttgctacactgtaaaaagaatcagttgatctattgttatgtttcttgtgggctttatgaaatcaacagaacaatgtcttttatcagcataatgttatttctcctaatgaaatttttgattggtgtaatagttttctcctcaaatatctggatgcacaacacgtccgatcttatcataacaaaacaggcatcgagtctatttgtaaggttatagtagacaaacttataaattataattggaataacagcactcttgatgatttgttgatttgtgttaagaactcattatccttcagccatgggcttacaattgattatgttggtcgagagcataatgtcattgctcacaacttaactaaattaggtctagggttagatagtgtgttggtttagaatggttctttaccttccttttgaacctgttagttttgtatctcttgttctatctaatgaagcttcaagtttgtaaaagaaaaatatctaaaacactttatatttgttaatacaaatttttatttttctctaataaaaacttcatattctgtaaatataattttatattgtcaaagagtgcaatttcatatttatagtagagtaataatataattaattatgaattagattattctattgatgagatcgataataatcaagtgtttattggagctttgaaatataagtccatggtcccaagtcacttctatacaacattgtacaaggaaatattttattttatgagtatatttgagtgagaattaatttctattagaaataatttttaagggtaaaatagtcatttataaaaattatattttgaataattatgacaattataaattgtataattaaatattatttaacattaatttttatttgataaaattatattaactagttaaatgtaatattattcttaaatagtattaaagagagaaaatgtattatattagtgaaaatagtattttaatccttgtgaaataag

SEQ ID NO: 243625 - DNA, 1394 bp, Cannabis indica
aaaatgacagaacaacttcgtgacttaaagataaggtttaacaacataataagctgtgatttttaagatctatgttagggagaggattttaattcagacttttcaggaatcggaagccatggagatattaaataaccaattcatgtttctgtgaaactgaattaaaaattataccaattataaaaataactgaaaatgacaacaaacctattggaattatgctttaatcattaaataataagtatgacagatatgtatatggatacattgcaaccttgaaggtatttcacaaatttaaaatgagacatccgcacaatcagctgtaccaactaactttatttaacttccaatctttgcttaatatctatcatcaatattaagctcatgggaatacagagttgtgcatgtgatttccctagtcaaaaaacaaaaacctacgaagaagacttttacagttcatgcatgcataattaatgcctataataaactttcattagcatttaactctacattaaactttgattggcatcaaagatatcaactttttaagatacccactcaattcatcattcttaacaaagccaatgcaacgtctacaaacagcctatccaaacaaaatcccatgtagtacacagaattgtaccataccgaactgcgtcgaatgatgtctgataaggacacattacaacttgctaaaagacagtagtattcaactgggaatggtaaattgtgcagctatatgtgaatttctattttgacaaaatgttttgaaatcacttcataatgaaaaagaagtggagggactatttccaaccaacaagctaattgtctagccttctaaccaacaagctaattgtctagtcaatgtatacaaagtcaaaatatgaatcgctagaagacaacgcgaccgatattagcgaaacggaaaatataaaacttagaatacgttttgaaataacataacaagaagctaacctaataattaatttccacatcttatttctctctttttctctccacactcaaattttttccttataaacaatgtcccattaacaatgtgaaatgtggcattacagaacaaatgagttttatttatattttttttaaaaatcctttctttatttctttcaaatttattgttgcacaagcacgaccaacatctcatcattgctcgcgcaccttcacaagcactccttccttttcttcctattatacccaaatagatgtatcttagctatgactgcaagccctggttttaaatttctaggaaaaaaaattaaaaattcaccaatacacctaaaagcttcttaagtttacccattcatggagggcctttgtatccgagttcctcagaaatattgtaaccatagttttcagtagatcatcacaga

SEQ ID NO: 243626 - DNA, 1254 bp, Cannabis indica
atggaattcttaggttggtacaatgataattaaaataaatgcttctgctacatacttaatttagtacggtaaaactaacataagcatcaaggcaaaattaatagatcaattcattggaataaaaagaaatgaattttgttttataaatagaatttgacttttaaattatgaaatttatttgacttgtataatttagaatgaatatatagtatactattaagtaataaacaaatagttatttggcaatttataatagttttgcaagatatttgtttaatgtttttgagtttttatttgtaatcattccatcttactaaagtagttctctctcttaatgataagagttggtagttagaattaatataagtctttggacttgcttttggcttaggcctaatgaggaggttcattcataaaaaagaaagtaatatacaaatagttattttagaaaatataattatttaatatatgattgcatgtagtaataagggaataatcattggattcttagaataattaatatatatactttatcatgaataaaagttaatgctaaaactgaaattatcctaaaataattattcacgtgatttagtcaaaataaacaaaagaatttaaggtaaagaaaaaaacttatgaaatgaaaatcataataactccaatgattagtaattaatatttgctattctatttttacactcaaatgcaataactagaaatgggcatttgatttaatttaatatttctatatttttccgaatcaatttagttagtaattgaattttaaaaatcattataatctcctacattattcaatattagattggttcaatttaataattgaattttaacttataaaaataaatttttaatattaacttaaaaatatataaaaaataaagtatgaaaactaaatattacaaatccttttaattaagtattacataaaattattctttaaaaatttaatacaactaaaatcttaaagcactaatacaataaaaacgataagtatcgacatcataacctctacaaatatgagagaccaacatcaataccaattatatattaaagtactgtagaatctctatttaagaatactctattcaagaataacctctaatttattatataaaaaaaatcagtctcgatttaggccaattataaatatgaataatctctaaattataattagttatacatttttttagtcccgcattaccaaagtatacctctatataagaataattacat

SEQ ID NO: 243627 - DNA, 2108 bp, Cannabis indica
atttaaaaatagtgacaatagttgtaatggtggttgtgtggtggtggtggtaatagtggctgtgtggtggtgatgatgataatgagatgaataacagagaaaagaaaaagaaggaaaaaagcgaatggggaggcggttggaatggataagaagataaggttttttttgttctcttaagaagaaaatataattggttttttatttaaattttttaaatattttaaattattttttaatagttaatattgtgtggaccaataaaaaatttgacacatgtacacaagtgtacacctaagcaggctactgtagcacttaattgaagttttttaacaaaagtgtaaaaaataaccagaatgggaatttagtaggttttgccatcaaaattttaatttttgtggttaagtatttaaaaatttaaggtttaagttgtttagccgccaatatctctaataataatatctacccattatgactttgtaatgtttgctttttaatgaagtttctaattagaaattaaaaacaaagaacccaattaaatttcacttgaccaatgttcccatataaataatagtaagaaaacatatatacatgcatgcatatctcgtgataggaaactaatgatcataaaatagaatattcacaccaaagtataaaggaaaaaggaaaaacaaatttgttacatttatagtaaacatgtatatatataataaattccttcttattttttatacacattatgttaacaattaactaattactttaatgacagtgcttaattaattacttacagtttgaaagtattgtgtgtggtccaaaatgtagagtgggattcatatgagcagtatgaaggagacaatatagtgtacatagcaagtgtgcatttatatcaacttttcaatatattgcatttttattaaattagacccaacagaaagtgagagaaaaggaatcttattttgattttaagatcatgcagttgtcaaacaatacataatattcatataaatatttgatgataaccgttactgtttaaataaaacttaattatatataatagtgattgatattatattatataaaatatatggttagcagatgtgtagttaattaaaccaagtgattaatgatataggtctatttatatcttatcttatctcttatatataataagagtctaaatcacctctgcttgtttgtccaatatatatattcttagattttaagattttagaaatgtatgtaattgttagagatatattaattgattttgggcaacgtggccaaccttgtggtgatcccttagagaattgtcatggaagacagctttgaagccaacattttccttttccaactgaagtttataattaatgttgaatggtaaaacatcttattatgattaattaattgattagattttgaaaaatgacatcttgtttaagataatcaattttggtacgatactactagggtatttatgtatatattatatacataaagagtacaccagcacactatttttatactatattgtgtcattattaataattatgtaatactatattatgcggaaactcattcttaatggggtagaaattttctgtctagacgaaaatgagaattattttttatttccaaatgttaaacggggcgaagacgggaatgacactctccatctcgacggtcggggactcgtttatattttatttatatttctaataatatttataatttatgttgatattttttagtatattagtatcctttctataaattttaaattctgttttgaataataattaatatattgaaaaaaaaattaatgtgtaatatatttttaagtagtttaacaatttttatatatttaaattttattttttattaaaggatttttttgccccgtccttgccccattaaatgattcctcacctcatctccgagaataagcggagatgtagaattaaaattcttaacgaggatagagacgggaaacactccccgttaatttcctgccccgtgtacatccctacctaagaccttcacctttaaatatatatgattataaataattacatattataatgtacaaaaaaaatatataatttaaaagt

SEQ ID NO: 243628 - DNA, 3630 bp, Cannabis indica
aaaatatggcataaaaaacccatataaatgtaaaaaaaaaaaaaacccataacccaaccttatagtcttatttatttatgccataaaaaaataaactatgtattcaattcccatatttatcaaaatttcttatttttattagaaaaaaaagtagttagttagaagacatgagaagcgacacgtgggacagaacccttaaatgaaggagccattcgtcccttttctccctccaaaaaaaccagacacgtgaccataaacagacgagagcgatagccagttaccgagttcgctcacctcaactcgctacaactcggaaccttacaaattacaatatacaacttatagaggaccaacaatcttcgtcaaaccctatacaatcgctcttatggcggatcacaccttcaatctcgagcctcgaaggtacataacaagcataaataattttgtaagagatgatacatgtacatacattacatattcattgtaacaatttaattttatttctagtttacaaaaaaaaatggaaatatgggtttgcagtttgttgggtttctccacgtgacccctaaattcttgcatggccttttgacaaattctagtcctagattgttatcgtcattccacattattgggtcaattgtttgctgtttttggctctctctatagcaagacattgttcatttcaaaccaggatcttgtttgtcaattgggttttcaatttgattttgttttgtgttgatgattagtgtgagtgatgtaaaatgtggtacaagagtaaaggatttagacttctgagtctggtttcatgagagtgagagagcaatgggaagtggagctgtaaatatttttgagctatgttgttgtccttgttgagtaaccgctcgttggaagttgattccaggtttgtgaaaaaaagaaatagagagctttctttgcgtttgataattttcccttatttttgggatcacaggaaacatttatattttgcttaattgcactttcatgaattttaattcgaatttctcttatgagatcttcgagttcagtgagatttgtcatcatttctttgtcttttttagattcttataagtttgataccatcagggattcttatggatttgccttgagacctcagcacacacaaagatacagagagtatgctaatatttacaaggtatccgctatttgaattgttaatagtgggactctgtccggtgtaattgatatgatctcaactcttcataaatgaatgttttataggaatatttttattttcagataagtgagatggtttgtgacaatatgataaataattattccatcaattggagcttattattttgataagattatatgtttgtgcttgaaatattgacaactaaaagaaacagaacataaaatgaggatataattacattaggttggtctggcttaacactgtctttgtgatattaggaggaggaaggggaaagatcgaatagatggaaggacttccttgaacagctggcaagccattctcaaccttgctcttcagataaagaacataacgaggcatcacaggcaaactcgactgagacaaaagtagaaataatctcagagaggcttgggaaaggagacgatgcaagtgacagaaaattgattactaatgatgatacttcatcagaaggtgacctcaaaagtgaggtgcaactttcaaatgaaactaaaccaaggaaggttcacacatgggctcaaattagatcatcccttggtgttatagaaaatattatgggctctcgtgttaagaagaagaagaagaaggatataaaagatgaactaataattgttgcaggagaaaatgaacttcaatttatcgacaggacaggttctttgaaaaattcagacaaaattaaggaagacgtctctgtaaatgatgtcttgaatgacactgtgaatgctaccattgtggaggttgaagagatctatgagaaagcagatactggggaagaagggattagtgttaatgggatccctcctggtgacagttctttcagtgaggaatttgttacagctgatggtgattcagagaaacctgtgaatgatggagctacggccagtgttgactgtgatagggcagaagatgagattggaacagaaaaaattgctgagggctggaatctttttgatcctatatttccctggagagaagaactggagtgcctcgttcaaggaggagtgcctaaggatctcagaggagaggtttagcttacacttttagtttcaaataataatttttttttttcgtaagattctaaacaaagtgctctatttgatataatcttaccatcacaggtatggcaagcttttgtaggtgtgaaggcccgtcgggtggagagatactacgatgatttacttgctcaagaaagtaacactgataaaggcaaggacagtgatgccttatctgctgcagccagcaaatggaaaaggcagattgagaaggtcatttgatgcatgcgccttggactttgtcattttgatttgtaggtgctgcttcttttgagctacattgtaatttggctctcttcctgtgctgaatttgcttccagtgcaggacataccacgcacatttccaggtcatcctgctttggatgagaatggtagaaactcgttgaggcgtttgctcttagcttatgctcgacataatccatctgttggatactgccaggtaacgaggacaagtttagtaaataatttgtcaaatggccttgatgaagctatcacattaacttctactcaaatcttgaagttacaattaactttcaccgagttgaaaaactctatttatatgattgatgtaatacataacgctctctctctctgcgtgtggataattttttatgttgatgatgctgccatacatgcaggcgatgaatttctttgcagggatattactactcttgatgcctgaggaaaatgccttctggtaggtttcaaaggttattcttctttatatataatatgtagggttatagcaatttttgaaaaaaaaaaagccttaaaatcgttttgcaagatttgtagtggtgcataatttgtctgttgattgtggtcttcttttcttgttgttgttgttgttttttttcgtttttaagggcagaaacttgcatttgtgaaacatatcatccttggaaataatcattactacgtgcttttaaacacactcagtcagagatagaaatgtccaaacaacattaacatgtttagctttatggatatctttttccaatatgaatatttctcaggacttttgtgggtataatggatgactactttgagggctactataccgaggaaatgatagaatctcaggtttgatattaacattcagagttcctgaccaagtatgctgaatttctatatgatttagtttatttttcaagacataaagcaaagccaatggatagtatgcttcaagagattctaagcatataatatatgttgttttccttttatgcgcaggtggaccagcttgtctttgaggagttgatgcgggaaagatttccaaaattgggtgtgtaattctaattatcacatatatattcctttcttctttttctaacacgaaaaaatgtgggaaatttattcgttttt

SEQ ID NO: 243629 - DNA, 3599 bp, Cannabis indica
ttattttattaatataataagattatttaattatttgtttctttataaagtaattatttagttattgtaaagtttatttttttaaaaaaaattgtcatggtttatgtcccactaataatagtaggacaatgtagactctctcatataggatgacatttaagattcggttagattatttttgtgtcaaaacttcattatgtttgaatttttgctattccattaagaatgaccattatgtcactatttaccttaaaaaaaattatagttcatagagtttctgttattaataagagctcaaaatttttgtaggacataaatttctggggttcagtgtattgtacccaatttgcaattccacatctaagaaaaaccaaaggaaagatagtggttaattcttcatctgcttcatggttttcaacaccaagaatgagcatctacaatgtaagtaataaattaattaattacctcataaatctattatgcttgatatcccaaactcatgaaacccaaaaaacatatatcattaattttcttggtttagattatacatactagaagtgtaatatttcaggctagtaaggcagcccaactatccttttttgagacattaaaagctgaatttggttctgatattggagtaacaattgtaacacctgggttgattgagtcagaaatgacaggagaccaattttggtcaaaggtaaaacaaaaactaattagcttcaaaaaatctagtgattattaagtctaattcaaaaataattattgtatttttcagtctagaattaaaggtgtcccagttgagtcaggtgaaaggtgtgccaaggctattgtggaaagtgcttgtagaggagatatgtacttgattgagccatcttggtgtagagttggatattggttcaaattcttttttcctcaattagttgagaaatgcttccacttgaccttaattcatagaccatggaaacgtgaatgaaagatcattagctgggatttgatcaaagcctctaccatttaaaatctctgaatttatggcctatgaggattaacttaatgggctaaatgaaatttagaatataattgctttggtatatgttatgattttgttaagggtatatggttttcgttttataataattcaagaatgtagatttgtatcatgtaaaatctggtatgtttgttatgttttttgttggcaatagtatgtttttattttatgatactacttatatatacaaataacataattttttttcacattattccatcctatatgatgttttatattaattgtcttttgtcacatcttattatacgataaattatttttcaccgagtataatcttgcattcgattgacatgaggacccatttcccaatatgaaaagaatacagtgtcaagaaggctaaccccaacagggtatcctcgcatgatagacatgtaaaaaggtgtgactgagacaagatctagtcgcactgtgtcgtgcgcaatgaaaaagggataaaagcgagacatagagataaaatagagataagttagcacagtcaaagtatatattgattatatgtgatgatcaagtatttctccacacactcctccaaatgactaaatgtgcgataacacgaccaaaactcacgggttctatgttgttgtttattgagattttcggaaatcgatttataatatgtgaaagctaaagaaattaatcaaagataaagaaaataataacaataatttttacatggttagggcgttaatgagccttattctacaagccaatattattgttttaaagctagaaaagccttcaggtttacaagaatatctgaactctatattttgtctgagcaattgaggaatgagttttcaacccctttgcatgaagggttcttcgtatattatagtgtttagggtttttattcgataacattttttctactgatggggtattataagtaacatattgacttgggcttatttgattaagcctagtccatgaggcgcttggtgtatagtgatgtggatgccacatcatggtacagttgtcaaaaactgtatcttcatagagaattaaagaaatattaaatgcttgatttctaattactctttccatatttaagaatgtatgatctttgggcgagatccttgggagttaatacttgatatctctgactaatgtgtgggtccaagttagcaatcttttgtaggatttgtttgggccaagccaagttttcttcccttagaaatttgtgctttgacatatgtcgtgcaattgtgattggaaaatctactgaagttaacttccctcgaggctacacagacctcctagagggaagggtgtctttagcatctggacaaaatttgtacgtctaggatgaagggagaaagcgcttctaacctttcttcaattcctaaatatgacaaccatagactttcgtttcctatctggtcagaataaaaatggtgttgaaaattagatttcgaagaatcactagataatttttcctcgctagtcactggaaaaatggacgaactactctaggtcgaggacaaactatctacatgaagagttagggtacattcagtcaaaagatggagtaggttgtcgtcattttggtgttcacctcctcagaagtcggttgggttcacttaacaaaaatggaaggatgaagaggtgaatcgccgaactacattaaaatgggtttttcataaaaacacgttcaatatgccgaccagatgaaaaataaagatccaataaaaagatccttccttttcttaaagattactaagaacaaaaattcttgaagttttccaaccaacctagagatcatgtaaactaattaccaatatggaaaagctagattaaaagaaatatattgaacacacatataaaagaaatatgattaaatatattgattaaacacacataggcaataatgttataatatttgagcaactcataaattaatgcatggaatgttatttatactcttataacatattattttttaccagtgttgacttaattatatattattattctataaaacttaattatatattgttgttgaatgggttgattaatttggtaagataagagatgcaagagtagataatgtgaggaaagatcatgtttaggggaaagaggagccaccatagccacatgggctctgtcaagttcaagtctcctcggcacacacttcttacaatggccttcccacattcttcagctgactcttctggaataactgatcttaactttatctcctgtaattgatgatatatatcattatttatatattatcaaccaaccacactaattaattgcaattaattacattaataaatcatatcattaccagatcacgtgacaatttggtcccaattagcccaggtgtgacaattgttatgccaattgttgaaccaagttcaattctaagtgtctcgcaaaagcttatcaatgctgacttgcttgcctatatataatttacaaaactaaaaataatatatataattacatcacaattaatatctatattaaccatcttttaacctaaagaaactctaaatataccatatttgatccgaatattgttatt

SEQ ID NO: 243630 - DNA, 2512 bp, Cannabis indica
aaggattaggcaaatcttgcaaaatagcgagatttgcacacgggggattaaccccaatccacatagcactagctttgttcatcaaagcgtaattggctaatacatgcgctaccttattagcttccctatatacaaacaacagacccttaacattagcataggacaacaaatgtctaatatgatcaagaaccccatcaatgtctctgcagctttcctccttgttttggattaattggatagcttcaagacaatccgattcaagatagaattgttgtacacccctctgtataccagtctgcaatccaccatggatagccataagctccgcatgaagaggctgatactcacggtgcagaatagtagaagatgcataagaaacacacccactactgtccctaatcacgcaactaacaccagaccagcccctacccctcttaacaccagcatcaacatttattttccacacaccagcagccggcagtacccactgtgctccctgcctcttccccggattgttacctgtaagaccatgaccccgatactcttccatgtattggacacaccactcaaacacctctgttgctttcggctgaatacccccatgcttggtattatttctaatgtaccatagctgccatgataccaccagaaacaattcaaaagtttccttctcccaagccttagaaattctcatcaaaaaggcaagaacatcttcacttccctgccttttaatttgatgttgtatgccaaatctcttccaaacatccttgttagcatggcatctccacaaagcatggaatatgttttcccttccaccattagagcatctggaacaccgcggatcaacatccatacctctagaggcaagagccgcatgagttggaagccaagaattcgccattttccacacaaagtgtttaactttgggagggagtttaagcttccacatacctctccaccaagccatcatgtctttttcattcgattgggtcacctctttcctgagttccatggccatacgatacccactcttgactgaatactccccattctttgtgtaatgccacatgattttatcttctatgtcccaccccgtactaggcaacttaagaatgatatcagcatcctcctcattgaacacagcccgcacaaactcttcatcccagcatccattcggcctcttcaaatcgacaacatataacccccccagaatacttggcttgtcatatatcttgaaatgtcgtggtctcggtagccaaggatcctccattatacgaacacaattcccattaccaatacgccatcgatatccacccaatatgactttcttcccccaatataaactcctccaaacaaatgaggcatgtgtaccacatttcgcatgcaatacatccccattcggataatagctagccttgagaacacggctacatagagatgatggataacggatacatcgccaaatctgtttagcaagaagcgcttggttaaatagctccagatcgcggaatcccaatcccccactttccttcggtttaaaaaacaacctccaattgcaacaaaggattttccgatctttgtccgaggagccccaccaaaatctagcagccatgcggtgaatattattgatagtgctcttagtcaatcgaaaacagctcatagtatatgtaggaatggcttgcacaatagccttgatgagcacttctttccctgccatggaaaacatcgagcccttccaccctcgcaacttattccacactctattcttgataacatcaaagagttgttttttatttctgcccacaaaggagggaagacccaagtatttaccatgattgtccacaattttcatccccaagagctctgcaatatccgtcttaagatccgcttggacagtcctcccaaagcacacttcggacttagaaaaattaaccatttgacccgatgctttcgaatacttttccaggattaatttgaaatagctacacgcctctctagttgcatcaaaaaagaccaggctgtcatccgcaaagaagagatgagaaaccattaatccattcctcccaaacttaattccttggagcattccattagcctcagctgcttgaattaatcccgaaaaagcttcagcacaaaagagaaatagaaaaggagatagtggatccccctgtctaagacccctttgtggtgacacagaccccttgatctccccattaatgagaaatgaaaactgaacagacgatacacaccgcatgactttctccacccattccaaccgataccctaaccttagcatcactgcttttaaaaagcgccactcaaccctatcataagctttcgccatatccaatttaagagccaacttttttccattctgaaacatattcttccgcatgcaatgaaggctctcatacccaattattgcattatcatgaattaaacgccctttaacaaaggcactttgagaatccgatataacccctcccaacgaactccgcatcctattagccat

SEQ ID NO: 243631 - DNA, 4509 bp, Cannabis indica
ctctctctctctctctctcctgatatcactctctctttcacacaacctgtaaatgtaaaagaatttcagagccaattgctcggagccaaattttgaaggcttggccaggcgcttggggaggattgaaaaggatgtattaaggaagggaagaaaggacttggcgagggagtgagcaagggactgttcgtccttggaggcggtggctttcttggttttttaggttttttgagatctgagcaagagcgaagatggcaggagaagagaaaagagattctgacggagacgaagcttcgagcttggaaatgagagaggtatccatggcagataggaagagagatgagtgagagagagagagaggaaaaaggtgatggagatggaattagggttaggctatagaccccacagtatttaagaagaagaagaagaagaagaaaagaaaatagaagaagagaaaaagaaaaatatatatatttttattattttatttataaatttataatttttttaataatatttaaataattaattttatgtggaccattcaaaatttgtcattatatacttaagctgtctagcatgacacttaactgagatttttgaacggaagggtaaagacatagcaaaagtgaggtttatgtaattttacagtcaaaaaatgagtttatgtgattaagtgtcacaataaaatttatgtgattttattgctaatatttaaaaaataaataaataaagtattgaaattacaaaaagaaaaaaatgttatgataaacagaggttacaatgtgataaaaaataattaattagtgagttgataaggacatttgatagaagaaaattgaaattgtgattgaaaggaggaaggaaggaaggtgtgattttgttttaatttgggtcatctcatctccaatgccgtgtctcgccctgaaactgagcatggctgtacccagttatgcccacaaacgggtatgggtccggaccatcactcccactcccaccaactttttaacaactactatttcatcttcttctctctcaacaacacaaacagttttcaagctctcttcttcttcttcttcttcactctccttatatacacaaaatagagataagcatagagataaagagagagtggtagtaacggctactatttataggaaccaatggaggatatccccttcttatccctgcgcaccctcagcgcacgatagcaaatcatcgccgcaatccttagggttctctttcaaccacaaatgcttttccctctctcctcctccttcttcctcttcttctttgtctagctctggttccacttcttcttcttcttccgaggaccaaattaaacaagggttttctgcgtcgtcttcttttgagtccgggtctgagggtctttattccgaaatgggttctgaggacaaggaccaccaccgtaaagattggtcgtccgccggggaatccaacgggaaacaatcgcaacaacaccagcgactctccaataagtttctcaccctgcccactattctaaccctaggtcgagtcgctgcagttccacttctcattagcagtatgttatttattcccattcccttgctggatcgttgttttgtttgtcgggaaattggggtgatctgattggatagatctgactgagatgttttctgagatgggtgaattgttgcttatgcttctttgtatcttagctgaaccagattgttttcatgtgggggctaaaatggactgcttttttctgatcaatgaataattataccggcgaattggttcaaattctgggttttgttgatgataattttgtttgtcaatttagatctaaaatataatcgcccgattacatcattttgttgatggttttgtagtgggaactttgccatacttattctgattgtacattaaatgttgctttttcattcttcgagattttgattttctcttggaaaatcaattgtattacatttgggctgcatctcagtttggaattctcgtttatattctatgctctttgtttattgaccagtagctcaaattttgttgtttattatgcaaatcttctacgttggagggacgtaccaaagtagtttgaagctttggctgacagattatgttctgtatttatagccacttcatctctatcctgtaaacccttctataacctgcatgaagttgggttggttccctagtttttggcaaaatgccataccgtttccaacctaccttggtgcattaatggaaagtaaaatgaatgcaatgtgcagtcaattatgaaaagggttcaccaaagaactaagagctcatgacaacttcattgtttatcatgcttgtcctagcttattaaattgattattgcagcataatcttgctttcttttaactaattcattcattcactttttgtaccatgttagctttctacgtggatagttggtggggaacaactgccacgacaagtatcttcattgctgcagcaattactgattggcttgatgggtatattgctaggaaggtacggtagcgttttttttttaaaataattcaagtggtgcagaattttccaaatcttatcgagtgctctaaagttttcatctttttttttgccagatgaggttaggatcagcatttggggcttttctagatccagttgctgataaggtaccgctgtccttatgtaactttaaaaccgttctcttaaacgcgtttgcaacgaagaagcatgcgttggttatattttaagaaacatatatgaacctgaatcccattgtcatgcctacttgatgcagctcatggttgctgccactttggtattattatgcacgagacccttggacattggtatatttgggcaagttccatggctactgactgtacctgcaattgctatcattggtagagaggtaatgcagctttatatattttgttactatatcctttagttataaaaccattattggggggatgggctacgaatgtgctatctcctaattaggagggtatctattacccgttcttgatttagattatatactaacgaggaaactttgttactaattgctaattctttatttatatctatgttgttctccctaagttcacctcatccaccaaaaatgaaaaagggttcggttcacttgcagaatttgttgcactcacaagtattataatctaataacaattttttatatgtagaaaagcccctatttgttatactcttcattctcattcgaatagctgtggatggtttaaatatatgtattggcttttcactatttcctattctaggtttcccacttggaaaataaagtgtttcatataagtggatttatgtgggggaaaataaagtgtttcaatgtttcatataagtggctttacgtccataactatggattccaatttgtgagatactctagttgctcaactaattagtggtttggtgtttgtaaccgtttcaataatgagaaaatagattatgttaccatcagagtcttagtttatccgactatcaaagcggtttttaccctaatccattatatgaactataaaaacttcgaaattttcttcaattgtatttgaatgtaatgtagaatctaatttgaccaatcatcacaatgactcttcataattccattgtgggagtgggataatgttttgaaccagaattctaaggtgtgccccttatttggcttttttgttcactgtctccagttttgtttgattgttcaatataagtgtttggcatattatactttttttgtttttttcctcgtcacttgcacaatagtttggttttgatgattatttaaaaaatgaccttctagactcacttttactgtctcatgcacagcatttgtgggaaattcttgactccctatctggagccacggaaaattgttaaaaaacagccattttttgcaaagcgacgttaaaaaattctgctctcaccaagtactctttaggaacctgaagtcttttactagccatatttaattaagttgtagctcatttggtgattctagtacatctttagtttgacattttcacagttccatgtgatttcttctttctctgtcccttttatttggtttggttgtgggactcatcattatttgatggttattatcttacaaaatgtttgcgactcattgacagataaccatgtctgcagttagagaatgggcagcttctcaggataccaagcttttagaggtctgttttctctacctgttttaccaaaaccaacttttcttttgtttttaaactagtgaagctatcagaacaataacactattcactataaccaagcatgcactattttcaggctgttgctgtaaataacttggggaagtggaaaacagccacacagatgactgctctaactatcctcctcgctgctcgagacagcaggttgattccttttttcccccctctttcttctgcctgttctttttcttaaaacaatttatatttgactgaaattttaactttatggctatcttctaaattc

SEQ ID NO: 243632 - DNA, 4063 bp, Cannabis indica
ccctttttttctctctctaaaaagtaaagcaactataataaaacaagtgaacttttgctgagtttctatctggtttgagaagaagaataaaacaatttatagacaaaaatagtaagtatgagtacactggacgtagcacaccttagctgttttagttaaagttaagtaattattaattattaattaaaaattaaacagagtgattttaataacggcctttacattacttattttatacttaatacaaatagtctggaatattaagataatatagaaaaatatatataattttttagaagtacgattttgggatgataatggtaaagtgaaaaaggattttagtaatttttgttagggactataataaagttacttgagttttggattaattaattaattagtttaaatagtaagaagtttctggaatttgtccaaagtaggaataacgcatagacacgtgtcagtgggttagtcagtccttatcctttttcaaccctactacttacaattattccaagcccccaaacaaacattgaataatgataacatattttcaataaaagttttttatttatttattttgtaacgttccaattctttttttttttttggctgaaagtaacgttccaattcttgcaaaagttagtttaagcattttacttaactaatgcagtgtaacgctcatttttttttttattaaatactaattaaattaattcatacttttaactatatttataaagatgctagccttttttaaataaaataattatcaatcttaactttatagggtagttccctaaggaaaaaacattacagatactttgtagttttgattttttttttctttttaatataataattaatttattgttgagagttaaataatacattagttattgaattagaaaaaaaaatttccaaccaaaaaatcttagtttctatctatagtgcataatttattaactcatgtattctggcaataccattttgcattacatgtagaagacatacacttagaaagacaaataacaaaaacctaatatatcaaagaaaacaaccacaatcagagacactcttaataaaaaagaatggacagaatcgacaatgtctttagcaacactctctacaaaggaaacgaaaaaactcaacaaggaacaactcttacaagagggaaatcttaacagtataaatgttaaaattttatacttgtgagaattaattcccttagtgagaaaaaatattttaactacaaataaataaaaaaaatatgttggtaagaaaataaataaaaattataacaaataaatcgatattattataaagtttataataaattttcactacaaataagcagtggaaaattagaacatttatcttgttaaatgcaattagtaatagcagtaaattctgtatactctgaacacaaactactttaaatatttaataacttgaatcactcaataattttacaactctaataatcaaataactaaaatattttaataatattataataactattaatattactattaacattattagttgttttattattaaagtgtatcatataataaaaagtggttaaatcttattagttagaacacttacgaaataagtaattttggtaaataaatttggcaaaaatatcattttctgataattttatagttatggggtaaataagtattatttatagttaaaaaaaacaaagtacacctacctaatatttaataatttgttactcaagcctaaaataatattgaaagccattctttaatttatttacttttatagaaaactagttactaaaaaaatgagaataataataaaaagagcattgataagtaatgctaagcaattttttttataatttggagattctcaaaccaattatctaataaaaaaaatatatatttgaaagggaaataaagcaaaaaatattgggcgtacaaattacaaaaagctttccctttaaaagaaaaaattaataaattagtaaaaagatagcgatcttaatttccatatatgtcggccctacccacatgcagacaccaatcactcataatttatactttatataaatataataattaatattaataatttgtgaaaatttaaccaccacacatcacacatcaaccgcccaaatgtatcattgaacaatcaccgtccaagcctcactgtcggtacacgtggcatccatccgaatgaaggtcttggggttggggagcttattgagaataacagcccatctggctaaccccaataattggataatagctcattagtaatcatgttaaattattgacttgaaaaaggaaaaagaaaaataattagcatgattgattagccaaagaaatgaattactgtaagattgtttaataaaaaaattaattactttttaattttttaattagagaagtaaaaatattttctaaaaaatatattctgtaaaattaaaattttaaaaattttgaaaacaaaaaaaaattacttttaaaattttttaattaattttttttccttaattaatattttaggctgtaactctaaccttaatcttaggacttggacttcggacttagacttcgattctaatctagactcgaaccacatctgaagccctaaactcaaatgtagacctgatttaaataaaataaaaaaataaaagttataatatataatttttattttttacttttaaaattaaaaaataaaatatttataaaacatatttttatatttaataacataaattttacttttatttttataattaaaacatagaaatgttatcaaatgtcttctattatttatttattatgtgataagaaaaaacagagttggaagattttgtggctgagaaagttgtcagtttcgtaagaataactccatattttaatacatatatgaatatttttttttatctgcaaatcttcacgttttattagaaactgagttatgcttcaatcgtggaattaatctctgttgttaattattatgaggtaagacttcggtttttcttatagtatttttttttttatattctaattctgagggctggaattgttctagtactatatgtggaaactaaacagtattatgggaatttgaacattgattaattgaatgatgagctgtgttaatattggtattattgttagttacaagatagccaccggggatggacaattgtactagttggcttggcatttggtaaaggatcaatccttttgtttttttttttttctcagagatcaactatttatcatttttgttattaagaaatatttcgagcaaaaatattgtacaaagatcactatggttgttattgatactgttggaaagtcattttgcattggagaacttttaaaaataccaatttttgtgttttatttataattttataacctaaaatttttaattataaaaatgcttataaaattttaaaattataaaaattacaattacaaactcacaattgtaaatacatattattctattttttgtttgttctttctttgttgtccttttggtgattgaaccaaagtagtatttagaggtcaccagaatagacattagggtattacagtgcttttgtctactcaaaaacttttgtattattttggaaagtggttgctcgtgtttcttccagcaccacccttaacataaaagaagtgaatctactttaaagaaattataagtatgtaagtctttattctattaatattattgtaatatataatttataatcttcaattgaatatatgttaatttgttgttctatattattcctaactcatagtttttatgagaaaagtttaaatcactattacttactagaaatgacagatatattgattaatttttttatattcaagagttttgttgacagactagatttaattataaactgtattgaggaaaatataaattagaattggattatattttatttgatcctgggtatgtaagaatcaactgtaaaaataactatttaaataagcataattttattactaaataataatacgtataaaataaattatattaatat

SEQ ID NO: 243633 - DNA, 1825 bp, Cannabis indica
tatatatataattatatttgattaattgcaatcaaagctagctataactaagaagtagtagttgtactatattagagggaaaatcatagaaactaataaaaaatcagacccccccataaataggaaagagagagagagaaatatatatttatatttgattccatttatttttgaatttggttgcttaatggagttaacaattatattgattaaataatgtgggacaaattaataagataatgtgcacataaaaatatagtttaaagtatatgaaagtaggattattagctagattcgggatcgacaacacttgggtactatgattacaaaacatccagtttcgatgctgcatgtgtttgagaatctgaatccccatcatcttccatttgcatccttccccaatattatttaaattaacaaaaaagtactttattaaacttattattatgaattaagttgatttctattattttatatacttatttaatcacatacaaacatggttagctttttcttggtataatcaaacaatattccaaataagtgtgtgtgtgcagtgtataaaatcgtaatcattctcaaagacctagttagcgcagacatataaatatatattataaattaattaattatgtatcctaagatgaagttaaatggattctaaattctaataattgaggtcaagtagtataccagttcatccttattttgctcagcacaatatggcccagacatatataataatgatataataatacgtacttagttttattaatgtattgctacctactacaagtatatacaccgatatatatttcattaggacaaagagtactaagaaatcgccccttaattatatatgtgttgcccttttattaataaaaaatattaatcaaaactttaatttagacattcatgtcactcattatttcgctctcgttattattaattaattaactataataattattgttattgttcagttgactagaaaaaatgtttacgaacggataatgttttaaaatctgttaattaataacactatatagtctatataaatattatacttatatataatatacgtgaagtcggtacactatataagaaatttaggtaagtacgtagcagagagatgaattacaacattatatttattaattaagtagaacaaatgtggacacacacacatatatagacaccacaatttagcgaagtgctgatacattataataataaaattaatatggaaacccatgatcagggggtgaggatgtgtagagtatatataatggagaatgaagatgagggtatgaatgtttgggagagaggtgaaaataatggcattatcgatcactgtctctgtggctgctaaataattgggtgatgggtaggcacaactatcatgggaccccttacactgtttcccgatacctttgtctctctcctctctatttcatatatttattattcacatatttagtaatacttggctttatgtgttccacattttgctaattattaattataaattgtattattattgttgatgcagattttttttaattaaattaaaaaaaattgtaaaaataaaaaaaattggatgtttgaattttttatcactcataaatatataatatataataccttaattcatagatagtgatgatcttaatccatcttgtaaacataatctttgtggtaaatttaagtaataacctttcaggaatcaagactaagagttttctaattttttctctcactcaaaaaaactgctactttaatgataaatttttagttacaatatatatttttttgtgactaaatg

SEQ ID NO: 243634 - DNA, 2475 bp, Cannabis indica
agggacgcataaatcttctctttctctgaatttcaaccaataaaccatcattgttgcaatgtatgtgagcagcatcaataaaattgcaccttagtgaagttagccatttgttacaaaaattattaaaattaaaatatgttagtttcgtagtgatgttagacaccaaagatgctcttttaacatttctcttcaacattataaataaatacaagattaaaaattggaaaacttgagtgcaatggaatccaatgggagaaaaaacattaacccaacagagcaaattaataattggaaagaatatataattccgccaccaaatatgtgaaacaaaaacaatctactctcttctctcttctctcttttttttttcttctttttcttctctctctaaagggattctgtgcgttggaaaaaaaactatatgaaacaatttatgtacctggttatgtcacaggtaaagagactagtaatcctagtatgaaaataaaccaattggttgatattcaaaagaggacacaataatggacaaagccttctagagaaccatattattattactagtacagctccttactgactcctccaaaaactgatgatttgggcggatcatctccttcactttctcaccattcttgtagattttaaatgttggtactgatctaatattttcggcctttgccaccgtcgagctctcttccacatccacctgcaaaaccaatggaacaaaattgaaaaataaataatttataatgttttttgcagggtacaagtatggatgtatgagatccttcttccactgctcttgcacttgtgtccccatttgaggccactaaaaacatagtttgaaaacaaaatcaggaattcaggatcattatttgaggaccgtacaaatgtgtgtgtttgtttctcaacttcaatgagaataatatatatatatgtgtgtgtacattaaacagagaccaaattggcagttgcaatgacttttgattaccttaaagaatttaacagaagggtatctaacgcacaacatatttatgaatggggatatttcttcacactgttcatcggaagagaccttgaaatggacaaccgaaaaacctgaaagttaagagttagttttcagtcaaaaaggaaagatttgattaaaacccaaagagaacaataagggcttgaactcacaaggtgaagaaattgcagctttgaatttatctagactagaaatttcctctacttccccatcgaacttcttgttttgtagaccaccaccataagatctcttcaacgcaacttgagcacggtgaagagactcggcaacttcattgtctccaggaagtaacctcctcaagacctcatagtctctcacagcttctgcccatcgttccagctatacataaaacatgtcaaacagtcaagcaaagactataaaaaatccatttggcatagttagaagaacaatccaattacctttgcatttgagacagccctgcgaagaagggccttggtgttatttggctgaagcttgagtgcttggttacaatccaagactgacttttcccaaattccaagcttagaccagcacacagctctattgcaatatagaacagagttgggaatatcatattctaagccttctccataagctgaacaagcatctgcaaatcttcctgagctgaaaagttcgttaccacgagaacgagctcttgccaccattttcacattttttaacaccattgacacttcaaggttactgtagtcaattacgccagccttctcagctgctgccacagcattctcaaacctgcaagaaatctactactcgttcttacttatccaaaacccaatactagttttgctttctcaagttcatgcttttgagcttaccttcccaatgccatatcaacttgagctcgaacaaagtacaaataagcttccacaaccatgccagcaaatttggattgtaaacacgaagaaggataatcttcaaacttgtgaatgtttaagaggctcaactcggcttcttcaagctgatgaagcttcaaaaaggcttctgctttgcaagaaaaaagctgcagaatgcagtccaatgagttatagtttaaatttgtttttgccatcatcataagtcagaaggtaaaaagcttgctgatgtagtttttatacctgaggagaggagtccgccccaattgccaaggctgcatctgattcccttatcacgctcttccaatcaccaagcttccgggcatctgcacattgttttaaatgcttctctagtgatttcaatttctgcaattcagattgatctggtagttggccatgagaaaagaggtggcagcgtgcattttcaacctgcccaatgctgtagttgattcaagttaatttacaagaacttttcaattttcaaattcttgtaatagatgcaaatttactgaggaggaccaaaaggaatgttaacattacaatgcaaaattattcatt

SEQ ID NO: 243635 - DNA, 2021 bp, Cannabis indica
ataaaggttctgtgtttgatctcatggcattgtttgtttcaggtcatccacacaagtgtatgggcgggtcaaaaacgtctaggccagctggccaagtggaaaactgctgaagaagttgctgctcttgtacgttctttgccagttgaggagcagccgaagcaaattattgtgactcgtaaaggaatgcttgatcctttagaggttcatttgcttgattttccaaacattgttataaaaggaagtgaactgcagcttccattccaagcttgcttgaagattgagaaatttggggatcttatcttgaaggcaactgaaccacagatggttctttttaacatctatgatgattggttgaagagtatttcatcttacactgcattctccagactcattttgattttaagagcacttcacgtgaacaatgagaaggcaaagatgttgctgaagcctgacaaaacaattgttacagaggcacaccacatatggccttctctcactgatgatcaatggatgaaggtatttttagaacatttttcttttcctttttcggggttattatttttaagtcgatcaattatcttaatactctcagagcagacgctttgctagaattgtctttttgagaatgtagattgtcggtgtttaacatctgtagtaatgtaatttgtgctcacttatagattttagttgcaattttaaagctgtactgatttattgtgtggcacaggttgaggttgctttaagggatctcatactatcagactacgccaagaagaacaatgtgaatacttcagcccttacacagtctgagattcgtgatatcatacttggtgctgaaattactccaccttctcaacaaagacaacagatagcagagattgaaaaacaagtaagcggtcctttttcttttccttttgttttttttttggaactttctcgaagtagctgtagactagattcgttttaatttacattactgattctttttggttgctaatttggtttaacaggcaaaagaagcaagtcaactgaccgcagtgacaacaaggacaacaaatgttcatggtgatgagctcatagtaactactacaagtccctacgaacaatctgcttttggctctaaaactgactggcgtgtgagggcaatatcagctacaaatctttatctccgtgtcaatcacatttatgtgaattcagaggatataaaggtagaggtcttctctaagcgttacaaagtaatcatctgcatatttttttctcgtctatttgttaacatttggagctgtgatgatgttttcaggaaacggggtatacttacattatgccaaagaacatcttgaagaaatttatttgcatagcagatttgcgtactcaaattgctggatacttgtatggtgtaagcccacctgacaaccctcaggtcaaggaaattcgttgcattgccatgcctccacagtggggtactcaccagcaagttcaccttccctctatgctcccagagcatgatttcctaactgatttggaacctttgggatggatgcacacgcagccaaacgagcttcctcagctatccccacaggttcgttacttcttcagtcttttaagttccttcttcttgtagcatgtggtttagaattataggaagttaacattcacttgtttttattgtgtaggatcttacttcccatgctaaggtccttgagaacaacaagcagtgggacggggagaagtgcatcattttaacatgcagtttcacgcctggttcctgttccttgactgcctacaagcttactccatctggatacgagtggggacggatcaacaaggacaccggaagcaatcctcacgggtacctcccaactcactacgagaaagtccagatgcttctcagtgaccgcttcctcggtttctatatggtaaagcttctccactctgtctctttctaacacttagtttactattgtggtttttacttaaagttgaagaaaataaatgcttatatctttattattgtggccttt

SEQ ID NO: 243636 - DNA, 1290 bp, Cannabis indica
catattcctattaaattcttatgttttcatttctctcaaatcaaaatgcaacataaaatgttaggccgaaaacatatagacagtttgggccattacagaagaccccttatatagaaagaaactgttttttttagtatacataataaatgttcataagaataaatatacccttacaaaaaaaaattaataaaatcttttgatcccaatacacatattctaaaattcttgtctattttaaaatttataattttttttttaatttttcgctcaaggtctcaaattgcttgagtcggccttgttctagggcaacaattaagtaattaatatatttttttaataaaattaggaaaaacaaaatgtaaaaaagttagggaagatgtattaaatgtttaattttggcgactatatgagatttcttaatgtctaactttggtagctcgtccatcctccctaaactaagtcccatttttggctaatttattattgttattctttttcatgagtttttatgggttattgagatgagagagattttctttctgagaagttaagagtaaagaggtgaactataaatatatgaccaaattaaaatacaaatagagcaaagtgaactattacagcaaattaaaactgatgatgcttcatattataacaattataacacttttgaatttgtgacaagacataattgtaactgttcgaacttattataacaagatcttaatttattatcgtataataatctaacatcataaaatataaaaattacaaaacgatcaaataacatgtagaagattagaaatctttatattagttgtaacaaaattaaatgtcctcttccgttcaattactctaacttcatatttcttttcggtagcagatattgccaagtaatgaacttgaatccctttcatgaatttgcaaagtcggcttctgcacaatcttttacagagatctgaataccacattgaatagagtgggctgatactcaatacactataaaattgatttctaatgagagagtagagggaattcaaattcaatagagataaagcttttcttgattagggttttagtatttttagcacacacataagctattggactaagattagattaaatgggctagtaaaaagatagtaagtccaaaatcataatcaaattccctattggatcttatggctttgatttttgccatttttattctaatcttttaatttaaatattcattttttatttaataattataaataatcatcaaacaaaattattatttagggaaatttgcgg

SEQ ID NO: 243637 - DNA, 1232 bp, Cannabis indica
aaccccaaaaacacttgtaacaaagttaaaacaagacgaatattacgcaataataagctcggaagataaatagatgtgtcaaaacaagagcataaatttcacattaagacaaatatatgtcaaatcctaaaacttcaattatcaaataagctgtaaaacaaacatcagcatgaccaaaattgtgctaagggactccactggagttaaccctttaactagataaacatttccatatctttcttctccaaaagaactaagcacgaaaatagacttaaaattgaaaggccatccaccttagaatccgagcttggtgcggcgccagtgtctgcgcttggcattgtatctgtaccagaaaataatcagattatgggaaatttgaacagcttcgatctaagaaaatgaattattttaaaaaaacatatatatttgtatatacaaaaatttcgtatggaccaaaaagaaaaactttgattttcgaacctaatggtattgtcggtcctcaaccggatccagtgaggaatcggcctgttctggcgcatcttcttggccagcttcttcttgatcatgaaactcttgtgcgacggctgagaatacaagagcgtaaatagagaagattagaaccgaaaaaaacgttggatttgaagaataggaacgagaataaccagagcctaatccaaaagggtggaaagagagagacttaccatcttcgctgaggtcggtggctgagaagcgaggcaagaagaagaaacccaaaccctgggtttttgagtgagtctccacgggaataaacctttcttaaactcttatagaaacaattttttggtttttattctattttataataaattgtggtataacttattttagaatcaaattaatagtttaatagcttaaaagttttgggttagaacccataatcctaatcaagatctcctatttaaaagtagtgtcccaaaatttaattttttatttataaaaaaattaagggaattttacaaaaatactgtttttggaccaaaactttacaattatactgggacacggcaaaaataacatttttactgccccagcccaatttcattacttttgtactgcccaagcccaacagcataacatttatactgtgtgtgtggggaaacaacgttcttcgtgtgtggggagacgccggagacggaaatcaccaagaaaaaaccattaaaaccggcaagaataaacaaaagcagtaaaatcga

SEQ ID NO: 243638 - DNA, 1338 bp, Cannabis indica
aaaactatataatatcaaatgtaaaacaaaaaatcaatacttaccaaaaatgggcaacaatggccgtcgactgctccaagaggtggtcggtggtggaccgtcgactgcttcgagtgtgggggtcggggtggtggtgcgtcaatggggtcggggtggtggtgtgccaagggagtcggttggtggttgtgggtggtggagaaatggggggacaatggatttgaaatttaaagacaagaagaggaaaatggggttgatggggtatatttaaaagggttagcgacggactattagcggcggggtttcgccgctaatagtcattaattaatttttttattttaattagtattagcggcggggttccgtcgctaataccccgtcgctaataatattcgaactgaatgggcgagatttgttctgcccattcattagcggtgaaataattgcggcggggtccgccgctaatactattagcggcggactgcctgccgctaataatattttccaaaacccactgccaaacgaccactaatagcggcggacgctgaggtccgccgctaataccactgatattagcggcggatagggtccaccgctaaaaaatctgccgctaaagaccaaatttgttgtagtgttacaaaacttaggcaagcgttgagtatgtactgatgcaagatttacgttgattttgaagatatttccatcagttttagttcacaactgacacagtcttactcgttttaaaaaaaccacagatttaaaggcccttttacacaataaaaagccgactatataaactcattatattcttcaaccctcaacctgaatgatcagcccccctttcttttgtctctttcatttccagtttgcacaacacccatcggctgccaacaattacatgcccacacaacaccaagaccacaccaaacccatgccgacattctaacgcccaaccccgatggtcccatgtcacgatggttcttccttatctctttcaaatgtctaagctactctacttcattaattttcataggacacgattttgttgaaggggtggatttactttttttttaggtgcgacctgttttttttaacatatctcaaactcactctctttatttttgtatatgtttgttgttgtttttttagacttggatctattgttttcatattttttttagagtttgatctgtattttccatcaaaaagtcgatgagatcaagatcttgtttcaaatttgaaatatatatttttatatacttcttatagtttacgtctgtgtggaactgagataaatattgtaactattgataattcacaaagttatttttttgagagttc

SEQ ID NO: 243639 - DNA, 1602 bp, Cannabis indica
atattaatgacaataaatgtttttaccaaaaataaataatttgtggctaaagggtgtctgtgactaattgttgtgacatttagtcacaaagattagttgtgactaaaagtgacttttagtaacaatattatttttattgtgactaaaatttttaaccacagactttttagccacaacgccgtcacaagaaaaaattgtgactaaaacttttggtcatgacatttttcacttttagccacaacttactaaaagctaaggctgtggaggattgcgattgagcagaattgattcaagatcatgtgcacgaattggtggaaggacttgagaacgccaaaagaaataattgttgcgatccaagcgcaagggagggagaaacattgtcgtgggaacaccgaagttgtgaatttgatcaccagctcctaaggacgccattggagaaccatgggacttctgatacaaatttgagaattgtaagaagagaaaagaaaaaggaaaattctctgaaatttttattaaatgaatgaattgaatgattacataaggctaagtatctatagactaagctatgtcgattacatcaattaacagaatatagaagagcttaactattaactaacataaagaacaaactacttgccgaaaccagttggcactaactaattcttaataacagtgatgaatattaattctacaattttattcattcttttttctaacaactaagttatttattcttaactatatagaaatacagtatcatgttacggacgataaaagtcagtagtttatgaaaacttgttattttacatcacacagagctgtcttccttgataatacattgtataaagaaacaaaatcagagagcagtcatgaagaactgagataaatatttaaatatatttatttaattagtattgagcttaaacaactgtggtaagtaaagaagaaaaacttgaatttgaagcagtgattccttaggtgacatgagaatcagcagtcaacatccatatattatcaccataaaggtactgattattgagcctaatcgtatcactctcttgtctttttaactttttaatatttcacaatccaactgtgtcttcagatgcagacacataaacttaacaaagtgaatttgagaaaggtatgcataatgcatgatgacaatgataatgatgatatttgtgttttgtgtgattggagaaacaaaaaaaaatattgagatatcatgaatataggagatagagagtgcgtgagagagggaaaaaagagaaagaaagcatcagataagatgaaatatcacatacaatagtagtacctgaaaaatcagtaggtgagacatcttaaagaggcaattcactttcaagtgcagcctcctctcctcttccttctatggccgcctttaaaaacaccctcactacaggtccagcatatagcattagcaggtctacttacttgtctcctatcctctcaactaccatccccggccaccttgtcatccctgcaaattcaacaccatgtttcacaaaaaccaaatgccaaaccaattgagagaattatgcagcaaatccattcattttcagagctcaagttcatcttttt

SEQ ID NO: 243640 - DNA, 5743 bp, Cannabis indica
ttgaatctcaattaataaacattatcttataaatcttctaatattaataataagaagaaaaggagctggatttaacactaattatgaaatgactgaaatgggttaaattacaggagcaacaattaagactaatctgtggtgatgccaataatttgacttttctttctttctttcttcttcttcttcttaattgttgcaaaagaatcccagaagcaatggttgagtcttcaatatcatcctcatcatcatcatacacctacttgactgattgcaaatcctcatttcagattcacaacattctcccaccttcatccaatcccctcactctaactctcaaccattttcttattcttcttcttcttttctccccattcattgcattctttttcttcaatctgaaattggacactccaagtccaatattcattcttccatggagcttgcttcttcttctaaagttgttgcttgggaatcccatccacaaaggtcagtactttatacatattatatgaatttattatactaaaaatgtttgtcttttaacatatgattactttctgaatggctcagagtctgtaattctcatgcctgcttttggagttcagattgaaactcactataccaggtagttaaggaataatgtgtgtactgaagtcaatgtagttgaattctgtgtctattttagctttatgtaaatacaaattacaaaattgttgcagaggaagagtgagtcgtcggtttattgctgtagacaagattttgaagccagttctgttggaatgtgtgactccagctacatgttactggaacctctctttgattgttcaaggagaacaacaactcatttctgttttcaaggtaacctcaaattcgtcttttgaatctctatccatccaatttgtttaaattcaaacttgtttttccatttttgtttgtcaaggtattgaggccaccggcaaagatgcttgttcccatatggaaggccttgtgtgctgtcacaaccgacaatgacaaggaagaagagagctcgaaagaaaattgcagaggatgaagctatgtttaaccactaacacaccttgtgtgtggtgttgttaacccaactaaagacacttgagttgagattacactcttcatttttgtaaaaatctttgtaaatacatttatgggtactaaacaaatttaaacctttcatttacaagcattgcaactccctgtcttttgatgagttttaaactgaagatgtaacatgtagtagcataactttctgaaaagagatttattaagtgaaaaagtacatcatcaaatgtgaaatccatattggtaatctgcagttttgtattttatttacactatgataacaaactctctattatattactctaacaagatgctgacatcaaacgttgttcagcgcgttcaacattgagctcatgtcggcgtaagccatgccataacccgttggaatcatcagtgtgcagtgtagtcttagctatttgcttatgcagtgtctccaagttcacgagcggggcagtagtcggccgcccatgtgcacactgcacaaatcatagtagttaagaagatgttttctcctctgttgctaataataatataacaattgtgtctaaaccttaaatacctgaaaacaaagggaggtatgctttagctcttcaatgataagggaacactccgaatgtagcaatgcatccccaaacataattgcacctttaaatagtacatcagttattgaccttaaatatatacacttgagaatctatgaacatatgagaattgaaaaaaaaaaacattaaaatttgatcttgcatgtacctcgacatgctttggaattgaggacgcgaagaacagagggtggtattgttgaagatccatcggtatcagccagctaaaacattgaaagaaaagttagcatagaaaatatattcaattggccaaaaacaagttgatcattgagtcaataaatgtaagtacctgttggagaaattcagtgagatctatatcagacaagttgactcctaagatgcatggtacctgtatgttattcaatttaaacaaagcgttttttaaaatgatcatttaccaaagtagagctatactgaagagaaaagttagtttaatggactagctaaaaggagtagtgagtgctttaccgcaacgagcttaataaccgttggccggttgtggagaagattcaaattcctgcaataagaagtaaatgctgtgctggccatctatttcgtaccatataattataaatatttaaagatgggaacataccttttgaaggattttgaatcctgagcatgaatgttacatatccaaccccattctttaatttctttggcatagctatgcagtaactgatgcccaatctctggcagcatctgaatattatgacagaaagagtttcaattatcaagtaaaatcattgctaagagtatcaaatacagacagcataccataccaattctttctctgcatccagaaaagtgatttcctttgcttctccagacaagacctgtggtaattcaactacattgtgagaaacacaagaaagtgtatctttcgaaaagttcataaaacagaaggcgtttcgtttctaccttctgacgcaactcctctagtcggattcgttcatctgcagcgtgctgatgaaaaggaccactgctgaggtcagaacttcacatgtttgtgcatgcatgaataaactaatggttctctaacttggcaaggaaaacaaccgacataaagtcgggatatttgataactgtacctgatcaacgacagcaagagttttcccagccacaattggaatgtattttttatcaatctgttggagaacaatggcttccttaaggctgtttttgttaatagattcaggaactaaagagtcaccagcaaggtgcaagaatcccgaagagatatcgagaatactactctcattctggatgtcatggtgatgcaacttattattgtgctgcatgtatgtaacaaacactttaatcactgattaattatggaaaacgtttattgcatcaaatgattacatattttttaaaaaaaatgaaaaaagagggaaggcaaaataagtacagcagtctttgggcagctgttccgccatttgctcccacaattcagggaaacattatctgaaaattcagatggaacagaaaaacactgtcaaccataagtgtcaatgcagatatctaacaattttaactataacagacaatggacttacctttaaatggagcatcttgaatgtcgaaacaaacagactgttcaagcctttcctcacttctaatctccgttaagtcttccttcaggtcttgtagattcttccaatctagcctgaagtcaaatcaacaccagcaagaaaagagaaatgaccagttgcaatgctttactattgatgaaaaaaatgaaaatggcaaatgtagtacctgttgtctaacagcgaatcccccaaaactataggcttccaccgttcacgaccttctgcacattacaagtggtttacagtattagctagccttgcatcagcaccaactttgtatacaaaaaacttcaataaaactacctggataagctgggtcattgcccccttttcctgtagaatggaagtttaaggtcaagaactttctcttgcttctacaaaatggcggagctgagtggcttcttgatcttcgtttagagaaatgaccattcccttcactttcatcataactattttgatctctttgacttttgtacatctcactactcaactggtttttaccaagagatacttcacttaaccagtctgtcccatgatttgatatgttcaccgacttagagggaagtcttttgtttaaattgtgcctaggaaggaattcacccaagtccgcatctgaaaattcattgtatgaacagcttgcattccacttttcttggctagatctcttttccagtacatcattactatatctgcagtcagtgtaatgatctacatcccaaggtgtgggctgggaaatcgaatctaagctcaaagagcaccattcagggtccaaattgagatgattagagccaatagtctctatccttttaaccgaatcagacaagaaaccatcattatagtcagtggtaggctcttcataaagtgggaatgaccttagggaagatcttgaaaaactaccgatttctgcagttggagaggactgaaatcttgatgtgttggcctcccgcaaaggacatgacaagaaatcaaaattctcgttagtctctgaaacattaaccccgccataaggccagttcaacatttggttgatcttaaagttatcacttttaaacttacaaacatcatctgtacacaaagtcctctcttgtggaaggcaccctctgaaggagcaactcttcagaaaaggtctcttcccatccctgctcactgctacatcattgctgagttcttgatgatcacaacacaatgaactatcaacagcttcactgctaagaccgagatcagcttcaaacgaatctcttccccacgaagaactgaagttaacatctgcactcactctgcatctctctccagaagtatattcatctaccaggcaataatcatctgtagataaagagtggttattagaaatgaacggctggtgctcgtagtttttagatactttgagcttgcattgggcaaggggctgatcccatgcttgaagagaattgtcagtatgaaatgtatccatctcatcttcttgatcatcgaagtaatgagtacatttttgtgagcttttatttgtaatcatatcctgtttcctctgggacatgtagttgagctctttgataggcatcttcagatgagaagaaatagggtcaagagagtcctcagaattttggattctgcccttcttattcccagttgtggagtttcttgggaaaacatcatgtaaatctagcaacaaaaataaccgacttcataagaatgttacattacccaggctcttacttaaatcaaaagtaacgagaagtaagcataaaatctgatagaaatggataaaagttattttacatcaacaagttggttgatttgacaggtcattacctcctaaagatatggtgtttccatctccgttcaacagtagatcttcgcccttgatatcagacatattttccttccacaagtcttgaatgacctcttcaagaagtgcaagtacaggaacccaatcctgtgaaaagaaaaaggggcactcagattagacaccatagcatctgcttattccaactgttttctgtaactgtacccactccaggaacttaatacttatattagagcaagttggcaatttgatgtattgcacgtaagacagtatgagctcaacttaaatgagtacttctgacaaagcagagaagaaattaccttgaattctacataggtttttgatggctcaaagtttaaatcataaaaggagcgagggcaccttatgttcaaaatgaaagcagggtatatttgagctctccttcgttttctggtttggaaattattgacagcttttccttgatcgaaccaatgatatctagttgccaactgattcaccaatttatggattggccctttgcacacataccgtgaattaatatctgcagatgttagtgttaaggtaaactattgaatgaaacattattcaaagcacaatacatccacaatgaaaaattcagagttaacaggcatagaatcggatacagatat

SEQ ID NO: 243641 - DNA, 2762 bp, Cannabis indica
tatcaacagacacacttaggagtggggacttactacttatatgactacctccgttcactctcagatctaattgagaaaaaaattcatgaacataaaagatcaatgcctagtagaacagaaacatttggaaatgtttgaaaatgattaaaatttctgcgtgtcttttttttctttgcagttaaacaggcaaggaaaattcatattacacggcattatcacagggacatcataataagaaagctaacttggaaaatgcactttagaactttcaacattcagaattctttcacaagaggtgagagagaatagagaaagttatgaatgagtgtgtttatgtatattaattgtatagattagacaactatatattgtgcattacctgaatatacgctcaaaatcatcaaaacttccaatgttagcccagccatagtcaaaatcaccttgttctttgccttcgtgggaacttggatatatttcagcatctttatcaagctgatcagtccctgaaattagaatttcaagtataaatgaaagggagccgcaatcaataactcaaacttactcccatggcttcgccaactaatacatgtacatatgcaggtagaaacgctacacttaccagacaatagtgttattttacttccttatctgtttaatgccattagaaattttcagtaatttaaaaagaaagattttgttgtttcaggtgctactgttctagaatttcaaagagcctatacaaaatgacaaatgagggaaatctttttcatcttttattaattccaccaactgagcataccctttacgattttaaggactccaacaagatattaccacttcttacagtatactgaaaatcacgggttactatcacaattaatatattgataattcaaggctcttatttgaagattcaaatgtggaaaatcctttacatctttttattaaatccaatacccattacaattttaaggacaccaacaagatattatcactgtttacaaaattgaaaatcatgggtcactatcaccatgaaaatattgaaggctcaaggatcttagttgatctacagaatttgttgaataacagaccaaaaatcaattttccactccaatatatgttgtagttcccacagtactttaaattacacttagcaatttcaagtaatacataaaataggcctggatgtgtaactagtaagagtatctgtgtaaagaaggacctgtaaacaaactaacatttcatagaatcacttcagtaagagtagcttttcttgtggcttagaagggctaagcaattttgttacctttttgtagtcttgtgtacttacaaccatgtgtgttattaacaaatggtatttttaactatgttacctgttgacgagtcaaatttcgtaatctcacttaaggcgttagatacgttggtacccatagattccctttcactattagataaaggcaaatcaggccaggactccacccccattcttgaatcagaacttttatcatggttgatcaaattggtactgctttccacctgttctttacgtaaatcaactttagaattgttctgctcagtaggcttatttatattggcttcttgtttccattccttcttattgcgacaatcttcacttttggcaggataaggaacaatatggtcaccattctcagcagcctcatcccatattatatttgctagctgaaagagcaacagagttttcaacaattgcagaaatcaaccaaaagacatgttcatagaaaagacagaacacaaaaacaattacaacaccatctctagctcaatatattcaagtaaatggaacaaagacaaattcaaacatcacaagcagcacaagagaattcggtgcacactttaggaaaccacgagaaaagaaactaaagcatattaatttacaaggactcctggaaaagcactacaggtgcgattggtctggaaaagcactacggtttgggggtaatgaaatgaaaatgaatcaattttccttccattactttgcttggttgcatttagaaccctcacataaggcagacgaataacaaaggacaaaagcaaaatttctacaattataactgaaactagacactcatagtctgtggaaaatatgaaaagaaaacatctaattcgatacattcccccactctctaatacaatagttctttgcatttctcatagctatttcagaaagtttaaaccattttgtaattgtcacagaataaccactcacctcattagtttcttttttctctattttgagaaaaagaccaaatatgctttacttgtcaaaatatgaccatttaacttagtttttattaacatcataacatggcatgttgattccttaaccagaatactgaagccaacataattctcttcgatgtttctcaccatgtgaagtcactcaaattctgctttctacagtcaatagattgccaaacaacccctaagaaaaaccatgcatcaattacttatttacttatttcactaacctaataaaatcaacaaatccactacaacaataccaacatcactaatttcagagttaatcacataaaaaatattcaatattcccaacatggattcaaccctgctcggaaacgaaattaaaagaaacttaaactttgataacttgtatgttcctgtaaacccaattacccccaaaacaaaacaaaaaacattaaatgaaaaccacaaagcatacatatgcatccccacctatacaaaatttaactgtttttata

SEQ ID NO: 243642 - DNA, 1740 bp, Cannabis indica
tttttttttttttggaggggttggccaagtctgggtcaaacagtcttactaaaattgagatgtctctaccaataatataaaaagtaatgtactaaggttcctaattttttttttctgaataaggttcctaatttataatatatatgttatttctctaccaaatttcatattttactgattgaaattaacaaaatcatcacctaaaaaaaattccaaaataacatatgaaaaattataaagaacacaaataaaatcgcagttcatcaaactaaattatccagaatataatccaaatccaaatttagaatccaggagaaaatactccaattattaaagaaacaaacccacaatctcaatatttttaaagccaaccaaaattaaagaaacaacctagaaattatcacaaaatatccagaatttattttaataagtctcaaagaaatttaatgacattcccagtcatcaaaaacttattgtcaccagagaccaaatcttcccattcaaaattgttgagtttgagaggctcgattagatcctatggcaacgacgagatcctccaataccctgaatctgatagaataagaagaaaattatttaatatattatttttttctaaagaaccattacaaattatcatgtgattaaaatacctataattggaggagagcttgtggttattgtaacattaggaattttggaaaaataaatgtgcaataactttgctctttcttcataaccttcaaaattatctgtaacttcaacttttgccaaattatgtcgccagcattttacaggatattcaacacaacactcttgtattattccaccttcttcttcctccattttattagagtaatatagctacacattaatcattcaatttaaactctcattaactaattacatacattaagaaaagaaaataataattacaatcatatacacgattatttattaagagctaaacaatattttatgtgagcataagtaaattaggtgcatttggtgcactattgaagaacattcttaattgtggtcaaaccatctcaagtgattttgaactatcaaacatgttcttaatcataatctagtctaataaataagaaattattagttgatattgaatagaaaatataaatcacatcaactactttaatattttgttagaaacatgggataaaaacttatcaaagtcctatatttgagaattattcatcaaaaaaatttacaatggacaaaataatttagaaagcatgatttgctaatgataataatttgagaaaataattttaaataacttaaaattaaatatagaaaaaatataagtaaatagttgaaaatttttgtgtacataccttcaatataaatgtcggtgattttattttattagtggcgataaatatagtgtttagagaaggagcaagccaaaataaatacttgatcaattgcacaatgttggccaatttaatttccttcaagaactttattttgagatgcttaaggtcacacaagggagaaagtaaaccttctcttgcttccttaggaaagataaaatcctgcaaattattatgaatgttatcacaaaatcacatatataaggtaaatttctatagatgaataaaatgataataaagaataaatatatatatacctcttcatgagcacaaacgagagtcaaagttttgcaatgaccaaaatagcttagaaagttcctcatgtttggtaatagtcaagagtatt

SEQ ID NO: 243643 - DNA, 2252 bp, Cannabis indica
agtcgggttattcgggttgggcgccctactttggagggtaagtggtgacaaagatcaataaaaacgtcaccaaaagatcttacacgtaatcgaagaatcaagaaattgagatgtgagcaaactgaaaagccaccaacaaacagcatcagactataaaaaatggttgcattctggggctgctgtgtccgaattgaaggagcatgtaattaacttaaaccacttgaaattctagagccacagactggttactatctatgggcatgaaacttcaattctctgaagtcttgttactatctgattttcccctccagagtatgatctgctcgtccttgaacaatatgggtacgcaaggtacaagatcctgaatgaatcataaacacaaaaaaaggcatataagcttgtggcagacacccaaaacacatccaaatagccaaactaatatggtctttgggaaacttcaagtgtcacatgtatcatacccttagtttcacacctatcttcttgcagtcactggtaccgacatgggtgcagtcaagtctcactacctcttcagtctcaaaggcctctctcactctgtcaacaacattgacatacacaccattcctagctgcagcaaatcaaattacattcgccatcaaaccccgagtaaatactctacagtatttccctctttgatttcattagtgaaaatagatttttggaaggctatttcacgtcaaaaaacatgaaaggcagcaattcatctcaaccatgtttgacttacttagtatcattagaggatgagagttgagaccttggtttctcaattcctttgtttcctcaaatgtcaagccttcagcgacatttttcacaagcttaggataaatgggtgcataaggcttccacaacattacaggaataactggtctgttcttatgatcataatttcgaccccgatatagaaggaggacgttaatgtgcctgtatataatcttcccaccagattttccctacaaccacaccaatttctatagcagctaataacttctgatgaaatccaagacaataacaaatactaaaacatatgaatatggaatgaatcaagtttaaaaacctccagatgaaagcacacattatccatatcaagagtaggtacacccaaacacttgatccttacagcttcagctctcttccaatggttatggatatcgagcaacatgttatgagtcactccccccttccctaatgataaaagaaggaaagaaaatccatcaatctacctaaagaatgggaattcagtacatatacatacatacatacatacatacatacacatcattgacatcaattcaaatgagagaaaactttgatttaatagttgatagttgccaaaaacaaaatttaatcaaatactaataataaattttcatgtttattaaaatgtaagtaatagacataattattaacacataccatctttcactaacaaataaaaattcgattgggtatcagtcagtactcaatcactatgtagactttgccaatttttttttaacaaaatacttccaaatgtaacatggtagagaactaaattgttaaaactgttcctataatatttaccatcttgattaacaataaaaaattcaaaattaaattaattttgcattaaatttcattacccaaattgatctgccgggaacaatcgttatggcggtaccgttcaaccagttcggaaacttcgtcctccgtaagtgggtctccaagaacccgactccgttccttcgccagcttatccaggtcagggaccttccgggccggagcagtagtcccagtccatttacggtcaagccggccagggccgaaaggtgagaatttgggggattctcggaatccgatgggttccacggagggattagactccgaatacgaataaatgaaatcgaagggaagatccgacttgagaggtcgttgagtcggggctttcttgggtttggggtcattgtttcgaggttgggttttcttgggttcggagagaagagcaaagggcgggtcgtaagcgtcttgggttaggaaacgagagataagaaaaatggcttggcatttcaggggtgaagattgacgccgccatgggagcagcttcaacattagaatttaattcgaaaatgggttttggtccgaagtaacgttcggacttaggagagtttaaaattatttcattagtgagaaaatattcagtaatttagggcctgctttttttgctaagaaactgaaat

SEQ ID NO: 243644 - DNA, 3036 bp, Cannabis indica
aaatttaaaatgtttgagaacttcatgaatttctagcaatattaaaaaacattaaagtaaatgattaaacaatatcggactaaattatcaaaacaaaacattaatgattaaaattgttaactttagataaacaaaggaccaaaagtgaaagcccaggacattcaaagggactactcaaacaaaaagatacttagcacaggaagattctagaccattcatttctttcaattatggcttaccgacaaaattgacgaaattgcccctctctaggtttcaacgctaccaccaccatcaccgcctcaagactctatataaacaccttcatcctcccgtattcttcattcatatattctcagcctaatctcatatctctctcttcatttcatacaagaacgattttctttttctctgcgattttcaattgttgaatatgcagatcttcgtcaaaactctaaccggcaagaccatcaccctcgaggtcgagagctctgacaccatcgacaacgtcaaggctaagatccaggataaggaaggtattcccccggatcagcagaggttgatctttgccgggaagcagctcgaggacggacgaaccctcgccgattacaacattcagaaggaatccacccttcatttggtgctaaggctccgtggtggcatgcagatcttcgttaagactctaaccgggaagaccatcaccctcgaggttgaatcttccgataccatcgacaacgtcaaagcaaagatccaggacaaagaagggatccccccagaccagcagaggctgatcttcgccggaaagcaacttgaggacggacgtactctcgccgattacaacatccagaaggaatccacactccacttggtgctcaggctccgtggtggtatgcagatcttcgttaagactttgactggaaagacgatcaccctcgaggtcgaatcttccgacaccatcgacaacgtcaaagcaaagatccaggacaaagaagggatccccccggaccagcagagactgatcttcgccggaaagcaacttgaggacggacgtactctcgccgattacaatatccagaaggaatccaccctccacttggtgctcaggcttcgtggtggtatgcagatctttgttaagaccttgactggtaagacaattactcttgaagttgaatcatctgacacgatcgacaacgtcaaggccaaaatccaggataaggagggaattcccccagatcagcagcgtctaatctttgccggaaaacaactcgaggacggccgtacccttgccgattacaacatccagaaggagtcgactctccacttggtgcttcgtctccgtggaggtatgcagatttttgtcaagaccctcaccgggaagacgataaccctcgaggtggagagctcagacacaatcgacaacgttaaggccaagattcaggacaaggaaggaattcccccggaccagcaacgtctgattttcgctggaaagcagttggaggacggtcgcacccttgctgactacaacattcagaaggagtcgactctgcacttggtgctgcgtttgaggggtggtatgcaaatcttcgtgaagacccttacgggcaaaaccatcactttggaggtggagagctctgacacaattgataatgtcaaggctaaaatccaagacaaggaaggcatccctccagaccagcagcgtctcatctttgcggggaagcaattggaggatggtcgtactcttgctgattacaacattcagaaggagtctaccctccaccttgttcttcgtcttcgtggtggggatttctgaagtagtggaggttcggtctctgcttttcggtgtggtgtcttttgatgggcttgttattaatccttttgctgaacaaagtgttctttattttcagttttaaagttcttactttttaatttggtccagtgagaccagttaatgttaaaactcccgttcttgccataataaatttagtattttgttcacaaatattttacgttggtttttgatgatttctatttgggaatgcgatattttgttgaaaatttcaaagcaggaattcaaatccttttctctgatcacttgtagtgtagcatgaggtgcttgctctttattaagttatttattatttgtatctttgtctcaagattttaacttagaacaattttgagtggtgatagtggttaattgtgaacatatttatgattctacagttaatacattgttctatactgtattgccttttgaaggttttgggtgttgagctttagttctatggcttaaatgatttatgatgattacacactcttgcttattctattagatgtgttatctttatacatcatattaccaagttgctcatagattgaattgctcgctcttgatatgtatatcttgtatatttttgtttcaagattttcaacttgaaattttatttttttttttttttttcaaagatgactgcactgttttattgagaacaatgagtttgtaaggcctttgccattgccaagtcttaatgttctgaataaaatgctttcgttgcgttgtcctgtcatgtctaatattagtgagcaattcgttggctctctcttttctagttttagttttggttatggcactgtattgtacgtattgtgcaactcttttaaagcttttggcttcttcatacttatcattataatggattttgaccttgtaacaacttgcatttaggaagcatgtacacattttttatttgggagaagaacattgatctatgatcagcgatcacaccttgtgtaaaacaacattgtcgatgcttattctctgtggtttatcgaaggaaaagtgggttggtcgaatgtcaatttcatgctgaatctgaaaaagaggatggggcagcatgaacacttctgcaaccgtcctcttgctccaagcttctgttatattattttatataatataatatgtagattaaataattaagttataaataattaagtgtgacaatattaattttgtcaaattgtaacatacattatggagtt

SEQ ID NO: 243645 - DNA, 3573 bp, Cannabis indica
caggtctttgattccaatttgtggttttctaaaaaaactctgaaattgaaaaaactgctcgtcatatttggttatattttcgctgttattcgatttggctgcatactcactttttttttttttcatcccactatgtcagcccaatcttctagttttccacattgttgtaattacatggctaagaaattaatcagattacagactttcccttaagcatgtaagcaatttcgcttaagtttttatacgttctgtgtattcaaaaatcattttgtatatatgttcatttgaacacttttatacatgtttcccctacaacaacagctcaactcacacatatatattctatctaaatagagcagagctttctattcaaatcaactcatcttgttgtacttgtactttaattcatccaacatgtcaaaatcagcttgtttgactggactgcatttgtagcattcgtttgacactactctctaacccttttcgaaatcattctttcaatactactaatgtctcatgatctgtttcttagccctgttttcttcatacctataaaattttgaatttgattttggtttactgtttaaaaagtggtagagtgctcaacaacatatacattcttggatgtaaaattatctgcctttttcttgtttcaggtctaactttctaggaacaaaattcattatttatgatacccaacctccctacaatattactcagctttccccacctggcagaagtcgtagattttactccaagaaagtttctccgaaggttcccacaggaagtttcaatattgcccaggtcacttatgagttaaatgtgcttggcactaggggtccacgaagaatgcattgtgttatgcattcaatcccttcctcatcccttgagcccggtggtgctgttccaggtcagcctgagcttgctcctcgctcccttgaagattcgttccgcagcatttccttctcaaaatcaattgaccactcaaatgagtttagcagtgctcgattctctgatattatcgggcctcgcgatgacgatgaggagggtaaggagagaccactggttcttcggaacaaagcaccaaggtggcatgagcagttgcagtgttggtgtcttaacttccggggaagagtgacagttgcctctgtcaagaactttcagctaattgctgcaacgcaggcagctgctggtgcaccaacaccatcacaaccaccaccagctcaatctgaccatgacaagattatacttcagttcggcaaggtagggaaggacatgtttactatggattacagatatccattatctgcatttcaggctttcgccatctgcttgagcagcttcgacaccaaattggcatgtgaatagaagagaaaacgaaaaagagatttacggtaagaaatagaagaaaaagaaaaagaaacaaaaaaaagattagcttgaaatgtttctttctttctagggctctctatatagaatgttgttgttgttgttgctgttgtatcaagtcgccgtacaaactcatggtaggctaagaactccggcttttgaccggggagtgcagaaactatatcagtgcacaatggagggcatgagtcctcttctcttttatttttttcaaaattttatttctttaatttttactttttggtttagtttgctttgattgattcccttgtcttgtctgtgtcatcttgttatttaacttttactgttatattttatgccttggaaagaacagattagacatggaaaaggggtagtaggcatcataatgtggattgtgactttggttaatctatccaatttagcaaattcttatctttttttctctctattattaatcaacaagtttcattttttgggaactcgaacttggactgatcactctagaagacagtaatcttgaatgctcttcacatgtgttcttttaccaactttagaaaatttatgcaaaaacagaccataaatgcattaaactcgagtagttgggttactgaaagtaccttccatattttgactgttcttcacacttgtaccaatagcggtatatttaactatttttgtctaacaattttatgtgaattttacaaattttgtttttgcaatttaatgcacgcattaatgtggtttcatttcatgttttttctgtagtttcgaaaaatgttaaaaatcaccagtagtatataacatgaccgccctatcttagaattaagtattcggtctctcaccttagtgcctattgcctaatagaaatgctctggttttaatgcgttatctacagctcttccattagcttttgctgtcttttgaattaaatgggcttattactttattttaaatttttgtttttagcttgagggtggggaattatgcaccattagaagtctatgcatacaattcaaccaatactattatataaatatgtatatttaaaagagtattgttattaggcactattagtagtgtttagtattttctagacgtgtcactttctgattgactagcaatacttactaaaatttattacattaaattatatgggactagatatttagttagactaacaacgatgttgacacgtaaaaaagtgctaagcaccactagtgctctttagtatttctttatttaatatatatgagtcgaagttatgttttagaacattattattaagcactagtagtgttgttttataattggtcaatgatattctatacaagtattatattgaattatatgggatttcttatttaattataccaataacgatatcacattttaaaaagtgccatgtgactgtcttttttagcattttttttaatgttttaatactgtttattacttgtttttttatatgttgcttaaaaagaaataaattggaataaactacataatagtgggtattagattatgcaatatcttggcatattgctgtagattctacaaggataaaccattgttaatttgttcaatgataatatactatgtggcataatataatatacttgtaagtgactttattttatttattttgtccataccataatgcaaacaagatttcgtgtttagtgtgaagaaaacaattgcattgcatacatacaaattcccgttgacatatatgactgcctcttggattagaagaaagaagcttctctgattcagtagcacttccacatttttatattcttacaagtaagccgcccaattgaaaaggaatgcatcttgctcgatttatgttacattttattcaatttaatgtaaaaagtgggttataaaatttatgtataaatcgtccaattgaaaggaaaatgataacccgttcaaagggttggtccgttcaccactaatattttaaaaaagacaaataaatttttatattttaattaattgtaataataagattaatatatatagtttaaatttgaaattaaaaataattatcatgaaataaacataatagttttagcgcatatatatatactaggtaggagttacgtgccgaggcacgtaaatgttagttttagataaagtttatttttttttccttcttatttagattgtatgtgaaggtat

SEQ ID NO: 243646 - DNA, 2872 bp, Cannabis indica
taacctagattctaattctcaactctgatcggagaagaggagttccgttctgttgcgggatcggtgaacattggttggataaacaatcgtcaatttactcaaagtcaaaggtatgaatttggggcgcttctaatgaggattggttccggaactttaggtctctgattcgttgtaatgttttttctttcaattttgtagataaatttccaattacgcgtggaattcgctcaaaaaagaaagtatcaacagagagagatggaagacgatggtagcagcggaagtagcagtaacttggacactaacaagtcagagagggcggtttggctgatgaagtgtccggtggtggtggccaaaacatggcagtctcaccctccctccgatcctcaccctcttgccaaagtcgtactctctctcgatcctcttcaatccgatgatccttcttctctccaggtagaaaattagggctttgatgctcccttattaaaagtttcttttttaagtaaacatagtaaataaaaaacgaaacttttaaaatttaggcttgtaatttgttttcagtttacaatggaaatggctggtgctgagtctggaaataagcccaaaagttattctttgaatatgtttaaggactttgttcctatgtgtgttttctccgagacaagtcaaggtatttcgctagtttttatttgtttttgatgaaccgtcaattgatattagttgttttctctagtgtgatgttgatgatgatgatttggtaaggagggaagataagaatttttgattaggtgtgtaattagctgaaaagaatggtgttagaagcaattagtttctactaagagtaattatgaccaagttcttgatcgttttctctcttgtgtgagaatagcattacatgccactttagtggctatatactactgtatctgatgccttagtcaatctacagcaactaacatatcctctttttcactgcatattaatataacttagatacaacattttgaggctgtgtttatatttaaaagttttattgctccattccaccattttcttgtgcctctttaaaccgtcacctacttttatattcaattttaggtggtaaggttgcagtagctggaaaagtggaacacaagtttgacatgaagcctcacggcgaaaaccttgaagagtatggcaaattatgtcgtgagaggacgaataagtccatgattagaaatagacaaatacaggtaacttcgcttaactttcaatttgttttgctgctactaatatttcactatggcttgtgacaattatgttttcttctatttcaacaaaggtgattgacaatgatcgtggagtgcatatgagacccatgcctgggatgattggctttattacatctaattccaaggtatgtcccaaactgataatgttgctttccatctatgctgcatttgcttaatttgtcattgtagttagtattggatatagaataaacctttcaacgtttccttgggcaacccttgctgagattggccaaccaatcagctctattagtttcagggttatacgagctggtgtggcgtagatataagatgataattatattgcttaatatatcccatgctttcaaggaataggggcatgatattttcaattcacttaacatgtattacaggataaaaagagaacagctccagtgaaacaatcagaaatgaaaagaactagaagagatcgtggggaactggaagatataatgttcaagttatttgaaagacaaccaaactgggctttgaagcagcttgttcaagagactgatcaacctgcggtatgtttgttgataatgatttgcgtatttaatattttggggttatttcttcatcatgtcaaatacagtattaaagtttagttttgatccaaaaggggttcaggactatgctgttaatgcaacccaataaaagttagtctaatcaattgttttccttttgttttgtacagcaatttttgaaagagatactaaatgagctgtgtgtgtacaataaaaggggaactaaccaaggaacttatgagcttaagccagaatacaagaaatccgttgaggattcaaatgccgaatgagttaatttattttatatgtacgttttaataactagccatcttaccttgggacgaaagagtgtgggaaacgaacctacatgttaggttatggttataaatgaaccaaaaaaaggaagggaggaaccccatgttggtttttacatccacaatattaagttataactctgtaacataggttgtatatctgagttggtttttacattcgtattattaagttatctctgtaactgtagggttactggtttgtaaacttcattatgaaatcttcaagattattttattaactatcattatcggtagggatatttgtgacagaggtatataagttcttagtatttaagcacttttgttatttttagagtgaagtgcattccatttatgttttagtgccagcttattgttcaaactgtttaagtcttttattttttttacgtataaggtaaaaagtatccaattaaatgaatattttgtgaccaaatcatagagatgtttgtggtgaaagtatttagttaaaatggtattatttttatttatttatgtttcggtatcaattcaagttttacattaaaagaattcttgaatataagtgttctacatagataggtgttcaaaaataaaattgtgcgggttcggtcttaaaacggacaatatgataaggtattaattcaaggggagcttagtgtatcaaaatatttaaggcttgtttcgaaagccatgtgagtaattgaagacaattgtacacagtaatttggaaaatttaattacgttttct

SEQ ID NO: 243647 - DNA, 5096 bp, Cannabis indica
ggtaaaataatttctaacaaagctaaggatgagcggcagtgagctcaagcaaacggagattgtacatgttagggtgattagacctagagcgtacaaactttaggacaataggttgtatttttaatggtcgctaggcgacaacttttgtattatatgttttgtatgatgattatcgttattttaaatacaggatcacgattatgtataagatatttattttcacttaaagagtaattaaataaaagttttaataaatcataatttccaataaacacgttgatttgtaacggattgcacaattaaaataaaatcatgataacacgcccaaaccagtaaggtgttacatctttagcattcccttgactatgtttatagtggaggttcctcttgttagtctcctcagttttataccagagggagaccttcataatcttgttggattcacaatggaggaggccttcaccatcttttcagctttacaatagaggatgccttcatcatctccttggatttacaatggagaaggcctttgtcatctccttgactttatagtagaggaggccttcatcatctccttagctttacaatagaggaggtcttcatcatctccttggctttatagtggaagaggtaactgttagcaaaatgttgtagaagtcactagcctttctttgatcaattgagaatgagaccaactccttaattaatatgtctaagattggggtaatatcttccccttcttgggcgcacctagaagtgattacaggtgcagtctccatttattccttggtcttaaccatagaggtctttgtcatcccttcgcctgtacagcgaaagaggccttcatcatcccctcgtttgtctctacagcagaggaagtcttattcttcccctcggctgctagcgcagtggaggaggtcttcttggcaaatgtcaacgatgtgttgtaacattggcatgctaaggagacggtcgataccagctgttgtcgtgaacttaacaaataggcggtagatagaagagatggcttgaagattatagagtgttgaaattttgaggagatttggtgtcaatcactataaaggtagtcagagtgcttttctaccatgggattattttgactgtttgtggtaatctaatttcaccacaggaagcgatgttggctctactaaaaccatccataagttacttgcatgaccttagatgcttgtaggggtaagcccattctttctagggtcttgtttgaataggatgttcgatgatgcttcatcgttaatcatcacattttccacctttataaaatctcactaatgagcgggtcattatttggttgatctaagatgcgatcaatgcctgatgttgttaggaactagagatgcaggcgaaaagctaaatggctggcttaaaggctaccttaatttttatgttgttgccccaacgtcaatttcttagtgaatggagataagctttgaagattgtttgttgaagctatcagctactagcgagagagaccactatcgaggtgcagtgggttattgtttgtgcatttcgttattatcataagtgagatgaatcattatcaaagagtagagtggaaaaaccctccagatcttttttataaggacaaaatcaaaggttgttgaaaaaccttgcttgataatttcaactcatagaaccttgttaaaggtttaacagaaaaaagtccaagggaggaaggaaaaaaaagatagattagattaaactcgtgctaagtacaacgtactatacttaggaggagtttagccactaagaaaaataccacaactggggtagcgccccattgccagaatattttcttcaatcaattggaaagtctctagttggatgcagcgtcctgcctctagagtgttttctataattgatgatgcttttcttttctttttgatttttgtgatcttaggaggaacactaacactttagatttataactcattcattatattcttgtgtgacctgaagtgtttatatatcaattcataatagtgcttaactctagtgtgcaaatagtttgtatgtctggttgatcaacttaatgaagttaccagcactcgcactagtaattcaagattaagaaacttggttattggggataacgtcaacatttcatgaaaccatagaaattctaactcaggtgtgcaaatttttttttgaattcccttatactccttgctcccgtatactagggtaacacctggctctcatataccaaagtacatgtgcctcccaagtgatcaaataaatgccttcattggtcaccttccataacaaatcttgttaggctttcatgatcatgaatcttgaagtgttattacatgttgaggattcaaccactcatcatgagattcgtggcttggcagtgtttacttactatagaaataactaaagttacctcaagaccaactctaataaactttactcaatgcttggtagcgtcgtaaagtctataagctctaatgattaataacaatgcaataccaacaagctttacttgatgattttattcattagattttgaatgcaattacataggttgagggggttccgcacctctagctaatttggataaaattgaaacaacacttgtaggtttacaattatatcaaagaagctaagttgatccccactacatctatgctctgttcaactaacagtgcaggggccataacatggtgatggaccccttagcttacaaatgactttgctgcatcttttcggctcaacaagagagtgattcacttgcacaaggtaaagtgaatctcactgtgaagtaaattgtctagaaaaaagtttctttattagtaatatcatcttaaacactccatgttccaatacgttggtaccaacactggattcaagtggcagtcatagatggctcaatcttgtttgtcatgggttctaacacttctataaagatatatggtccctccctctctcattgggagtctttagtgtcactttctaggtcaatatatttagaggactcataggacacatcttcactactgcttctctaatcctgatcactgtttggaaatagaggaagaatcttcgtcactgcccctatcccaagttatcttgggaagttgagggagatttttcatcaattctctttaacttgatgtcatatcaagaaatagcaggggactcatcatcattatctccctgctcgagttcaacaaaagaggagtccgttttagtggagcattcagtgttgattcttcttcactttcttgacaaatgtttattcgagactcaaataatagataggtagtgtaattggttgtttttggttgatcaactcctctgaccttttcgagagcttctttgagcttgataaaattgtcaactttgtccaaaaactcttaaatggtgtgcaatgatttaagtttcatgtctttccataattgactcataattgttagtctagcacccattgccatgaccttagcatcttcattgaatatctttgtctatgttgttgcctctaataatctttgtaagtaatcttttagaggctcatcttcttgctgcttgatgtagactaaattgttgggctcgatcggtctgtgtcttgatggggagaattgatcatagaatgcttgcttaagtgtgtcccaagagttgatagatctcgtggaaagcttaagacactaaaggaatagtggttcaatgctacgccaaccaaaatttaatcaaactttgtggactatactaagataaaattcaagtcgaaagacattttacctaatgtatctaagtaagaattctataatagtgtgtatttagtcaatcaaagtgggagaaatgttatattttgatataatatttttgattgattactaaagagataatatttaatctagtggggattgttatataatttataaataatataatatatcgattaaatatatgtaacaaactaataagtatgtgtattacaatctatatttgctgtcatcattttgtaacatacggtggaactacttgttactatgaataacctccacaattatcacaaatattaagtgtgtaaaaaggtgttgcacattttaatttcaaattcttaaaagctatagagttatagttgttggataatgagttttatactcatttattgagtccataacatccatgggaggttatgagttagaatttcaaatggggatatcgtacattatttaaagaggtctaaggtgctcatattgtgacaactaagattgtataaaccaagtacttttctagtaaccctaaaaggcttgatcattcccaaagctatttctatgagagatcttttagtgcttagagatagggaaaatattctttttgacaaaagtttaataccttgttaaagtcatggtaatctccagtaatctatacttaagattgtgagtgaatgtatagatatatatatctttttcttcatattatattgtatatgttgtatattacatgtattgcaattcatatcttctacctttcttatatataatatatatagtgtatatacaatgtatatatttgttgtaatatttatataatcaatctcttactttagttcttgtattattttttataattgagtaacaaggcattctcactctttgacagctctgataattcaattaagaattatacaaaaaaaatttctcttagacttttcttattttaaattgtctttttgtttgagggaatgaagaatttgatggtaagtcaactcttcatttcctaaattttaaatgtctatatttaatattcatttacaccaacaataaatgtatgtggtggtatattttttaaattatatagtagtatttcttatacttgaaaaaaatatatgtaatttttaatttacatctcgaagataaaaaaaataaaataaaatgtacatttataacttcaattaagaaatgtgtaagttttttttttcttgtctttgtctttatattttggttttttttttttgtagttgatgaagaatttaataaaaagtcaattctccccccccaccccaaccaaacaacctaaacgaaaaagaaaagaaagtaagcaacgac

SEQ ID NO: 243648 - DNA, 2093 bp, Cannabis indica
atagattgccattagaaaaatgctccagcaacttagtaaagtaaattgcttgcactagagtaagtaaattaccaggcataccacaagccaaagtaaattgtgagactttgtgtagaaaaaatgttatggaacgtgtgcgtatttcttctggtcttgatgggttactttcgattgatgctatcagtcgaagtggtggtatagtttttttagggcattattaggatgatgttagtttgttgggcgtatagttttaatcatattgaagtcaaaattgattctcaatatagtaattcatgaatgttaactagattttatagagagcctaataggaatttaaagtctcactcttgggttcagttataaatattggcgggacagaatgttttaccttggtatgttactggtgatttaaaaaatatgttatcagaggatgataagagaggtaggaattcttacctgacctggcttaatgatggattttgacatgttcttggtatgtgtggtttatttgatttggagttaactagtcatccgttcacttgggaaaaaggtcgaggtattattcagtgggatgaggtttaccttgatcgtgctcttgtttctaatacttggatttaaatttttcctgtagctaagctttttaatcgtgatctctcttcttatgatcatttctagctattttgaaagaggaagttaagacaactctctttcaaatgtatcctgataaatctccatgtatggatggaataatacctagcttttatataaaaaaaattatgagaatattgggggcggtgatgtttttaagcaggttagatctttctttttgtttggttacctacctactggactgaatcatacaaatcttgttcttattttgaagaagaaaattttgtgcaaatgagtgatcaacgaccaattgatttatgtaatgtgttgtacaaggtctattctaaggttcttgccaatcatttaaaagttgtgatcccatttgttatctacagaaaatcagagcacttttattcgagatcacttaaatttctgataatattataattttctttgaagttggattacttgaaaagaaaacatgttagaaagaggaggtgtatggctttgaaacaggatacactacaattaaagttcaaaatccaatccgatccaattcaattattaattagatttaatcggtttattaattggatatctaactacacacctaaattttaataccaacttaaaaatatgaagaaaaatatgtataaactaaatatcagcctttatttaaatttaatttaatactctataaatatacaatcgttacaattaaaatgtaactaaaagtttaaaataattaaaacaacaacattgctaagtaatattatagaacaaaacattatgaaaataaatacacaaaacaatgtgttacaaattcaaaacataaaaaatctaataaaaatataattaatatatatatatattatattttttattatataaattattttttaatatatatataaatgtaattggattgaatctgtttttaattggattttgagattcacattcaataactaatccaagccaattaaaatctaacttttaacatccaatttaattttaattaaatatctaattttttttgaaatatctaactttttataatttaattaaattgaatcggttcagtataattaaattaaattgaattatacccaatcctacctcaactcatcttgtacctatttaagttttttttttttttttttttttgtcctcataatatgtgtttattttattttacgctttcaactttgtggtctcttctcttttgacaagaaaagaaaaggctgccttcgagaatcgagaccatactaaattttatttatgttattttttaaaatgtttattttattcttctctgcatggataaataatgaaagtaatattattataatttttattaaaattcatttattttcacttataaattaataagctacgcggtattctgtcatgtcccacgtgtgagcgcctactgtccaccgtccacgtggcatgcatgcagaatcagatagatgtgtactgac

SEQ ID NO: 243649 - DNA, 1978 bp, Cannabis indica
tggtctgtagggtcagtcatcagtccaacaagcagtcagagtggcatactcgtgtataagagtcattattccgtgggtgtaaggacccaatggaggcttgaagcggggacgttacaagcaatgtggataaatgcatatgtaacagttcaaaaaaagcttcaaaaattgaaacttacatgctaaagaaactgcaaaaagtgttgaacccaccgtacgccactaatacttcgcttgacaacgacagaggaaaagcaaaaggtagttcaaaaagtttggaattttcgcaaattttggaaaagctctaaaagaaaaaacaatgagtaggtgaaaattttgaaaggaaaaagacacaggcttttatagacattatgggttgaatattgatcggcgaccatctgacgatcaggattcaagctgtcaaaatacccttgatccaaggactaggacaacctagcagataaatatggtaaaaagggtggttgcaatactcgagtattttcctgacagtttgccattaataaagctgtcaatcgaataggtgggaattaaatcgcttttgccaaaaatgacgaaagcgattatgaataataaatgacccacacgtgtgctggatgaagtccgatgatgtcatttctagaggcaggtagaaagtttaattttacaaaggtgcaaaataagacttggggggcaaatgttgccctgaatttctcccaacacatgtggaaagtcaggagtaagccatgtggaatgaaagcctaagcatcgggagtgattatggtaaacctcttgagaaaattattggggactcattgtccaagtttgggaatcccttacaggagctcaagtcatattttgccagcctagggaatcaagcccacctcgaggagctagataaaatgcacaggtccggtcgctaggtcccagacgtgagtcaatatggatgcattaaatgcggcatggagaaaacatctacgagtggtcttggaaagacgtgtcaaaacctttaaacccattcttctgctattatacactgccccatgttccttatgacatctgcataatgaactatcgaattgatcaacaagagttaaggacctatctaaccaaacacctaaacaaagcctacgtatcctacaaaacagacaaacatgccttattaacccaatttgggaacttgtgcaagtaattctcctacagttatgacaatggtaaccttttcaccatctttatgaggctataaataccctaactacattctgagaaaggggtcagaaaaaatagtgtaaacactcatttgtaaagaactactatatttatatcagtgattcctagactagggcttttttaatgcctacaccacgtaaaaatcactcgtattaactctcttctaatcattaaaacaactctacttaatagttgtcaaaaatatcagtcaacacaagtcatttaaaccaattaaataatatgttttattaaaattattaccttaattggtaaaaatctattaataagttaactataattaatttacaaccttggactaattaacaagttaactatagttaatttagattttacaaatttgttaattaatataataaaacaaaattgtaacatggagattggggtggcatgtgtaggctcgcctcctcaaccatgagaaaatccttcttgctcttccctccatctacaagctagtttgcattcttggtaaaccccgagtcacccaaaagatcgctctttagttctccctttgagacttgcgaatctactccaaacactacttccacaacctccatatcacaaataatcgcctttaatggagttgtattctctatctcagtggaagaatctttaaagcaagatttttttgtaccacttgcctttgagctatcattaatcccaagcccatccatccaagtgttgggaatattttactaggatctagatatactaacaagtatgtttcattaacatc

SEQ ID NO: 243650 - DNA, 1718 bp, Cannabis indica
tatatatatataaagaagagagagatcatcaaagattacagatacagtggttgattgaggttaaagaattctaaagctctgcttaagagatctcgaatccccaactctcatcccatgttgcaatggatgggatttggttgcttggttttatctttcccaaaagcagagccatgccaaccatgaaccaactcttccctctctataatataatatataatatttattttaattaattttaacatttttaactttttatactcatttatatttttttatatgacaccaatcaataggaacctcctatcgaaagggtacaccttaacatgtgtcagtttcccatttgtcaagttctttggcattctcataatccaaaatgttttctttaaaaactatgtggtactggtaaggaatctaattctccctttttattttattttatttagtttttttccccctaataaggtagtaggttttatatttgttgttgtcttcttctttggactgtccttctttgaaggttttttgttcatggtttatatatattatataaatattcacattcacacagaaatgataatgatattaaattcctttattgttacttacataaagaagaagaagagtgataataaataaatatatgtaatttctgatatatttttttccccttaaaaatgtaacccaatcaacacaaattacctctttaattgggcaattttctattgccccctggttaaataagtacatagggtttgtataaaagtagagagtgtgtgagagagattccattattctaaagcctaggtcattgtgattgcaagtcccaatgccaactaataatgacatgagagaaagaaagaaagggacagtccaatggtataaagtagtaaataaatattgcaagtctgcagatttttattatttaatatatgtagccttatttttttaattgttcatggatgacccttttggtaaaaccttgttcatgaagtgttcctaattcatggttcaacactgggaatgtgattaaattatcccacccctctgatttaattgccattatttttctgggtgttactactgcagagtggtgggagaagaataaaaaatgtccaacaatttgggttcacatttagcaaaattaatgaaaattttatatgagttgactgacaatgtaattcaatttttatgacagaacaatttcattggtgaaaattatgtagagggtaaattatactgactagtcaatgactatccatcaagtacttgtgtgatcttgaatcgttttgcttttttttttacttgattagcttatttttatttctttctctcagatgtaactatacttgagcactggattcattgtttgattcacaagttttcccataaataaaaaagtcctgcaaatgtaatattgtttttcttttagaaataaaataaaaataagaataaatcttaaaataacgaagagtgataccgtcaacctcttattacaatctcttagtcaatcttcacggtcaaaaacacatatcgatatattttttttcaaatttttttctcacagtggtgttcgttatgcttacaacatcatccttataaatttttaaactaatttcaaatagtttacagtgtcgaaaatacgtttgaaattttttgtaacgagagtggtaaactaaaatattaggaactctattttcagcactgtaaattattcgaaa

SEQ ID NO: 243651 - DNA, 1967 bp, Cannabis indica
ataggttaggaagaaccaaagaaagagagtgacgatgacatgggtttctagtttgtttgattagcaggtcctttcagtgtgtgatgcagttgcttttgcttattttttagtttactttttttgggtttatttacctttttttttctttttgttttaggagtttatctttattcataataaatataagtgttcgctctgagcgaattgttcagggtcttgttaatttcaacatctttagttcttaagattttcccatcaagcttcttggttaggcatctgatttgctgtcatcaagtatgaggtttaaggccttcttgggtaccttcttagcaattgttataattttccattcctcaaatgttgtaggaaatactgaagggttaggtggggagtctagttttttaatttttatacaataataaaagaaacagtaatatgacatggttacactgtacacgtaataattttattaacatttttaaaagtaatctacggttttttcctccacgttttggttgatagtttctatttttcattcatccaccagaatggttctctgttaaagaagtacacatatttgggtactgaaagtagttactcagtatcatttgaggatggagtagatatcgtgttgctggacagttccttatctgatgatgacaagaagaatctggagtatacacacgaatcaccagatgccacagagttagaatctctttctcaaggcaatctgaatagaattccaagtttcacatttgaaacccaggtacttatgcatcatgctatattgtgtattttgcatttttgccttgttttgataattctttgcaaaatggcccgtctcttaaaaaaatgattttcatgttatttgaaaagcttattgtaatcttaattagccggccaatttatgtttaggttgtttctcctgagtttaccttctatgacggtacaaaatcttctgtgaatgactcatcatttggggaaaagcttcttcgtgcaaaactggacttaagctttatgtaagagtttatggttttcctgttatgttgtttgtagatactttcctaaagttttcttttagcttttcactaactcctagtcctaccacctaagaacaatcaagtaatgggaatcctttataaaattccataaaatcagaaacccacaaaagggctaatgacttagcctctttttaaatatgtagctgactttctttccattacaatatttagatgaaacacttcacatcagttaggcacctagtttggataatactatcttcataaatatctacatatataaatattcacaaataattatatgacttcttaatttacacaggtatgcatcaaaagaaaatgatacgtggattcgagccttagtgaaggatcttacagttgaggctggatctggtctaatcgttctttatccagtggatatttcagggggatacacttctgtgaaggagaaaacaaatatgtctctgacatcaaccaatatatgcatccatctttcgcttagtgttatttctcttatgctcaatttgcaaaagcaggcatttgcagcattgcagtttggaaacattatacccttggctacatgtacaaactttgatcgtatctgggtgtcccctaaaggtttttgtaacattctttccttgtcatttttttattatcaatcatcagtgaattttgatgttattttttagttttgttctgcatactatttattcggttttatttgagtctgcttttttatacattatgcagaaaatgggcctggttacaaccttaccttttggaggcctcgagctccatcaaattatgtcatattgggagattgtgtgacgtcaaggtaccatagcattcattcaatagattgcaatataagaatcccctacattttcagaaagagaaaaaaaaatgcaggagatgataacatatcgtgcatgttgtagaccaacttat

SEQ ID NO: 243652 - DNA, 3524 bp, Cannabis indica
cccatttctcttatgtcttaatctcctaaacttcctaacctaatccagattcatccactgtccctggatctgcaccttcggtttccatccgatggacatcctcttcgctcagatccaagcggaccttcgctccaacgacgctctccgtcagaccggagcgctcctccaagctctgcaacattcggccgccggtcgagacatctccgttctcgccaagtccgccgtcgaggagatcgttgcttcgcctgcttccgctgtatgtaagaaactcgcatttgaccttattcggtcaacgcgtctcactgctgatctttgggatactgtatgtactggaatccgtaatgattttgaattccccgaccctgatgtcactgctgcggctctctccatcctcgctgccattccttcgtatcgtttgtcgaagcttattactgactcgaacaaggagatcagcagttgttttgattcgccgagtgataaccttcgattctccattaccgagaccttgggttgcatcctcgcacgtgatgatctcgtgacgctttgtgagaacaatgtcaatttgcttgataaagtgtccaactggtggtctcgtatcggacagaatatgcttgatcgatctgacgctgtttcaaaggtggcgtttgaatcggtggggaggttgtttcaggagttcgattcgaagcgaatgagtagattggccggtgacaagttagtggatagtgagaactcggttgctattaggtccaattgggtatcgtcaatggtggactttgtttggaagaagcggaacgctttgatggcgaggtcactagttatgccggtggagagtttcagggccacagtgtttccgatagtgtatgctgtcaaggctgttgcttcgggctcagttgaggttataaggaagctatcgaaatcctcaggtggtaccaatgggacggttgtggattccaatgcagagaggttggttggagtttcagacgtggtttcgcatttggtgccatttttggcgtcgtcgttggagccgtctttgattttcgaagttggtattaacatgttgtacttagctgatgttgctggagggaaacccgagtgggcttcacaatccattattgctattctcacgctctgggatagacaagagttctcttcggccagggaaagtattgtcagggctgtagttacgaatctgcatcttctggatcttcatatgcaggtattcttactgtttttcatcttttacttttcaattcgaagaaacagtttggctttcatgtatttcatagatgtagacgcaggatcctgatgacagtataattcacgtgtgttactataaaaggaatttatatcaagggatagtagtagcattgttttactgttgcttttaatttcaaatgtgaaaatagttgagcttaattggttgtcttgtagatgattcgaaaaaaaattatgtttttaggaggattacataattgggatagtaaaatatattattatttatttgaaaatatctgatatattaaatttcggggttttagatttcgttgtttaagaggctgctgctgatggtaagaaacttgagggcagaatcagaccggatgcatgctttagcatgtatttgtcggacggctctttgcgttgatctgtttgcaaaggaaagtgtgcgaagaggtcagaaacctctgcctggaactgacattgcttctctttttgaggatgttagaataagagacgatcttaatagtgtaacaagtaaaagcttatttagagaggaattagttgcgtctttggttgaaagttgttttcagctgtctttacctttgcctgaacaaaagaacactggtatggaaagtagggtcattggagcgttggcatatggaactggttatggcgcattaaattggacagagccttctttggaagtagtagaagtttgtcggccttgtgtcaaatgggattgtgatgggcgaacttatgcacttgattgctacttaaagttgcttgttaggctgtgccaaatatatgatacaaggggaggtgttaaaagagttaaagatggggcttctcaagatcaaattctaaatgagacaaggttgcaaaacttgcaacgtgagcttgtgaaagatttacgtgaggtattgcatttatgaagttgtaaatactttatacagatactttgcttcggttatgcattaattaggcttataatttatgtctgtttggcagattaataccgcaaggatatgtgcccgtgttatatgggctgtttcagaacacatagatctagaagggctggatccgcttttggctgatgatcctgaggatcctctgaatatcattatatcaaatatccacaaggttttattcaacgtggattcatctgcagatacaacaaataggcttcaagatgttcaggcagctcttttatgtgcccagaggttgggatctcgctatgcaagggccggactattactgactaaagaacttgaagaatttaggaccagtacaatggctgattctgtcaacaagcatcagtgtcgtttgatactgcagagaatcaaatatgctactagccattcagaaagcaagtgagcacttctaattttaatctatctatggattcaaacaacatcattgttttacaagtaaagttccatcttgctgctaaattatggccatgctgtctgagcaactcacttggttatgctgtttaccatgcctttaactcatttttattgaaacaaatagaaattacacttggggaattcgcctactgaacttattacattgttttttcaggtgggccggagtaagtgaggccagaggtgattatccatttagccaccataaattaactgttcaattttatgaagcagctgctgctcaggatagaaagttggaagggctggttcacaatgctattgtagagctttggaggcccgatccgagtgagctaactcttttgttgacaaagggagctgactctacgctacttaaggtgcctcctactgcagttactttgactggtagcagtgatccctgctttgtggaagcatatcatttagctgactctggtgatggaagggtcacattgcatttgaaggtaaactttgccccttagctgctgtagatgcaaaagtctacgtttatttatcacgtaaaatgcgctccttgtaccttagctgctgtgttggattaataatatgcatttataacaattcaattcatcttgaatgaaaagattatcaatttctttaaatttgttctcttgtaatgtaagtttgggcggtcctctgtagttctaagtcttacaccccctaatatatgtgaattcaaaaatataaatagaatgccttcttgttatgtttgacagaactttttgttcggttttttaaaattttctacgtgtagaattgtatcaattaaaattttatttagtatagtagtgattattttattttattttatctttttaaataataaagccatgagattttgtagaaaaatttttggacagaggatgt

SEQ ID NO: 243653 - DNA, 2926 bp, Cannabis indica
tttttatattttttttaagatatatccatttttatagatgatgtctcattatatcctttaagttaatgaaaattatatgctagatttaagtgaaaggtaatgttacattgggtaacttactcacaaaaatgggtatattttaatgagatataaaatgacagtatttttgattcacagatataaaagagaaatatttcttaacttatctcataacaatatgaactaacctacgggcaaaaaaaataaatatgaaagatgaataaagttataaatctaacataattaagtgaaaaagacttttaaatattatattaaatgtaatttcctaataataaaagggtaaatatcattttggactttgtgttttataaaagttacaaattgaagcctctgttttgttaaatgacaaaatagattctgtattttctaaaagtgaacctgaactaataattttttatcaaaataaaattttgtaataatctgatctagagattttaggataaaactggttatattttctgtatgagttcgtattagaaattgtcttaaaattggttatattaaaaaataaaattgttgaaaagttgagctcaagatcctatttttaatattttggaaaatatagagtctattttgttatttaagatagttcaactagtaacttttacagatccaaaataatatttacccgtaataaaatctctagccaacataaattaatctctttatgtactaccgatttattgcatgctcccaagcccaatacatacttttgggtcactaaaaaaaagtgtactatttggattaatatttgattattttttgcttctcctcttaataattaattaaacatctgtctgtcccccttaaataaggcttttatttatttgtactttcagagtggcatacatttttaaagactgctaattaaacccccgccccatcacaattaagattaacacgtataattaataattgtattaattttcttttacctttctaaaaaataaaagtaaaatcgaactcaaatatctcaactttgtgtaataacataaaaaacggctaagtgttatgtttaattaattcaagagaattgttaaaaagcattaatttatggatgcctagcacttttctcattatatcaatattgatgtaattaagtgttagatctcatataacttaagaaaatatttttttagggaatatcgctaagagaaatgttaaaggccgttggtggtgcctaacaccctcctatgtattaatttctattgtctaactaaatatcgagtcccatataacttaatgcaataacttttagggagtaccgtaactaatcacaagacgacatatttagaaaatattaggcactactgatacctaataacaatgttttatcgctaactaatcataaaacaccacctataaaaagtattggacactattaaccctcaataacaatgctctcaaatcaaagcaaagcattgagaaaaatctatcgtcatgaaagtgatgtaagcttaacttaaacctaattatcgcccaatacacattagtggtccacctactattttggctccaacaaagccaaaaaggaccagcactttttcttgccctcttgcacttggcttacttatatattaatattaataatatatttattatacagttcttgtaacttgtccatggtcaatatacaatagagattataaaatatataactttactctaatatatatattttctataaataaacctaaccatgcatgacagctaacaaaaagcaaaacacgcaaaataaagaagacaattatggacgtgattatagatattttaatatttgcctttttatccaaacacatattgaaaattattctaaaaaaattgacaaaactttatgatcaaaatactaattaagttaattactctttagaaccggcaagtaatcgtgtgtggctgtacctacgtacgtacgtacacgacactacaaaaacaatatgtagtgtataatttagactgaaattgttgaatttgtgagtaaaaatctggattaaatcaaaaagtccttataagttagtttaattgagtaacaaattcgaataagtatattttaaaatggattaattacgtgcagataattgaaagaagggaaagattgaaaaagaagtcttcaatttgtttttgaatgacttttatataaaaagtcaaatcgtatagtttttcaccaactttgaattttatctattcccacgttttttttagaaatattcaaatgtaatattgtgactagtattctcggtatcatactattaattaaataagtattgggtctcatataatttaaaaaaataaatctcaaataatatcgttaaccaatcgtaaaacgccacgtataaaaagtactaagaaccactgttcccaaaaattaagatctttgttaaaaagtagtgtccatttaatgtgttaaaccaatctaagtttgacacgtcaattaaataaaaaattaaacctttaactgaatcaataaaaatagttagtatatttaatataaattaaaggggaattaactcatatactgtttttttaattttatttttttaaatttacagtttgagtttctaaagtggttgcagcgctaattgcaataagagtttctatacgatatttttttgcgatttagattgcagcactagttgcaataggggtttccacataaaatttcgtaaaaatacaaaaaaaaatatttagaagtataaaaataaaaaaccctaaattaaattaattaacatgttaaatttaaattggtttaatatataacaatgctctcttttttttttttccatcttatcatttgcaaaatacgccaattttttcaactctatcttttgtttctcgtcaaacattcttcatcagttccataacatcaagt

SEQ ID NO: 243654 - DNA, 2416 bp, Cannabis indica
attttttttttttggaaaatgtactttttatatatctatttatatataagtatccttttcacgtgcttctactataaacagaaaaatcttaatgggccacgtgtaaaactttagctttggtgtcatctacttacaaacaaaaaaaataagattgaaaaataatgtgtttatgtgccacatgtaagaaatagtgcaagttgcttgtttcctattgtcatgcagtggcaacacagctcacaacacaactcatttgtaatatatctccatgtatatccaagtgtcactgcattatttttttgagttttattttttgttctgtcttaacttgcaagtaacaggatttttataaaagcaagtatacattaaaagttttgcagaaggtgtcatttcgtatacatacttattttcaaccctcactctaatgaataatgtattagaggtactatattcacacatttatctttatttttttttcttcttttgctgtctttgcttttgatttaaatttctgttcttattttaaaattacaaatatatttagtactactcagagagacaatgacgacatgtctaagttgcatttctgtaggagaaaagtgaagaatatacaatttatctgaaatgtttaagatctatgaaaaattataaagtcaaatacaaatatactgaaaacacttttataaaaatactaaatataacaggaactatggacaacacttccacctctgtctatgtaaaaagagtttgtacttaaatgtcacattttaccatcctaaaaaaagcctttttatttgaagataatattagacttttgcaaaaaacctatatagctgaacataatatttaaaggttgacatgtcaagagaactttgcttacaaaagaaacaaagcttaactagctaactttttgtttcttgcttacatagaattgttaatacaacaagtacaaattaagtttatttctttcaacttttgccgtttcataatatgtttgcgcttttctttttttgaaaaacaagcgcaggattaaattataatagttaagtctagatctcctggtcgttacataaaatatttaccagtacagaattgatcgggatcgatctataaacttggtaggtaaaagcccacttagcgacattgtgagccgcaaaattacagttcctactaatattaaaaaaggtacaacacatgaaagatggagaagacttagaacaaaatgagacatagttttctagagcccagtgggatgccttcccattgagagggttgattactagcctcaagtcactctccacaataacataattatacttcaaatctagagctactgataccgccaaacaacaggccgccgcttctccgaccagagcttccgagaaactatatttactttctatttcataatgtataaactatatttttaatgtcaagtatttcttcttattttatatcttattctgcatctcttgataaattgcaggtagattatacttgtatatatattgattgatagtggaatatttaagagaacttgtttcacgtgtgcacctcaatttacctattatagaacattgaattaaaattcaggtgtttggctaaacaaaaataataatgcttccattccttacacattttttattttgtaatgtaattaatgtgagtaggaaaatacaccatatattagtgtgagtaactcacaaacacatttataaattatatatatatatatatttaactatgagaatgattggatagtgattgtttttaattattatttataaatatttttaaagtttttttcttacttgcacttaatttttatgtttaggtaaaattctctaaattataaaacttttaataaatttaaggtttcatatatttttatagttaactactaatttaaattatttatgtgtacactcttatacatatggcacatttatattgatacagataatattattatttaaaaattataatatatattttatttttagaattttatttaattttaaaataaatttcgaaataatttttaaataataatattaggtataccaatataaatgtatcatgtgtacaagagtgtacacataaagtccattgtgacagttaaccggatgactttaaatttgctaatagtttagtagtttggagaatttgtgtttaggtaaaattctccaaattataaaacctttaataaatttaaggtatcatatattttcatagttaactaccaatttaaattatttttgtgtacactcttatacacatgacacatttatattgatacacataatattattatttaaaaattataatatatatattttaaatattttattttataattttatttaattataaaataaatttcgaaataatttttgaataataatattaggtgtaccaa

SEQ ID NO: 243655 - DNA, 2982 bp, Cannabis indica
aattgtaaataaaatttaatttacaaattaaatctaatgtgtgatataaatacattatatttttttgactgaatctataatattatgaaaaataagtagaaatcatttttttgtaaccattttaagagtaagaaagagttgcatagtaaatgaaaataagtgagtgcaaatatatttatttttttcttttcaaaatcatttaaaaagaaaaaacattgtcataaaatttgacatgatttttaagttattgctgtctaaactaatttaatgaaaggctataaatattcttgaaaattaaagttactatcagttaaaaaaattagcaaatataacagtagatcgagccaatgtaataccttgaatcaattatcacaaaaataatcaactgaggtgtaacatcttttgtggtgaaatatgccaagaaaatatattttgtgtacttgctgctaaattcttgttttgcatatgcattcatgtcataaaaaaattctaatatcaatctttttctccaaattatggaaacactgaaacatatgagataaaacaaaatatatatacatctttgctcaaaatgcctcaaatgtgtatacatcttttggactgttagctgaagaagtcctgagattactcctttgaaattggttaccttaatctgcaactgttactttgacacattattgctgtaaagattaggagtaaaattagaaatatagaaaaaaggtatttgataaattagataaattcctttaataactatctattggactaattagggggcatggtattaaagtatagaagccacaccaaaatgattagtaaaacagagatatgtgtgattatagtgaaatataatataattatttttatttgtgttaagagtaaactcaaatatatatatgaacaaaaataatatataaaactttctagagaagaaaaaatgttcacttaattcagctttaaagcataaaatgatttgtgctttagctaataaagttaaactaagttgcaacaataataattgcataaatgattctaaaatcaaaaaaaaaaaaggagggatagagatgaacatggtgaaaactaaatagaaataatttagttgtcaatcaaaaaatatattagcctttcaatcccacgaggccttaatgataccatgtttgaattgaaattgtacaaaaaaaagttaaagcaaccacaaattttcttattttggttatgattatgtatacaactggaatattttgtttataaaatacttcagtctctaatagaaaatacctacaaattgaggacttaagcatgcctgataatgtcattgagaattgatgttgaatggagagacaaggtatacaccatttcgaattcattctgcattttccaataaatttatgagacagcctattaataatatttaataataatattggggtatgacatgcagtaagaatagtggtttataaaatgttctaccttattttagcatttgatgaataaaaaaatcatagcattctataaaaaacatacttgaagaagaacatctattttttcctattcattttgtttctacttggttaagcttaataaatcgcgataaacaatatttttagtgtgttcatagtcagaattgtcattaaaatcaggtcttacaagaatttttacaaacttagctgatgtagttcttgataaagcaacataaagttgaccatgagaaaagataggctcgggcaaatatatttcgacaaaatctaatgtttctccttgagatttatcaattgttattggaaaacataaacgaattggaaattgagttcttttgaatggaaatccattgcattcaccttcgataggagtaaacgggattctgggcaaaaacacactcttccctttgttgcttccactaataatttcagcatcaattaagtttggagtaaacctacaacaaattaatcgtgtaccattacatagaccttcagatagattaatgttacgaagaagtataataggacaattaatctttaataccaattggtgtggaagaaatccacttagtactaagctattatagaaatcttcttcaaatacatgatcatttatatcaactttttcatcaaaactataatatgtagcaacatcaccatggaatttatttataagcatattatttatttcatcaacataatcatttttaggtattaatatgacacgaccaatcatttcactaatattttgataatattgggataagcttggaaacacaatatctatcaagttctctaatgccttgtcttcttcatatggaataatcatagaagatgaaatttgtattttatcattcttatcagttggttctaatccttctccaatgtgtatcaaaaatttacaaaactctggatcaaatttagctcttatattgttagttaatataatcttatgaaatgagggctatagataagacatagcatgacttgcatctataatttcctctttttctcccctttgaataactggtaagacttgtctaaaatctcctcccaaaactacaactattcctccaaatggttctttttctcatttatatcttgtaacattcgatctaaagcttcaattgctcgtcgatgagacataggtgcttcatccgaaattatcaaattcgtatgttgaagcaactttcctaagcttgattgtttactaacattgcatgtgacatctttatctatattaagaggaattttaaaccttgaatgtgttgtccgcccaccggttaatacagatgcagctacaccagatgatgctgttgccagccctatcaaaccttttgacctaacaatagctagaatacatttatataaatgtgtttttcctattcctccaggcccatctacaaaaaatattcctgcttctttagcataaattttattgatgattatatcatatgtatgcttttgttctaaggtaagtgatgatatagacaacaagtctgca

SEQ ID NO: 243656 - DNA, 4931 bp, Cannabis indica
tttgtaaccaatgtgggactattttctactgcccatgttcggctaccaaaccaatccaaaaccaaaaagagtacttccatcctttaaattgtgcaaaggatataagcaataattccattaagaataacaaaagagttctacagaaagataaatacatggaattcatatactccaagatactcgacaggaatgccacaatagtatttcacatccaaaaatgctttatgaatcattcattttcaaaggcactaactaactaactactattgtggatttccccgaagcacttcgacaatctcctcggctcttgattgaatgcctttgacatactcggtaagaatcctctgctggtacgaaccgccctcctgagagagatccagaataaataatttaaggtcaaaactagatgaaaataaaaacataacgagaaagaaaaatatatttgtcaaagtagtgctcactgttcggattaatgtccgctcaattcttttcctaatgactgcatagagttcttcaggtgaaatttcgcctttaccaactgtcattccgtcaatcaaaagcttgttccataattcctcaggagctgcaagacattaaagatctgccagtgagataaagcaacaggttgcttattaaaactatatttttcatagacagattgcagacctttaattatagtctcaaggaactcttcagccttcaaaatttccccacctaaacagagagagtttgttcttttaagcttgttgaatcatacgttaaagtaactacaataaatcttttcccgcgacaatcaaaaaagaaaaactacaacgttaacagctgatcggttgggaggttgcctcatgtcacataaaagtggtccaagctaaatattaaaaatgaccagttttgcaacttctgaaaataactatttttataacatacaaaaagatcagtcataaatataggcataggtccagaatgataattatcctggtttggtaacttattacctttctttgcatagctacgttttgaaagaactttggaagcatagagttgtaaaaccttttgcaacatagcctcaagcccgggtttgtcgccatcttccttggcctgcaaataactaaagaataaataatgttctgacttctatataataaaacaaaaccaatatccacgatttcaaactggggaaaaatgtaaggttaatcttcatcttggaaccgatagaattataaagtgagcaagtttttttatcacaacaatctaactttcatcgaaccagcagaagtataaaaaatggcatttctttctcttttttgaaaataaatatacctgtggcaacattctaaaggcaacattaatgtgttagattaaaagctctttaatctttaggatgaagatcttatagcttcaataaaaagtagggtgaagtattttaggaatcaattaatggactcacttggcgtagttgtgcactaacttcagcaagaaacccttcatccaattgtccttctttctccctttcaattacttcctaatgatcaggaaaaagaagaaaaagaaaattggtatcagaaaacatatccaaatgactgtaataataaggcacttaaacactataaggaaaatatatataatttcactctggatatcatattccaacagacttacaatccagggcaaacgcaaagagcttaaggatcaaatgaaatcgagattgtagatcatatgcatttcaaagtaccatgaaagaccagggaaacaatgaaatttcattaaaagaaaaaactcactttctccatttgtttaagcacctcaggatctctaggaggccatggaatttcctcaccttcaactttttcaactacaggttttaggatatccttaaggacatcagtagatgtttctatcttttcctgaaatgtggagaatgaaataaagaacaaatgagttaaaatactgtcatggacaacaaacagaaagtgctttattttgattttcatttatttttatcaatcaatgtgtatagtgagtggaagatgaagagaaagagagataggtacattggtcttatggacaagtcgatctacaatgctcataacagatacagctaattcttcataatctttctgaaagaacacatcaacaaagcaaagcattgttagagagggcagatactgaacacagatcaaagatagatcaattaaaaactaagttaaaaaccatgccttatcatcctcagatttgcaagtatctgttcttgctgctagtcttatccaaaagccctcattaaatgcaaggacattttcgacgaccagttgtcaaagaaaaaataattcaaataaaataattttgaattcaataaattaaacaaatattatctcagttagaattttctgtttagcaaaaagaaagtaattaaagcgcaatatatgttcataactttgttctaaatatcaatatgtgaatgaaatagaaatagaacacattttttctttctcatgacgcataaactgaaattttcgatatttgttgctactcagttggatatatttttttccattgcagaagcagtatggacagaaatatttgatgatatctcctatgtcttatatatatggactgtcttgccaaaccaaactaagttcagcaactagagtaatgcctttgtaacttcatcactcgacttaacagtcttttcggtcaaataatatagaatgtctaaaagcacaatgcaatgaattatactacttacttcatttggatttgcatctctcaacttatctatcaacctgtccacttctacagtctttttgaaagcttcctcagcatcttgattgactgcacatatcaaagttctcctgtttgattaaattcaaataagcaattttaccatcgattgcgccattaaccagattccatgatagcaaaataattatttaaaatgaaaaatgtcgcagcatatcaaagaaaatatcacatctatagatgcagatcatttataataattgacctttaaaatccaaccaaagcaatcaaacagtaaatcaattccttttttctctaagtgggcatttgaagttgattttaacaaaataaaaggacaagaattccctagtcagatttgagcagaaaaacaattatacaaacaaaacagggaaagatttgagacattttggcctgtgaatgtgaaaattattcctattctcataaacaatatgttttgaaacaaggctatcaaattcagacacatataaatacaaaatacactataaagtaatgcaataaacttgtatgaagtcaaagcatatgtaaatggaaaatacctcatcttaaaatccattaaactggtgaaagaaaatggcttgagtctcctcatcccagaatatccattgctccatctctgaaccagtgagctttgtctcaatgaacaatgaaacacctaacaaatgagccaattgaaattccaaattttgataacaattacagaaatttgaaactcactaaacaaactcctcatctttctacattttccaggcgaacaaacatacataagctgatgtgtgtatgagaagttgaaaaggagtttaccttatataaaaataaaaataaatccaaatgaaacttttagggatggagtgctttgtgaggtttgggccttatatgggcttaaattaataatgggcctctctttatcctttcgaaaattaacagatttttacaaaaatactgaagtttgagtaaaacttaacaattttattatcatacggaataacaagacagaacatttcaaacaacagtagaacaactaaaaaataaccatgaaacaactataaaaacttaacacagtacacaatataaaaaatacacgatatttttaaaagaaaaaaatcaccttacagtaaaaaagtaaaaaaattagaaatttgaatatgtggtgtaaaaaccccaattaacatgagatttttacataaatatctaaaatcgatttttttttttaaatctttacataaagcaacataaaaagaataggtaaaaataataggtagtatttttgtaaaaaaaaatgaatccataaaaagttgataaaactgctgatccgtcctttttggaaatcttttgtcatttttcgatttttacagattggccattaggtaaggttactgctgcagcatgtggtttaaacaaaaaaaaaaaaacaatcgaatatcacaacatacatggtgcgttgctccactatcaatgattcaaaaattataaggaaaggggctgacattaccagagaaattagtgacaacagcattggtttcaggggtagatgtggatggttgcagctgttgagtgagcatggatataatctgttggcattgttcagtagttaactgaggtggatttgaatcaggagtgaagtggaggcttgcatagtgtgaggattggttcgagaggtaaagggtgcagcatccttgcttttacctttgacattggaatctgttgttcttctattgccatagccagggggaatccaatgaggaaatagcatttatcccttagatgtcctggtttttggcatttagaacaggtggggcgcatcttcttgttcttggaagtaaaatttgttgcagggttgctgtcatttgttgtattagtaggtttattgttctttgacgttcttggtgaacaatcatcgaaaaaaccttgtttagaggagggcatggatcaagaagtaacacttgatcacgaacagcatgataggactcattgaggcctttaagaaactgtaatacctgatcatgattgtggtattcttgctgtttaacaacagccacacatgtacaaggaatttttgggcgaagttgagtaatctcatcccaaatagctgttagtttagtgaaataggtactaacagaatcttcaccttgagaaagaaaggtgagattttcatt

SEQ ID NO: 243657 - DNA, 2353 bp, Cannabis indica
ctctctctctctctctatctcctatatttttgctttcttccacttcattaatttgccttatattcacactgtttaactacttaattatacgtactcttaatatttgttatatacattaagtaagtacagctcattttcctactaaatagtacgagatatggtcattggtaactccctatacattgacgaattttccttgttgcttaattaattatgaagtaattaatatattagtgatgaatatcccattaaattcattaattaccacccaaataataactaatactagtggttaggtatactatagctagctaattaaccaagaaaatttagatgcgttacttgtttgtcacattaatttgtatagtatgtagtggggataaaacttgtttattatatatacatattatacaatgtatattatattaattttatagccatcaatggacagtttccgtagaagttgcattgccaaataattgtgatgatgaaacggagggtgcaataataataagtatacacaacttttgtgaagctttttacacggtcaccaaactcggaattctattggctcattattaactccttatccactatgtgctttatattgttataggtataattggtagtaattctttatagattttattaaaataaaatatataagatctcctatagaattataccaatagtgatattacacattataaaaatgttagacactataagtatcatttagtaattttcatataaataagaaaaatattaaatgatatttatagtacctagcattcttttacatgttaatattgttattagtaaagttaagtgtcgagtctaattttatgtaataataattattaaagaaggattgttaactagtaacaaggtaacacgtctagaaaatgttaagcaacacttgtaccgaatactaataccgaataataatgttctataaataacgagcaattatttatatacttttaatttatatgtatatattcacttatatacttatatgtaacattgttattagataccatttcataggtgttggatatttcacaatattgttaaattaaattatatagagttacattactaataatcgatcctatgttaatttggaccttaaacaaaaaaaaaaaaaataaaaaaataacctacggaaaaaaaaaaatgagattgttgagatttcaactctaaacctcttagttattaaactaataaagttataattgagccgcaacacatatttaatattatgggtattattatttattttattattaattatattttaaacttaagataatcagttccttcgtctcgacattgttactattggtacattttaacacttctcaatagatatgattagaggtttttttttttttttttttttttcaactttaccaaatttcactctacatttcatgccgttgggaccactctttatatataggcacgatattattatagatcgatcttgagtgcaactgttgccattttaattagaaaagatcgagtagtgagtactacttaatttatacaagttatattagtaataagttaattagctaggggtaaggataaaaggatttccagccaaccactcatttttatataattacccgattaacttggtttatctttattgaaagaaaatgcatgatcgatgtcgacaagttatgtcatgatgcttaattattataaatcatgcatataattacatatatcagtgatgatatattctctaaacaaaatatattattcttttgagatttcaattgtgcattaaaaaaaccctttaattttagaataatcttcatggcatatgcttagaggagatgtaaatgagagatggaaagtgaaaatgtactttattagtgtgctaaaaaatatataaatttagcacataaaaaattttgtaataaatttaacacaatatttattatgatgtaaaattttcataacaaattattatttattattttttatttacatttatattattttattagtatatttaactatattattaaattataaactaattatatacatgtaaatatatatttttattatttacataatagaattgatgataaaattatttttttaaaataaatcatgcaattttattaataacaatcagctaaaataataacttgcaatttaattgtaatattttcctcattcgatacacgatcagaattaaaattaaaaaaaaagtcaaataattagctgcgtaattcccatatcctttgacaaaaaaactaaaaaataaatcagataaaaaagattgcagcatcacaattaactttaaggacacattgtatttagttccatc

SEQ ID NO: 243658 - DNA, 2693 bp, Cannabis indica
taataataattattattatttggagaaatgagattttattattattcttttagggggacagaataaagtatattatgcattactaattaataatcataattaaggttaagcacaatctcacacatgtgcaccgtccacacgtgtattcattcaaacctttgtcagaactgacaaataaggataaaatggaatcaatttaagttattaaaatgccataaaatcaagatctacaatatatttttaggataatcacatattaaataaataaaattaaagtactaaaccatgtgtttaggtacaatttgcaaattatttttatttttattattttaaattaaattaataataaataaagaggcaattttaattgccgttgaactcgaaaagggtccccagatctaccttacaaatctacattgtcttcttttggtgtttttttaattaaaaaaaataaataaaattatatattaatttataaaataaataatcaatatttattaagctcccctaaccatcattggaaccattaataatatattcattgtatcttgttgtagtgttattctaacgtatgtatttcgttagatcattattagaatgaacggtggagatttgttattactacaataattaatatttatgaaaataacttctcaaaagaataataataatactaataagaacaggtacagtgaacatgcatagtttctaactcttctaacttattattattgctttcgtttgtggttggaattttgtaataattttattaaaagttgtgtaaagttttattcatttataataaataaaaaatagcattattgatttgctaaaataaaaaagttgagtacgtggggatataatttgagagcacatgtatgatctatgttagtttacattatttaattatatatatctatatatttataatattgatagtaattttataataattattacataattaataataataataatttttttaaatattgtagcgaagataataaaggtgctcttgaattgatgtaatatgcatggttgattaatgaaaattttcaattgataagaaaaggtaatatttaatattaatttatattatatttctcttttatattagtgttctatgctcttaattataatcatcaagtacttaataatattaatctaaaaattattattaaatagtattttgatggagctcaaattacaaataatcatcaaattactgtaatttattaaattactgtaattattaaattacctctaataattaatatttattttattacttcgattattgatctagagtaaacaaaatgcattttctaatatgacacaaagtccaatctctatatatttattggtcagataataaaagttagtaatgaatcataatagatcttatggttttttttttaagccactaacattttacaattaaccccatttatacatagaaaccctttgatcatcttatcttataattagttttacatttaaatatatgacaactaattagtatatagcataataattagtctaagttttaagcaaataatttaagagaaaactttataggtgaatattaaattgaataattgataactaagaataataaatcttacttatgaagacaaaaagaaaatattaatagtataagtgtggagcaagaaagaataatgtttagctcattcatgctcccatgttgcaatgttggtgttccccatcacaagttttatttattaatgttgttggtaggtactacactaatacactataatatatatcttatattaactccataatattcattttaggaaaataatgatcaatttatcttttaagaaaaccatcatttcttaaagaacaattaactaattacatattataatttattaaattataataaaattatgggtaattatgggtaattaggaaaattcttttatgtttttaattttttatatttagcacctttatctttttttttttggaaaaatttctttatgtttatttttttagaaatatgaggtttcagcaaaatatcattgctaaataacaactgaagtactactgttttgactttgaagttttactttctttcacatacacacaagtgtacacagtgattatccagttagtatttaacagtgatatttaactaacgccataaaaattaaaaaaaaaattaaaagagtttctccacaaaaaaaaaaaataaaataaaataaagaagagttaagtatataaaaattaagagttttttgtggcttatatatttatttgcacttaatgttaggctatttttagcctatgttttggatctaatttatgtgcgtttttagctgtgttgggacggaattacgcttgttttctatgttttcaggttctttggaataaaagaggtctcgggtgcagaaattcgttaaaagatgtgctgagccgaagaaaacacaatttctgagtaattgtgcacatctggccgcggctaaacacaacctggccgcggctagatttcgaaaatctagaggcttcagtcgccgcggcgatgaagaggctcgccgcggccatttaaaagatacagagagaccccttattttcaattatctcgccgcggcgagaggaagcttagccgcggcgagatcccgtacggaccaggggcattttcgtccatcgaaccctaaatttca

SEQ ID NO: 243659 - DNA, 1351 bp, Cannabis indica
accaaaacttatcacagatatagaaagtagtatttaatggtataaggcatactgactcccccaccatttggcccaatatatcacaggaagatacaaatttatttcacttaggaatttaggcaataattctccaaaatttacagtggcccatatagtatttgaatatctggatcaaaatattaacacattcatctttgcctgttatttagaatctatttcaggggttaattaaattggcagtctgcaaattgcaatataattctggttggggaaaacataacaaatgaatgagaagaaaaacaaacctccattgcatccagctgggagcgatagagatggaaaccgtccatgggaagaacagcagcaacatctggagggttaacttgagaatccaacgaagaagctttctgtggccataatttgtttacccgtttcaccacttctgatgctagagtagtctttccagcaccaggaggaccagccagaccaacaatatatctgcatcgcagtttcaaacaggtttaatcagcgataagcaatatataaaacagtagagccattaatagtgttgaactgttgcctttaatctattagaacttggactttgtttatattttctaccaagtccatgtacaagtgacttgaccattgttaattaaggcgccatgtctcacatacacaataactattctcggactacagatattaaaagagtgtaagttcatagagctgtgaggaagatctaatgtgcacatgagacattcttcatgatggattaagcctactcgaggatttccatgagcgtagagcaccttagctgaaccgcgtaaaatttttatgtgaatcttttgtgttacttcatctaatcttttgtgttacttttaaggtttacaaatatgagaaatagagaatgcaaagtttgatcaacagaagttaacaagcagaaatgactttggcttacgtacactgcagcacataattcaagatgctattattgggaaaagaacctagatcttagcgtgaactgatacaaacagcgcgcaatgccatcattctaagtctcgatgaaaatattctttgttacatggctatggccgaaactgattaaaacagcaggcagtgccaatcaattgttcttgaagcagaagttgtattcttggttggaagatgacaccaggaagacaaatgaaagataatttacattacatgataattcttaatctagagtagagaatatatagatcaggaatgatgacaaggacaaagccaatcatgttattgaactctcacaagcaccctcatagaaatatgaatgaacacactgtggagatacaaattacaatgatgaatg

SEQ ID NO: 243660 - DNA, 3859 bp, Cannabis indica
taaataaataaaaaaaaattagacccaatgttgatcagttaaaactgatattaaaagttgagagggaatacaagcttcttccagcggccaccgcacagggacagcacccacccttccacatgcgccggccttagccacccgctctcggagacagggaaggcaaccattctctatcgtctcttagtctcacagcagctgcagcaaccctctctcggcctctctctttcacagtcacagaaactccttcgactcctgccctctctcttggtaacgctgacctgcaacttttaatctcggtatatatctttgtgtaattgtgtgtatgtacatatatatatttcctgagttgttggtattcattaaattaaatgagatgattgtcctcaagtgtcgaatcactgcttaattttaaaatattgtgttgattattgttaaaatatttgtgtttctttgactgtgtaatgccaaattagttgttgtgttcattggggctatatagctgatgtagctatggtgtttgggtaaatgattgatagagaaaaggaaagctaatgttattgtttcggcaactgctctgtacataggggaagaagactgaatgtgaatgtgtaattttgatttggatcaagaactatatgcaatatttgttgttcatcttttttttttcgtttagttttacgatatatctgggttgttgctatttttccatgatcatgttattatgatttttgataaattgcccgaaagaattcctctctacatttatctttgtatcgtggaagaccctaattggagtcaaactgttattttaggactgaaatggacaactatcgcccagaaaaagtactgaaatacgaggaatttgtcgaccaccgcttgaaaccagatctcgttcgtgctatagctgagcggtaggtaatagcgacatttggtagactcttatcatagcttttcttgttcaggttatgagctgtaaaaccaatgattattcctaaatacctgtttttttacaatgttcttagaagggaatctatgttgcatcattatagaagattgataagctgtaaatgcattagcttgaatttcttatgcttgggttatgtgatattatgcttaatcagaactgcatcaattcctattattttatgaggaagttctaaggttgatcaagggatatgatgcttgaataagttgttcaatagcctgagatgcctgtggataatgcttgttagtttcttgcttgttggaggtaaaatttgacacttttttcactgccttcaatcttcttcttttgcagggataaggtgtttgagcaacaaaaagttttgtatccttttcaatttctttcttttggaaacttctacaatatatggctaatttatctttatttccctataactagctctaccattttaattcatgaacaacttgacttgaatgaatctaagctcagatttacggaagaatatagaaacaatggaggaaaatagtgtaaccagtcttaggacacaggttaatcttggctctgaagtatacatgcaagctgatgtgtaagtcttctgtattagtgtctttgtgctgatgcttcctgtggactggcactgcaatatgtgaaaacgattcatacttgcatcttgaatgttttcttagtacattgatgtttatttgtttattttcatggttatgtggtgaaaaattaactactaccataaagtgcttacttttgctcagtaagcgttcatatgcaatatgggttaccattcagaacctgaagaaaatgtagtataacattagattcattggtcaatatgtacattttgaaaaataaggaaagctctcagcttttagatttacctttttcacctggtagtattagtggtgctttacacactgtatttactgacaatattgggtcctgggggatactttttctgcttgcttacaggccagacactacacgcatatttgtagatattggactaggatttcatgcagagttcacgtggtccgaagccttaaattatataactttaagggaggaaagattatccaagtgagtattttttctctgattattattatttcttaattaaattacacatctaacatgactattgggtgtttttacatataatggtggatgcaacttgtatgggatgctttactaacaattctcaccaagcttctctttacttcttttgggtaagttcagtatactgatcccctattacacatttacaggcaagttgaagagtatactcaccttattgcatcaattaaagcccagataaaattggtaagttcatttgcaaattgtaatcataaattgtgggctctttttcttctatataggctcaagaatctgagcattgcttaaaactttcttcttactccttccattcatccatggctgcttcctttcttaccttttttctaatacacacctataacattattcattgtttctttgtacaattgtaaatattttgtttggatttgtataaaattttggttcagttaaatgagtaaattatttttctacttcaggtatgcgaagggataagggagttgctccaacttccagcagagaaacctttaccccagcgtaccttctaacgtgttataatttgcacacaaaatgcctctttcatcgtttcaaactgtagttttaaatgacaatcaagtatgagagcatatgaatcattttatgatgagaagtttttgatgaatttgggaccaatcgtatattacacttgaggctctggagaaagcctgaagtccacttagtccagcattactaatagtgtaatttattgtttactagttaaagagttcttctgtcaatcatctatagcaggatgatggtatatcaaattaagaaagttcacagttaacccaattcaagcaggacttaagaattaatcccaaatgatgtatctttaaaaaaatttagtaaaatgtccgctaacaaattatactatatcattatatatactgcatgtagcacactattgatagaccgtaacacaaaaaaagttaatatatcatagtaattaatttatatgccaaaaaaaaattaacataattaaattagtatatacagcatgtatcaaaaaaattactccaaaactatttttttcatttctttaattctttcaattttaatattttattaaagcataaatttacaaattgatagtctactatcattcaataatttttctataaaaaaagcataaatttacaaattgatattttattattattttaataatttttctataaaaatataaaatattttaaaaaaaattagaaaataaaaaataaattccaaaaaaaatattgaaacttaaataaaatataattatgttacgaaaaatatgaacatgttatcaagtagtactcacacaggtgaggtcgatcccacaggaaattgaactgaatactactaaattagacttatatttcgatttggcaaaccaataattttgatagcaataaaattaagaaatgcaataacattcagcaataaaagtatttaatcaaagatgacaaattagggaaaaaatcctattgatttaattacccaattattaatgctaattagtattctctttctaaatgtgaatgatagattataaagattaacccaactcttttcagatcttttaggtcttaaatcatatgttatcttatcacctctaaattagcttaacatataatcaacattacgtaataatctcaatgtcactaaggctatgcaaacactttcgttttacaacaaacctagtttatccaatttttaacattctcaatttttactttttagattttgaattgagatcttaaagcatgcaaa

SEQ ID NO: 243661 - DNA, 3997 bp, Cannabis indica
atgtgtttatttcatcgttttagaaagttcatatttaggatgttaataaacatacttgtgagtagatctaagatcctggtaaaataatttccaacagctctcgcttccaccaaccgtcttttagtcaagaggtcacacacgtctcttagtcttccaagccaaccatgggctccggtcgacatgggtcttgttgttgcctcctgaccatggggtcgtgaaggcaactctggtgttatctctaggatgaactccagatcatctcgggatgatccgctaagggagtgatcatccggagtgttgtagtggctactccccttaaagtaatcttcattcagatcacaagtatgaagagaattgaactggttgctcaagtttaacttctctccatttactcgagggaagtaatcatactactagccatcggggcaatgtgcatagtaatgacacaactcacccctttcatatcggaagtattttcgagtgtgaagtggttcattggtcctaacccaccaaatctcatatcctccattttcaaagtaaggtctttatacgcctcggttatcttgagtggcaggtcccttcccccatgtagggtctcggggcttggcatcatgagagcgctgagaagggctcggtagaggagtcttgttggttctctcaatgttccgaggtcattccatatcaggtggagggcccattggttggcgcccatgagcttgagtcctttcgagctcttgcttgagggttctttccctccgggaagtctccacgcctagtgtctacttagtgcttgccaagttaccaagtgtggtggttgtgttacgtgcattaagggtttccccttgagcactagttcccacatgaccagttagttgatagggagtttctctcacaaactcagattgaaagacccataaggggagtattgagacaggttagctctctgttgttcctgctcaactcgttggctctcgatgttctgccagtttttaacgaaccagtgttgaaactgttcgtgttggttgtcgagagagtcttgcaactattgttgtagataagccatagtttgggtgagctaggcaacccgaggatcgacctcctcagggtcatcaatctccacgtgaggctcctcaagtgggatctggtcattggtgccagtccccagaagcttgtggtggccttggaaggaaaggtgtagagctggttctaaggcctgctcctggcacctggggcacaggagtagtcccagttctaactccatcaattggcgtgtccctagttatttggccacaagttgggatttctctatcaacacttgtagagcgtgttgcaactatcttgctagtgactttctagagtagtagctctcaatgaaagcaccaaaatattgacttagaaattcggacacagacttccaagccacacccgctcgctagattggcgagaataaaatttttgttaagtaaaagtgaagagagacacaacaatttatagtagttcactccctgtattgcgacagtaatggagctacgtctacttcgagtttttttatttctcacgggatggtattacagaaaaaaggctaattgtcaaagctctaatttctagagagagaaacgagagagagaagctctaaccttgtggaaagtttttagactctcaaaaatagaataagggagctctccttttataggtgaatgacgcccacaaaaatagaaatacaagttggctatttttgaccgaagataataatttaatggtgaaaattaaattctaaagttgattgtcaatttttgaagtttgggtcacgacggcaggacccactccgggtaatttgaaatttatttttgtaactcccttggaggtgaaatttggggctgacagcttccgaattgtgattgaagtgtgatacataacttgatatagcattgaaatatcttctaaacgtatgttgaatcatgtcaatcagatcaacattgagtgagttgtagctattttactaaaggttgttcatgacacagcacccaatttgacatccggcgcccaagttgacatcccagtacccaagttgacatatgacatcaatttagactctgggtaagtgaaaaaacatccaggggatatactttatgattcctaagtgatattttgatatcacttagtctgtttttgtattctgacgaagttggtcaccaattgtcaaagatattgttgttttgtaaaaatgagagaattgaaactcttcattttcgagtgagtttcccatgttggaaataacaaatgtgaagttgttaatttgacttctctgacttcatgaatcttagttaatttgaaaaactagacggacgatcgaaatggagtcagaatcggataagtgaagcccaacacactaggtcatttgtcaatctatgcactgagcactcattttggagcttcctaaatgtcattttgatacatctaaagttcgaaagcaaaaagaacagagaaaattaaaaatgatgtgaaatatcatttatgtggaaatgaaacagaattggagacaagcaggttgtaaaggagacaaataggttgctttacaaaaagtttatttatttttctttttttgaaaaaccagaaagtttagaaagatacaatttaattgctaacaaaaaaatgttaaaagaaaaatagagaaaaggaaagagtgatgagtgtttgtgtttccttaaagaaaaaaaaagaacttgacactagagtagagtcagtgtcaaaatagaaacttttcaaattatatggataatagtgaaatttagtcataattttggggccaatataatattaacttcaaatataaaaaaaaaatcgtatgaaagcgggaagcatgtgagtgagtgagagagagagagaccagagtgatgaaactcgaaggtaggtgagacactgcaaaattcaaatcttcaatcacattgaatgtagagagagagagttagaagcaccatagcatagcctcattgcttactcctagactccatatcccgaatgtggcaagctctcttggccgccgccgtggctggatccacaggcttagtcgccaaacacctcttcaagccgacccctgatcccactgccgccgccgccgctgccgccgagaaaaagaaaccaacaagtcttctcgatcacgaggaggaagaggacgacagccatggaatcaggtttttggggtcttcaagtcatcggggtttgtctcatgcaagcgcttgtgaatgtgaagatgggatctttaggttttccagtacggaggtgaatgggggtcgggttgcttcgaagaatttgactaagaaaagaagggttttgggtcgtcagttgaagaaaggagttgggtttgagagatctgatggattggagcagaggaggagtgtgaggaggtttggtgtttgcttaaagagaaggaagactaccaaaaaagtagctggaaagaacgaaacctgttcttcctctaatggttagatgccctttctctgcttccatccttgtttggtttgagagtaaatttttgtttagagagagtaaaattgaagtctgaagtattttactgaataattgactagtttcttttatcaattgaaattaataaacccaaaatgttttgtttttcgactagggatcggttcaaattttataataatttgaagctttttgagaaaaagaggaagaagcacaagttaaagtacttaaatatgttgacgtttatgtgatatgtttataggttttgtcgttgggctggttcatggttaagcttactaccggtattgaatttgctaaaggataatttgtatagctttatcaaatcaaaagtgcttaagctcaaaataactcaataaggatacaattttctcagagagaaattatgtatgagtaatgaactttcctgaatggatgtatgtgtactttcagtcttggggtacttggtattggtatttctaacaagttacttctgaatttgttagtttaaactttt

SEQ ID NO: 243662 - DNA, 2034 bp, Cannabis indica
ggagaatcactactagtagaagaatgcctccccattgaactcaacaccaatggtgacctttcctcttcatcttcctcactcgaaacacctctctcattcgcaaagtttcgaacttcaacccctgtgaactcgctattgccaccgcggccaccgttttcttcttcttgggtcctaattctattcgaattgtcaggtgaaattgcctgaagctcgactgaacctgaaaaaaaaaacatgataaattttttattaccaaaataaacaggtttagtcacacaagctaccgaaaattgttgaattatcacagtgtaagttcattacctaatggatttttaggttctaatactccatcgggagttatcagtatttatcaaacttgttccaatctaacaaaacgctattaaatcaaatgacaaagacattgttgagaaaaagatggattttcccggatgaaatggttgaaactttgagttctctaatttttatcccattctattttggtagttcgatcctaaaatttctttatttctatattttcgaaacatgagtatgtgacttgttagtattgatcttatagatattacaaagagcctacttctgcagctgcaggtttgcacttttacacaagcaagcaaaaattctcaccattatgatcgttttgtgaccataaatttacacttgaatggttgcttagtctaaattcaacgtagttatttcgctaatttaacaaatttccctaacccaactccaaaaagcctcaaaaattacactatgcgaccataaaacagtaaattcaatatgattattttgctattttaacattttcatgtagtcaaattggcaaatttcccgaacactaagaaaattttcattagtaaaacagttttctaaaaaatttattagcaaaataaccatggactcaagatcaacagccataaatttaaattcaatgtgattatgtattactaatttaacattttccatgttgttaatttcttaaatttccctaacctgattccaaaagctgcaatggtggcgatcctcgattcccaacatctctggagactgtaggccgagcctcataaaccaaagccggaagctcctcatctcggctcgaagctaactcaaccaacagcttgagaggaccaccaggagccaaaaccgccaccaaatcatacaaagccaaagccacaagaagagtccaagtagtccattccggcaatttagtaaaccaagtagccacaaaaatccccaaagaaaccatataagcttgtctcaacacaatcggaaacccagcggaaaacaacgacaaaaccccaacgacggagaagttgaatagaaacagaaaacaagtgacggaatcgatcggtacagagaaatgctgaacgatttcgaagaagattgagcctccgatcgtggcgaggacgaagaaggctgagaatcgcatgtagtttttgaggaaatttgtgaagttgtagtagtagagaaggacgaggaggaaggttacgactgcgacgaagatgacgaagactaatgcgttgaggagtgagccttcgagcttttgggttacggagtcggaagggttttccatgtagacgagatttgcggcggtacggaggggaggagtggagtcggaggtggttgaggagtagagtgagtagactatgaggacgacgaggaacatgcagattgagactggggacattacgccgacgatctctgttccgatcgaatctaggatgcttgactccatagctatggagctttaagctttttttggtgtttgggagatttttggtggagaaggagatttttttttggggtattaatattttttaatttattattattattataatatgtgggtaaatactattgatctataaagtactatcttaaaaatgaatgtacctatatatctttttactattatttaaattataattatttaagatatattataaaattttaagaaatttgaaaaagtttaatatgtcgaaatttacgttgcattattttattttatacgtatgt

SEQ ID NO: 243663 - DNA, 1731 bp, Cannabis indica
ggatgaatttggaatagtgtggcctttatttcttctcttgtaaaaggttccagcaaagcattattttccgcatttgatattcggcaaggaaccttcccacgaagagcagatttgacatctatgctgctattagatttcgtaaataactccttgaagtaattaatagcaacagcagcaagatcatcttcagaagtacaccactgcccgtgatcattgaacaaaccagaaatggtatttttcctccttctagctgaggctttaaagtggaaaaattttgtatttcgctcgccatgtttcaaccacaaagcacgactcctttgtctccaatacatctcgcgtttttcttcaacaccattaagatctttttccaagttttgacgggccaaccaatcttccattgctgatgatttggaaagtgaatcaatcttactttttaactcattagaatgagcaaaaaagtcttttttatgctttatattccattcatgaagccttctcccgcaattgtaaataagctgagtaagtgtatcaatcggtttctctttcattttaacttcccaaacttcattaacaattttttggcaatctacattatcagcccaagcatgctcatagtggaatctattaccccattttcttctaaacgaatttcctttctcaccgatttgagcttccaaaagaatcggcctatggtctgagttccaccatttgagaggagtgaccttgtttgacttgaacttatccgtccagcccgtattacacataacacgatctaacttttcaaaaattagattagaagatctcccattacaccaagtaaaaacatttccagaaaaagctatttcccgtaattggcattgagaaataacttgtctaaaattcttcataaggtactcagcttttggccctcctcccttcttttccttaatattcagaatttcattaaaatcgcctccacaaatccacgcatagttaaacattgtctttagcctatatagtagcttccaacattccgatcttccaccagggtccggactcccataaaatcccgtgaaacgccaaacaaaacccaagtcattctcaaccaaagcatcaatatgagaaatagtgaaggatttaatttgaacccgaaaatcatgagaccaaaggagagccaatcccccactcttgcctctagcatcaaccgtaaaacaaccttcaaaacccaaatgcacccgaactaattccataccgctgctattaagtcgagtttctgacaaaaatatcatcccgggatgataatctttaacatgggacttcaaagtattcaatgtccaaggattcccaagcccttggacattccaaaacatggctatcatggctctcggcgacctagatcaactaggttcgccgcttccattgaagtatcaagggtcaaatccatttcattagaaaatccccttgaagagttacccccatcttccttatccatacccacttgattatttgcactctgtcccactttccctttattctttgtcctctttggaattacccttcttctctttacaggaccttcaatcttgctaaggctttccaaactatcatcgtaatttatgggaacatcaattaagttaacatgattgaaatcagagtcagtaattcctttatctaccataccagtattataggcccttcccaactccataacagcagaatcctttaaagatccattctcctctctccaagagc

SEQ ID NO: 243664 - DNA, 3650 bp, Cannabis indica
aatgtatgttgtatagatatgtatgagcagcagacatcaactgaggctaacttaattggttgagattgtgtgtgtgtgtgtgtgtaactgtgaagagggtggggaaacgattaaatcctaagatggttgagtgctcgtttatacaattctttggctctattttgtatcataaaaggaatcctttcaattttctcacatatatgaaagtagacaattatggaattttctattttgtatcataaaaggaaccctttcaattttctctatatacatatatgaaagtaggcaattgagtacccgcggaattttcttaacctctttcattataagaaagagaataaaccaattaagtagcatttctaaaagaaatttgcatacaaaaaaaacactcactgtgcttatgcaatgcaaaaacaaagaacacgatccaattaagacatcttgcacattatgtgtttctttacagaactattcaaacagcatctcattagaaaattaccatatttgacagagcatgaggtttaaactcaaaggtacttgaacttttgttatcagaaacactgatattagagtaaactgtagtggttgaatatgcagcagaaccaacagagccctgcgccatttgaggcttcataaaggtaccagtagttggggaaggttctgcctgcaaaatacattcacaagggaatagaaagtcagaatattcagaagcatcagcaatctctttcaataaaaaaagcatcactgaccgatcaatggttacaagattagaaaataaaattttcagcaaacaactagaaaaaaaaaaaaacagctccgttgagagcaagagcaaagaaaatatagacctgtatgatcatatttcccacaaagtttctgaattcccagttatactttagcaaactgcttcacatctactcactctcaagaaactctgatactaccctcctgattggggtcgcttaacaagacttaaaacttagctaaccctctaggacaacaacaaaactttagcaggaatagacgaaacaaaatccaatacttcaaacaaagcccatccacgcaaagggaaagaaaaacaaaaatctttacattgattttataaataacctagagcaatagatgttgatcaaataaaatttttgaattcagattaaatcaatgacgatatcatctgcaatcacagatgatgtccttttatgtgggcgtcatgacccaccacaccatgtccacccctcctcttcataatgatagtggcacattttgacattaacaagttgcattctccttgctgatgcatttattccttattctacttaataaataaattaaaagttttcccgtacgtccactgacatggttaaataaaagaaaccaaaaggccaaagcaccaagagggccaaaataacaaataaataaatataagtatagaagcagaagattcattatgtgaaaaaacaacactggcatacaaaacaaagagataaaagcttcagattactatcagaaagagacacattccaaaggtattcgatggaacaatctattcgagcataaagtaaagaccccaatactagcaatactctaatatcaagcatcagaatcttagggtcccaggcatgagaagcaaccaccatacatttaaaaataacaaaaaaaaaaccttaaaattggtgagagatatcacagtataagcagcaaagaaagatgttgaattatacatctattgtttaatgtttatagacaacaagaaacaaaaatagtaatcagaattttccagctttgcttaaacaatagagcatctttaggttacttataatcaaaaaatcacatcatcattcagcaacatataaattctccactactacaaacgcataccacgcggcgatatcatgggtcagagaaaaagaaaccaaagttaaacggcacaaaacaagttcatacatgcatcccgtttggtcactgagaaagtacaatagaataaaaataaactattttttaaaaaaaaaaaaaaaaaaaacctttaaccctttttcagctaaagttgaagttgaatcagcagaataactcgcatcaaaacacattttaattcgtgttctaccaaacacagccttaacattcaaaacctctcatttcctatccccccccccccccccccctttttttccctcatcaattttcaatatttattttctcagtacccaaacaagataaaaacaaaatccgaatagggaaaatcaaacctgaccttcatgttagatagcaagaccggcgattccagaaacgaggaggggctaagccctggaggaatagtaaggcaagtagacctggagatcgggagcttggcgggcgacaacagcttatacttggcgccaccacaaccactgggcgggtcgggaaactcgttcctccccagatccacatcatctgagctccggcgatggaggtcagcagcggcagcttccattgaagctgggtcggtagaagtagttagctgtaagagaacgtcaaaggttatttgggaaagtagatgaaaggggtaaaatggtcatttagggtctgtgtgtaatatctatatctacgtgagtattgtttgggaagaaggaaagaatgaaagaaagaaggagacaaagaaaaatgagggaggaaaagatagagaaaaaaggttgacttgtagtgttagatctgagaactgagaagaaagaagtgtcattgggctgtcattttaaacgtttctggtggttaaagcgacagtaatttggccaacatgaaagcagaatacttgtttttcaaaatattaaaaaaaaaaattaaaaaaaaaaatacacaaattttattacaactcccttttttcccttttttttcaagggattttattagaacactttttttaattattatattacattacaacattttttaaaaatttaaacttctaagttttctcttattctttttccttcaagaatttacgaaaatccaacaaataaaatctaggattataacggtctatttccaaatttgaatacttggaaatgtaataaatatatatgtaattaatgtgttaatgattttttagtgctatggtgaaatgaagcttcaatccctcatttgtgttcataaagttactcattacaacctaactttaaaattgtcattgatggcatctctcaattaagtaaccaaaatgtcaaagtaataaattcaaaaatattggacgcaatatagaaaggtggggcaagaaacattgtacaaaacatttcatgtttctctttttgtttaattgttattaggtttgtctttcttgataggcccactaattattatgattgcaatttgcaagtgaggttaccatgcctatcttttcttttctttttttaactggaggaaaacattttattcaaacaaaacttagcaaaatacaaaacacaagctaccaccaccacggcagcagcaaacaacaatcctcaaactgactgaaaaaaactcaattacatgttcatcacccttcttaatcctatgagcagccaaatacatcactctagctttttaacagctagctttatatctagactcaaggctctagccgttctacatgccaagttgaaaatagagttgttatgattgcaccaggttgcataaatcgcagc

SEQ ID NO: 243665 - DNA, 1950 bp, Cannabis indica
  modified_base (45)..(45): a, c, t, g, unknown or other
agccaagaagaagagaaccagggtaggttctatatgtgctggcgngcggctactcctacggcccaggggctgaaggagactacagtggaagggcctgggcctttgttacctgctgcttggaccacaaaaaccccagctcttcgggcataaagtatggcaatatcaaatatgtttagaaacgtgattgtatcttctggcgcttcatctggtccgaccgatagtgttaggatgtccactccatctactactgccttcatttaaaaaaatataaaacatcacatctcaattctcaattctgatgagaacaatcatataataaagtggtgatgactaatgataacaagtgttgatagctcacttgatcaatggctgaaaccacgtccgttaaagttgctacggttggatacacagctttgtatacagatattctgttaaaaatatgtatatatattatccaattaattattatgacataagaatatatgggatcccaacccaatagcgatttgcccagcatttttgtttttaatctcctttacgtgattacgagttaccatgtgtgtaagtaagagtacaactaaaccccacagcccaaccacatggcaaccaaccagctgcagccatgtggctttattgaatatgaaaatatttattatcacgtcaaatcacagaaggaccattttgtattatgattgttacactacaaaagaaagttaaaaaggattatataatgaaatattgtaccgagcacgaggtgccatcccactggctcgtccataaaagaagccatttacaacaactggaactccagcatttccacccgccgtcgatgccacatgactacaaaacaatagttaataataaccattatatttatataaatagttaatacttcaaaaacatttttcattaactctaattataatacctgccatgtccaagtgcatcaaaaggtgaaagaaaatcaacagaagtgttaagagtagcagccgcttgagccccagctgagaagaatctagcagagactattttaccattgcatgaagtgggagggaaccgaggaccagactcacaagcaccagaaaaatgagaagaaatatttgagataaaagggttaagagggtcataagcaaagcttgggtgtgttgggtcaatgcccgtgtctacaaaaccaatcacaattccatcaccagcgtttctttctcctccttcctctgtccaaactctttgaggtagtcctagaaattcaggggtgtatgttgtcatcattttcgctcctctatctttctctactattcttactcctttagcatatttcagttttgaagcctgcaaatgcaatatataattatatatattatatataaactagctaaccaaaaataggtaaattgaccaatattaatattggggacctgagaaggggtggtatgaatagcaaagccattaagtacgtgcttgaagctgtaaagcttgctgtagcttccactctctaaagtttccattaaaagttggtcgtgggattcaaccaatctctttgcatgggccttcgaaacctcactgaacatatatgcattgaaagctgttataagattatgttggccaaaatagctagacactgtttataatatgaaagcttgaactggattattgttatgctattgagttatccatgtattatattcttgggactaggatctagttattaaggaagaaaagaaaccaaaaagagtgtaagtgaacatatgatcaccattttgtattcacctgtttgggttaacacggttatgtttatgaatatgagaacgttgatcatggaatgcaacggggtctccttccatcataaccatgacaaagctcgctctctgctatacatgcagtaattatctaccaaaatgaaaaaggcttttaagaattgaagacaatgaactgatcatttcaatcatcttt

SEQ ID NO: 243666 - DNA, 1358 bp, Cannabis indica
gagtttttttacagattcatcaattgttacagtattttttaaatttcaatttaatttattattcaaactaaatatatatttttaagactaaccataaaatatatatctataataatttaattaattaaaaatgatagttcaaaataatttaaaaaataagactctacaatattaattttttttttatgttattaggagtaaaaaataaaattttagtagaatagttagttatattattaaaatatatatataaaaatattttaaatttttttgaatttgatataattttactacttatcattaaacaaaatacaatcgcacgtgaagcgcgatttgtttcttagataatttattaaaaaaatatatatttttatttatacaaagatgttttatttgactaatgatttagacaacctcgaattacaaatcataaagaatttgttagaattatattaattattattatattattttttaataaaataaaatatttatttatattataatacaaataatatgtagattttactaaaatgaaaaacaagtttgtcgtggctataatgcagtgcacatatgctatgacattatagcgaaattaatattttagtgttaattatgttgagtagtgatatgaatacttaatgttaataaaatcataatttttcgttcattttcataatttagtgtcttaaatttgtaactagatttaatttttgaatttattaataaaagatatacttcatatttttgttcagactcaatgatttaaaatttaagtcttacattattacgtgtcatatttatgactttaacagagtctatactgacagacaaaaattacagctttacaaatattagtacattatgttgctaaaaaatttattagcttacaaactcaaaacttttagtacttgtgtcgcaataattcttaaaataaaaaattaaatattgtttggatgattatatttgcacctaatttatttttaaacattgacgaagataaattatacctatttaccgagatttatggaaaccaattttaataagaattaataaataaaattaagtagtggatagtgagatagagatttttacgtggtttaggtattagtgagccctattttacgagtcaattgtatttggctaaatagatagccttgatgtattacaatgttctttgcaagctgaagcactttagcttcttgctatagtatttacacaatgatctttcaacacttttcatgagggtataatgtagtatttataggctaggatctagaaaaggatatacctatgacccgctaggatttgcatgtgagcttagtccaataatgaggtatatacataacatacactga

SEQ ID NO: 243667 - DNA, 2233 bp, Cannabis indica
gtataatactacaacaacaacaccaacaccaacaccaatcacaacaacaacctctgtccttattccatgacaacattattgactcagcaaagacctcacctcggatgtcaaatggtacagacattgactttaaccagtacagctttgagtctttgcctaatggacgaagatcggtggataccatatctccatctgacttctcttcaacattttcacaagacagtactgacttattatcatcttcatcaccagctatggtaagtaataataatatcatctttactttgcttctctgtttgtttgttttttgtttgtctgttaaatttcgaaatcacaggaagatgtggaggctgaaatgaggaggctaaggcttgaacttaagcaaacaatggaaatgtatagtactgcatgcaaggaagcactctcagctaaacagaaggtacccactaaccagtatgattcatgattcatcatgaggattgtgtttttaatctatttctataaatgtatgtgtatatataggccatagaactccaacgctggaaaaatgatgaagagaggagattggaagaggcaagatttgctgaggaagctgctgtggcaatagtggaaaaggagagagctaagtccaaagcagccattgaggctgcagaagctgctaagaggattgcagaccttgaagcacaaaaaagagttaatgcagaattgaaagcaatcaaagaatcagaagagaggaggaaagcaatggatgctctgtcaagaacagatctaaggtacagaaggtactcaattgaagagatagaggctgcaacagggtttttcgataagtcccgcaagattggagaaggaggttatgggcctgtgtacaaatgttatcttgaccatacacctgcagctattaaggttcttcgtccagatgcagctcaaggaagatcacagtttcagcaagaggtaggactaggcatacaaattaatctcatttttcttcttcttcttcttcttctacttaagtagtaatagaaaaatatgatgatgtaggttgaagttctgagctgcataaggcatcctaacatggtgctccttttaggagcttgtccagaatatgggtgcttggtttatgagttcatggctaatgggagtttggaagaccgtctcttctgtcgaggaaacacccctcctctttcttggcaactcaggtttagaattgcagctgaaattgggactggcttattgtttctccaccaaacaaagccagagccacttgtgcaccgcgaccttaaaccagcaaatatcctgcttgatagaaactttgttagtaagattagtgatgttggactggccaggctagtgcccccatctgttgctgatcatgtcacccaataccgcatgacatccactgcaggaactttctgctatattgatccagaatatcagcaaactggaatgcttggtgttaagtctgatatttactccttgggaatcatgtttttacaacttataacagcaaaatcagcaatgggattgactcatcatgtggaaagggctatagagaaagggacttttgctgagatgttggatccagctgtgctagactggccctatgacgaagctttgagctttgctaaactggctctcaagtgtgcagagctaagacgaaaagatagacccgaccttggcagcgttatcctcccagaactcaacagattgagagcacttgctgaagaaaatatgcagctcacattgtcccctggcgatgaaagtcccccatttaactacagccaagtctctgttgtaagtttaattaacattgttctcaacctttgttacttctctgtttataaatcaccaccacaaccagcctgtctccttcaatctctttttccttatcattagctaccataaaaccaccaggaacactagtcactcttaagaaaaaacttctaatttacttcttggggctaggaataataacccaaattctaagcataaaaggctcttactttcttttcaactacacttttcagtaagcatatcttgacacatgttaggctagaagacaagattttgaaagttcagaatgttttgagtcagtaacttgaaacttgcagactagttttagtgatggaaattaagtgattatagagtagcacttgcattgtagttttccaatataggttgaagccatgaccaaaatgttaaatgattatataattcttcaaatcaaagcatgtct

SEQ ID NO: 243668 - DNA, 1982 bp, Cannabis indica
tgtatgttggattattaggttttaaattatattttttattatttatatttttttcaattgaaattagcttatatagtagctaaaatggattggatagatctaagccaatctaatagaaaaccagttaatacattcaatggttggaactgatctaatccaatatatctattggatcggatcgggtatcgaatgactcaattcaactaagttagatcagatgccaaaatctaatattaataaataattaggttggatcagttaggtctaaatttatttgtgatccaataaacattcttactgcacacgaaacgaaacacgaacaatttactaatttcaaataatctataaacattattatatgtataaaataataaataaagataaacgaaagtcatatggagtataatagggcaaaataatattagactcttgcatcaactatatgaagatatatacatgatataactgggtccaaagctacctattatatcccaattatccctgcttcatgatcatcaatgcatgggaagaaagtggttgaatatttactacaccctagatatatcatgttccccttcagtggaatgactacaaattattttggggatagatgtgaagaccattttttgaaatgaacaatattcattttattttgagagaaaaagcaaaagcaatgtttatgatattagtaagaggtgtaacttttatggtaaagttgttgtgggttgtcttctacattaatgtgggtgcatgatttaggtgtaaattaaatggatgatgggtagtggtgagaagtgttatgcatggcatcttagttaatatctctccaaaaggagtattttgtttgtgagtgtttcaaaatagtaactccactatcttctttttggtctagacaaacatcacatccattgatgcatgccatgccctgaaacatgcttaggtgttacgctcctcaaaattaagcacttcttcattgtcccttctcttgggaatgttgtgaaaaaaagagagtcctaggttagacatactcttatgaatataaatatggaattatataagattttttgtcaataatatagtttcacaaattgaattataatttctctgggagtgctatgcatatctaatgatagcattctttaaaggtcctatatatctccaatcattcaaaaaaatattttatttgctcgtaaaaaaaaatataatattttattttatttttctttcacatcatttttgtaatattttaaccagagatcagtctgcttagtatttaatagttgtgcgcaagtgtatacagtcataatttgtaataaaatcttcgtaaaactaattaaatattgtctcacaatgactgatcatcaattaccaattaattaattttttatttctacttaatcaattaattatcaaaagttttaagaaaataaataaataaacaataacaaaaaaattgaggaataaacaatgagaaaaaaaattaggactattatgatcctcaactatcttttgttttacttcttaatgtaattacccaattcatctttttcctattcagttgacaagttgaaatttgtagttcataatctggttaagacttacaaactcagtctaagtgataactccgtatatttaacttttgatattgaactatgacaatcatattattttcaaatcaacaaaagacaatcataatcataaatactaaattattaaatcgacatggtacataagtttagtactgtggtaaggaattatgttcaacatgtaatcaatttataataacataatatccttataagtcctcaatttcactgataccgtgatgcttaataaatcaaccaatgaaattaaccatacatttattacttaataaataagtcattgtcactaaacatgcttaaaaaattaagccaacaaaatattatttttattaaacaaataaacttattaatcacaacaaaatatgaactacatgattt

SEQ ID NO: 243669 - DNA, 6035 bp, Cannabis indica
tgtagtttaaacacggcaaaacccatccaacatcattcacggttgatcttgaggattatatccctttctctagcattaagattattcacatagaagctttgtttccttttcttattataatgcataattaaaaagaaaagttgttaaccatgtgaaaagcataattaaaagaaaaaagaaaatcatggtttttatttttttcattaaaagaaaaagtaaaagaaattagaatcttagagggtgatggaaatggtattacacgcgctttacagctagctagtaacgcaaacactcacagatcctctcattctcgatcgagtatttaattatcgcaggtttcacaaacagctcaacgagatttcgtcctaaggctgtgcatattcttgaatcgtggagctcaacggtggccgaggttgatcgcaggtgaaatactttaagctgtcggatcatcacttctcaccctttagttttttgtttttctttcttgattttcattaactgcatgtttatgtttgtttcccgagaaaactgaaagtgaaaatatctcactctttgtttttcattctgtgaagttcatctatttctacttctcttaaaagtttcgaggcatcaaacgaacccaattacctttctttttctttggcttagatatcttcttgttatttttgaaaaagttttagatttttttccccactaatttgtataattataggaataccctttaattcttttactgttttagttttttttttccctaggaaaaactgttttagttatgatatgcctaatctctgctaagtgttagtgaaaagtcttcggatctatacactcatactaccaaagttgtgaaagtggtttttcctttatagctgccatgatatataggagatatatttttctttccttttttatttttcaaatttcatcttttaggtaggaagataacacaaggcaaatgtattttctcttcttggagttatgctgattttgtggaattctatttttcatttatgggcccagattcctgtactagcatgtgtgtaaattgtgatctttaggtgtgagatctgtctaatccctacatgattttgttatagatagaaaacatggtgatccttttgattgaaacatgacacagcctttttcaccagatgaagacataattagttgtgtgaattttcttttcgatcattaaatatctctaatcaatatgttatataacaattactgtgataggtgatttaaaattggcttgtagtgtaattaatacatctaacgtttgtcctatgattttatcatgaaaatagatagatggccttggttacaactgctgaagtttgtgatgcaaactcgcaactaattgcgagtggcgacctccgtgcgctgcagccaatttttcagatttatggccggcgacaggtcttttctggacaaattgtgaccattaaggtgttcgaagacaatgtttatattcgtgagttgcttgaggaaaaaggcaatggcagagtccttgttgttgatggtggtggaagcttgcggtgtgcaatattgggtggcaatcctgtagttcaagctcagaacaatggatgggcggggattgtagtaaatggctgtataagagacgttgatgaaatcaacggatgtgatattggggtcagagcactagcgtctcatccaatgaaagctaacaagaaaaggactggagagaaacatgttccgataaccattgctgggacgaggatccgcgatggggaatggctgtatgcagacactgatggaattttggttgctcctaatgaattatctgtctaaattattgaaatagatgagtttttcaaacatcataatgttgcaaatttgttttcaagtaatgctttcttggcctacttcatgttcacgggttcttagatcaaacctaatataacatctgtattagcttgaatcccttataataaaaatatgttcttttgataccctgttccttgtctacgagtgcatagttcattggtttcactggctacgatttagaacagagttatattggctagctgatgttatgtatgctgttattgtttttgttaaaaacacagggcaagtttcgaaaatgtttattggctggcaggtttgggaggcttgcatagatgtagcttctgtactagcaagcaagagaataagcgcaaagtgaaattaaataaatccttctattcttttgcattgatgttaaagtactacttcttctaacatttcattataccatacaacaagccagaaataccagacggttatgatgtgatcgttatgattatctgtgttactactacaaagtttcatttcagccatgaagcactgaagctggagctgagaatactcaaccagatgtccatctactgtagtccaaggaaaccattcaatagatggacagattccaaacctcttgtctccggggtatctggagtgcttgtgcactaatattctcaactttcagaggttcaatcggaagtacaaaaatgtactgcaactattacagcttgtctacacgatgattttacttgctgtaatatctttctggtaagttcttctattcttcttgatcatcaggatttaaagctgtcaattctcttgagaacaatttaagtgatgttactatttattgtttggttataagatagtgtttgagatattctatctataggacaggaaatggaattgggttttctagaatggttttgtttcattgttcagggctgctaaaaagttggataaagtgagatttaacggtgaatatggaatatccaaaaggggtatctcgaatagttagatatgtggttttgctactccactgagttcctaaataacaactgttatagctttctggtccccaagtattgtagcattgggtgggaagctagttattattatttagttttcataaaaacgtgaatgtagaattagtacatgaagtatgagatgatggataccatcaaatagaaaaatcttaagcgacaactttacgcttccatgcatgtaagagtgtcttggccagtgcaaggagtctccattcgcatcatggcagcagtgacattccaaaccattgtctttgtttggaaatagtttagcaataacgctagccttcacacacgtatatctatatacgatgactttctttatgcctaaaggtgccgaacattggtaagtgtttaatcatataatgctactcaggtctttagttactcttattctctgtagtattgtcatttactcgttattgttttctgcagtttactctcggccattttctagtttaatatagtcaattaattttattcatatttgcaacaaacacttactcatcagggcttgacttgatagtgagtttccttgagctcttgtatgtatctaatgacgttgaaaataatatgaaatgggataaagtttgtccaatgctaatttttactagagaagatattgatttgttttgtttttcctcttcaggtaactttctacttttcccactagtaagggtcattggagcttggatgaagtggagacttctagttgtaaaacatactaatatttttatttatcttctatttgtatgaagaagtagggtgagctttttttttttcatatgggcactcaacattttaccaaatcacaaaatatatataattataaaaagtaaaaaaagaacaacaataatttcaagacaatttgtttcagtgtgctagttgaaattatgttttgtattgacatgaaaaaaaggttgaatatctgcatagctaaaaggtgtaagatgaaagagttttactgttttatgtcatgtactattatattttttttttccaaaaatattgtttttattatgaaaaaaatattcttgtatagttgttatatcactattcttgaaaagtagttataagcataatctcattattgttatatagagattgatgtaaatttataaatacattattttgtgtatagattaaaatattagagaaaatatttttaccttaatctacttggtatcagagccaattgcctcttaatcataatcctaatcattttcttctccttcttcaccatgtgtgacacttcaaatgaatcaataaacattctatccaaatccactattgttatagtcacatctaccacttttttaatcattattcctgcaaaaaccattccttttgattctcactttgtccaaatcactaccattcggttgaatggtgattacttcctcatatggtcataagtgatacaaatgtacacgtgtggtcgtggaaaatgggatacttgacaagtgagaagaagaaaccaacaggggaggatctgacctacgagacctgggatgttgagaattcaatagtgatagtgtggcttgtgaattccttggaggaggagattagttctgactatatgtgttattttacaacaaatgaattttgagaaaaagtaactcaaatgtactttgatttagagagccaatcccatatatttgagttgaatttcaaacgtggtgagataaaacaagatggagcagatcaatcgtgcactgttgaaactaatttgaactcatctcgtattcctaattactctattgcacatacatgtaatgagataaatgctttaaattgttttcaaatatcagatactccgtggataatagatttcaaagtttcagagtatatgaaatattcttatagcctttttgactcttatatatcttgtttaggagacaaaaaagttagaatagctgatggtaatttctcatctattattggcaaaggtttaattaaactttctgagataatagattttaaatatgttctctatgttcctaaacgtacctgtaatctcttatttgtcagcaaattatctagagattttaattgttgtgtgattttttatgaatctcattgtctttttcaagaccagagttcaggaaagacgattggtagtgctaggatgattaatggtcttcattattttgaaggtgaattttctaataataaaattgctcaagggcttagtagtatcgattctcttttaatttatgattaaataatggtttgacattacaaactaggtcattcgattttttcttatctaaaatatttatttccaacgttatttaagcaattgaaacccttatctttccaatgtaagagttgtttatcggccaattatttttaaacttcttctcagacctcaaaacttttttatcattttcatagtgatgtttggaggccttcacgagttaccactaattctggaaagaagtggtttgctactttaatatacgatcacactcgtctttgttgggtttatttaatgaaggaaaaatttgatgttgtacaactttttttttttatatagatttttgcaaaatggtagaaaatcaatttcgaacaaaaataagtattttgagaaataataatggcagagtgtattttaatcatactttgagaaatttcttgaaggaaaaaagaattgtgcatcaatcaacttgtctcgatactctcgaacaaaatggggtagctgaacagaaaaataaacacttacttgaagatgctcatgctatgatgttttatatgaatattccaaaatatttatagggggatgttgttcttactgcatcttattagattaataggatgcctactaaagtgttacaatatcttactccattggcatgtttaaaaaaaaaaaaaaattctaaatcaagacttaatgtttaaaatatttggttgtactgcttatattcacctaccaaaaagatctatgtccaagttagatcctatgtttgagaaatgtatttttttgggggtttatcctcctcataaacaaggttataaatattttaatcctgtcactaaatatgtttaatgtaacgccctaatctatagggacgccacgtgtgtgattttataaactagtttaatactaatagaataattaattattaaaaaccgtgataatattaaaaacttgactaaaataaaacactaaaaatggacattataacggca

SEQ ID NO: 243670 - DNA, 1160 bp, Cannabis indica
agagagagagagtttagaaatgaggggggtaaaattgggtttaagtaaaagttatcacatttttacaaattatgtatagttttagattaggataccaatttttagtctctaatatgcatataatttcaaatttccctttgacaattttgttagtatgctatatttattaacttattattcacaatcgaaatcaagatataaaaaaccaactaaatagattgttgatttaccacaaccaaatactataacgaaatatgtgtaaactaaacacatattcactgaaaaagaaggcaaaataaggtaattctttttcttccttttcttctttgaaaaatatatgataaatttattaaatgcaactcattcataatatacatctaattctattcccaaataaataaataaaaataaaaaatcctagaaattgaagagctaaaagtcaacaggaaggctacttaagaatgctaaggtgtgaggagatgtggactttccaaacggtgaacaccatcgaggaagcttcgaaagaactctatcaacttttggtgtaagtctgttgatatcagttctgagcttcagaagctggagatcatgtttcttcccgtccacggcctcagctgatcgagaagaactttcctgccagaaaagtgttagaacaaactttgttggtgctttctgcccccccgaaaactgaatggtgtgccatccgtcaacactgctcttgccaccaactggcactaattcatctgagctgcctgcatctgagattgagaggtaaggtagagaagaatcagagagagcataaaatgacactaaagaatgtagtaatgaggcttttgtcaaacatcagaagatgattcgaaaatggtgaacacaaaaacatttctgtcaattaattttcaaaatccaaaagatgggaaaaatgtgaatttgtgtatgaaaaatcaaacttttagctataggacaaggtcaggagctgactgtgtttatcataatcaaattttagttataccttttaacgcaaaatcttctatttccttaaagttgattgctagagtccagcgtgttgaaaatcttgtatcaattacaacttgagtgattcttttcttcccttgagtatcgctgtcgatattcagtaatggcaattctgatttgctccatcc

SEQ ID NO: 243671 - DNA, 3953 bp, Cannabis indica
cgtcggatgagtttatgaacttgttgcacggttcggatccggttaaggttgagcttaatcggcttgagaatgaagttagaggtacgaatgcggttcgatctagtggtttttgtggagattcggagcttgttttgcttggttttttttagtgtgattttttattttttatttttctggttgttttttttttctttacagataaggatcgtgagttggaaaaagctcatgcggagatcaagggtctcaggttttctgaaagacttagggaaaaggcagttgaagaggttatctgttactattcagtcttctttttcaataatgcattattactaaataaagctttctgggtattgacatgttgatttcgtttttttttttttttttaaaaaaaaaaaatatatgaatgagtatattgaacatagatgaaatgctattagcttttgggttttgtggttagggtaaatattatgataagatttcttactttagtttccagctcaatattaaacagtagatcaaggccaaagtaaaaggtctccaaaaccaagcgtgtgtgtaggacgggcagtgacaccaatttttagctttgggatttgcttatcttcctcatgttgtttagagcatcatgattgtttcctagaaaaatttaaatgttgatgatgagttatctctatctatttatggaacactgttttaattcggacattaatattttcaattgggttttcttcgtctttagtcagtcttatcatgttattcagttttccgaaagttattaagaacctgttagttttgatggtatttgttagctgattttaattgttcaactaataagggaactgctaataattcaattaatgaaattctaatattaaggattacttagcatgtattaaattctattattgtgtcttgtttattgcattttatagaaattttcagcttctttcgatgatgctccttggggcttgtgctcactgtctacatgactttcagttactttgttgttcctcctatgttgatatgtttactgctttacaagttaataaagaaaaggatctttagctactgcattgcctaacaccaactcagaagtgattattgtgttttagtaattgattctatcattgtttagaatgttggacattattctgttactcttgtctcgaacattattcttgatttatctctgtagtcaagatagttgctgactttcaaatttctgtcttttgactaatgtagctcacagacgaactgtctaaggtggatgagaagctgaagctaacagaatcacttctagaaagcaaagtaatattgcaggcctttatcaactactaaaaatttggtttttttgttttttaattttttgctcttgaataacttgatttagttgaactaattaaagatgatatgcagaatctagaaataaagaagatcaacgacgagaagaaagcttccatggcagcacagtttgctgctgaagctactcttcgaagggttcatgctgctcaaaaggatgatgatatgcctccaattgaggccattcttgcacctctggaagctgagctcaagctggctcggcaggaggtactttatatattcttaaacaataattatgactcaatattaaggaggtaataatagagaaaaagaaggcaactattgggctgaaccgatgccatcctttgttgcttgcagattgcaaagcttcaagatgataacaaagctttggatcgtcttacaaaatcaaaagaagcagctttacttgaagctgagaggactgttcaggttgcgttggctaaggcctccatggtggatgatctccaaaataaaaaccaagagttgatgaaacaaatagaaatttgtcaggtgagaatcaagatcacagttttgatttctacattagtacttaagacagtggatggatactttcctgactgtgtgacaattggacagagtttgatatttttttgcttgtggttattaggaagagaataaaattctagataaaatgcatagacaaaaggtagcagaagttgaaaagcttacacagactgtaagggagttggaagaggctgttctcgctggtggtgcagctgcaaatgctgtgagggattatcagcggaaagttcaagagatgaatgttagcatatttctagccctttctattaaatggattattttttgcctacatttataccgtagtggaggcttcaatttacaagtttatctgtatgttttcaggaggaacggaaaactcttgaccgagagctggctcgagccaaggtaacagcaaatagagtagctgtagtggtagcaaatgaatggaaggatgctaatgataaagtgatgcctgtaaaacaatggctggaagaacgaagattcttgcaggtaaatatcccttctaatttctaattcttttagttgcagtacttaatgttctcttgacagttacattttagcttgcacttcaattctgaaattgccaaactctgtttctgcagggtgaaatgcaaaatcttagggacaagcttactgtagctgagcgagctgccaagtctgaagctcaattgaaagtaatgtcctggttcatgtttattttgtggtatatatttatcttgattgttaaattggctaaaacatggttgtttttctccaggaaaagttccatttgcgactgaaagtgctcgaggagagtttgcgaggaacttctaacagtagcaaaattggttcagctgatggaaggagtgcaagtaatggctcttctcgccgtcagtccataggtggagctgataatatgtcaaaattaacttcaaatgggtttttatcgaagagaacaccaagtttgagatccttatcgtctagtactagttctgtgctgaagcatgctaaagggacttcaaaatcattcgacggcggtacaagatcattggacaggggtaaagtcctttcgaatggtggtcccagtttctcattcaaccagtcatgtgatgctaccaaggatagcgaatcacctaatgcctggaaaggaacttcagatgataagccaacagagttcccatcagtagagtctgaggatagtgttccgggcattttatatgatttgctgcagaaagaggttgtagctttgagaaaatctggtcatgaaaaagatcaaagccttaaagataaggacgatgctattgaggtcagtatctactatcttttgtatcttttccttttttctgtcttatgattttaatcgtccactcgggctaaatcaaaatttattcttctgtcatttagatgttagctaagaaggtagatacattaaccaaagcaatggaggttgaagcaaagaagatgagacgagaagttgctgctatggagaaggaggtagctgccatgcgcgttgagaaagaccatgaacatagagccaaaagatttggtaacccgaaaccctctgtcaacagcacactgcttgctggaaggtacatttgctccaagaatccttatcgagtcgagtcatttcattattaaacacgtttaacattcgtacctttgcagaagtatgggacgaggaggattaacacgtagcacccaataacaagtcctaaaggcaacaacagcagcagaatcagcagataagaagtaaatccggataggcgcccctcgtttcacattccatttctattgtctttacctcttcttttttgtttcttatgatgaatgataagattgtagccccccccaccacctcggcgtgccgatgatcctgctgcattcaaactttaataaaaaaaaaaaacaaaaatcaaaatcgaaaggatagcaacatctgcgcaagaaagtcggtatgcttcttctgacttagaagttatgtgttatatatatatatttttatcccacttggtttgctgctatagggagttcagcaaagaaaagtggggtaaaaaagaaagagaaggaaggtg

SEQ ID NO: 243672 - DNA, 2308 bp, Cannabis indica
atattgacacgtaagagggtgttaggcactactggtaccattttgcatttctctataaatatatatatggtaaccatgcatgcgactgtccgttttccttctatgtgggtccgcccctgtgtgagaaaaagcattttctggatcccaccaattcccccaagagaccatttttgtcgatcgtcgtttatgtatggatggacgacttagagagaatacgttaattaaggtttgattcagagaatatttaactttccaaccagaacccacctcaccttgctgaaccgcaccatcttcattcttattttttatatatatatgtttttttaatacatgtctaaaacaaaaaacaaaaagattcatgaatagacaatagtactttgatgattattttttgttcttacattatagtacttagttccattgcctcttggattagctgtagagtcggcgcacgtgggttaattaaagaatactgaacaagaacaagactgtcacgtgtgggcgcatatttatatcaactgtattgctaacggttaaaaaactgttacactttaatattactttgatcattaaaattaaataacagagaaaagaacaataagtacgaaagagagagaaattattaagaggttacaacattatttgtactaacactatataaatataatagaagactagagcttagacacattacaattaccaatgtaacaaaatgcatgatcattagctaccatcttataattaattataaccctaagacattttcagtgtggtgtaaattttatagtaaaaatagctcaatatatggttcaatattatatttggcccaaattttattattgtgctccaatgcacaagatgtaaattatcccccaaaattaacatagtcattacattattattagaactataagtgaacaaaaaaatgctaaaaattgatacgtgatacaaccaggtctgtgttggctgctgagattcagtgttgccgccgggggttgtttatctgagttagccaaaagccttacaattcaaataggtcttcatcttgttccttgtattctccaatcgaactatctctttgagtaatcgaggtcgtgaatcgaaatcacattaccaattcagactggagtagtttcttggaagagcaactggccactgatagcttcatggcatgtacttctattcatgtcaaaaatgagtgtcataaggtagctcaatgtttggctaaattagccttctcttttggttgtaactaagtttagattaggggcttttctgattgtgcatctgtttgtgttaaagcagatttgctttcccttgtttagtttcaaaaaaaatgccaaaaaaacttttaattaataaaaatcattatttaattagtggcaaattagtaaataaataaataaaaaaagtaatattattgtgataaattcaatacgcaagtatacgtatcgttcataagtaattgactaacaagactgagatcgatcccacaagaactgtagttacttaccaaataattaaatttctaattatatatttggtgagaataatatataattgagaaaaggaatttaaaatctattgaaaaagaaaataaaaataaattaaagtgcaatttaactatgattaaaatttaaggtgattaatttcaattgaatctatttatatggtttagcataatttaatttccaaattctaattttcatgtgataaagaatttactaaaaacacttatattcaggctataactaggtcaacatataaatctcaacctatatataaatttttttacttttgtgataaatttaaacacataaaagacattaggcataaaaatcctaaatgctacacaaactatataggtactctcgtcctatatatcgaaatctatgtctattttactatagcataatcaacatcacttctcagattttgcattgaaatcatataatatttaattggtgatcaagcaattaaaagtaattaagtacgaataaaatagatgtacataaaaaattagggaaaaactaaatcatattaaaaccaaaataaaagtggtgtttggttggaggtaataaaataaaatgaaatgaaaaggaaacactcttcattctattcctttgtttggttccatattgaagtattggaatatcattacaatagaatcactacaagaaatgtcacttttaccagcacatgagttcgctactgcactggtaaaagttactttaacttttaccagcgcgtgcattgtgcaaactgcgctggcaaagaggtcaaagttttaccagcgtacatttgcagt

SEQ ID NO: 243673 - DNA, 2334 bp, Cannabis indica
gtgtatgtgtgtatgtaaatatatatgtgtacgtgtgtatgtaaaaattcagagtttccatttccaaccaattataaaattatttggctacttttaaacacatattggttacaaaataaaacatgttatattaattttagtaatttaatgtttcttttttttgtaaaaaatttgatgtttggttacctatatttacaattttgttacattatgataaaatattaaatatttatactactaggcaacatcttatcttagttaatttttagtaactcattatgttactttatagtgagattattacttaattagtttaagaaaagtgagttattattttggttactttcttaactattagatgaaaataatgtattattgtataattctacaatgtacctttaaaaggggtccaccgatatactccttttttgtttcggtatctaagagaattgtttcaatttttttgttgacgtctacgtgatagttatttaatacattttgtaaaattttgaaagatctataaaaatttaacacgttaaaaataaggttcaaacagtctgttgtaggcgagtgtcttttattttatgctcgaaatagattgtttgaaccctattttcggcacgctaaattcttttaaatttcttaaaattttacagaatttcctaaataactataacgtaaacgactataaaaaattcgattaaattttattgtcaaacaccgaaacagataaagggtgtatcgatggacccttttttaaagggtgaattgttgaatttttctttattattttggtcactctttagtcggttattgtattagttacttttaaaatttgtttgtgatacttctggtaccttttagaagaaaaataacttgtctaatgaaagttaccaataaaaacagcatcaacagaaaaacacatatcattttgttttgattatgtattggtaacttatttactttgttacttttttgtaacaatttaacaaatgcagaaaaacaacaatagtagcacatttcaattttcagatctaaaaataggcaaaaaaaaagagaacaataataaaatttagatctacataaaaattaattaaaatgtacatggtacaattttttgtttttcgtttttttttttaagaaaaatcattaaaaaaaatgtctgaaatattgtctctggacatagaaaaaaaaaagaggaaaaaagatatcgtcagtcattcatgagaaataaaaataaagacatcggtgtggaaaactagaattaaaaaatacaaaacactaaatataacttaggaaaactttctagtgtgcaccaatgtaccttttagctgttttgacatttaagataatttttttgtctattttttttataatcgtgtcgttcgccaaaaacaaagttcaattcgaacaatctacacgtgtatacttcttttattttatatgcttgtttgaacactgctttctatattgtaaattatattaaattttatttaatatcttaaataactataaacgtatatgataattaaaaaaattgctaaaaactacttatttcatgacatataaattttaatgggtcggacactagttgattaaaataataagtgcacctacaatagaagaaaaatcaaacaaccttgaacatgcaaatcatcaatcaatcaaacatttataacttttaaattttaagcttaaaaaaacttgagcaacatttttcttatttctactaacatatcccaatttcaaaataacaaagactaactatttatattacaacaaatcaaaaacccatgagcatgtataactctcaattttttttgagcttaacaaaatttgtgcaacattttctctatttcaaaaagtaactatatcactaacaaatcaaatatcaaacaacattaatcatgttcaaagttttaaacaaaacatactaaaaattaaagtctataatccaagcaacaagagtatgttgaaatatggttacaagtatctggttactaatttcagtttgccacattagcaagtcactcttgctatttctgttcactcggatttgtgacttggtagggtgttagttcagtccctataattataagggtcaataccattttagatcttgtattttataaaagttattaattagaccattgttttgtaaataataaaataaattctgtatttttcgtaatggtataaataatcaacttgagtaaacgtaaccagttttgtcataacacttctagatcggattattattaagttttatttcgataaaaaaacttagttcagatattatttagtattatttaaaaaaaactatagggtctaatt

SEQ ID NO: 243674 - DNA, 3319 bp, Cannabis indica
ggtaaaaccttaatgggttcgagctaagacccttagatatactcaaacaacaacaaagatttcagtgcacagttcatatgggattttaggcggaaattgttgaaataaaatcccatattaactgtacactgtaaaaaccagaatatacacagagattacaaaggcagtaaataaagcttatgtggcctcaggcctctatttacctagacagagtatttaagttagttaacacttgtaactaactctcctatctctgctctcctctacaacatatataatgcaaaatacaactcaaaccagatcagaataagaacacaatcagatcgtacaagagacaatacaacaacaaaaatcagtgcagaacatataaaacaagatctgtttttccagggaccaagaagaaatagattgggttttttggaggatgcttacaatggagtaagcattggaacccaagtttaggattcggatatccaaacgccaggacagtgttcatgcaaggaaaagaagaatagttagtactgatttttatagagagaaaaacagagagaaagagagaatataaaacactgtaaaattattagggattaccaaaataatacctgtgtgttttggaatcccaccattgtaatctcttgatcattgaagatctatagtggaacgaggcaagctcgaagaggaagtacccagcacaatatttttggggaacctctataaaaccggtgtcttcttctccttttctcttctcatttttctattgtgttttatacttttttctgcttggtttttgttagtatagaatcggtttagagaggaaactgctgggttttattttctgggtttgtaagagggttattcttcgtgttattcaaagaagaacaacgaagaaggaggctctgtttggggtagattcgatctaagctgtgggatagtttctgggtattgttattcttcatgttcttcagagaagaacattgaaggagggggctacgactaggtttattttgttgctgggttatatgtttgaagaaagagatgtatatttatcactaggtttaatttttaggatttctagtaaattaaaatgacttgtagctcttaggaatggagctgtcgtttttggtttaaaggcagagagtcgaaagaagctttgactggggtaaaaaggtcagttttgaccttggatttctgattttaggaataaattcctacatttccttttcttttctttttttttttttttaaaaaaaagtaactttccttatattgatatcacaaaattttaaaaaaaaaataatataaaaggaattagttaaatattggtattaaatatgggagtgatacataatgaaaaaaaatgtctatatgtacatatattttttgtgactccaccaaaaaaacattatcctaaatttaaaatatggttcaattaaaatttaagtttttctaaaattatacacaatcattatattagttacaatagaaataatcaatcaaataacaattacataagaagatttatccttaaaatagtatttttcgtttaaaaaattcaaacttgtttgtgaaaagtccatattaaacatttttcatataagtaataaggtatagatattgaccaaattttagagcaccaaccagctcttttatgtaaatatatggttaaatttagccgtatgtactaaatttgattggaatttgtgtttttaaaacagaaaatttttattaacattctaaaaatttgtaaagatacattattctaatcatttttattttatataaaatttatatttttaattataatttttttaaacttttttttcccaatttatattcttattatgtagatttttgtaaatatataaaaaaacttttttaaaatataaaaataaataatttattttaataatgtgtactttatcatcttatttataaggtgcaaatacaactccccaactaacaaattgtgataaatatgtactactttgatagcctcttactaaagattccacaaaagtcaaaactatgaaaaggtatagcgtacgaatacgactgggacattttggagtttacgttttctcaaacatgtataatgtagcctataaataccactttcaatgaatgagttcaaataaccatttcataatttctctgaattgttctctcactcagtctttcgttttctttattaattttcttcaaagcttctcaagtcataccaaacaaaaacaattaatttagactaattaaatttccaattaaacatcacatatgaacctatcaaaaatcacactccgtccattcaaactaacggacgtggatgatttgatgatatatgcaggtgatgatcaagtgactcgacaccttcgacgaaaaactttgacctccaaagatgaagcattgactttcttaaaacatgtttgtaaccctcattatcaccattggcaccgctctatatgcattgatgaccgttcgatcggctacatctcagctttaccgggtagtggtgagagcatgttcaaggccgagatgagcactggcgcggccgccgagtattggggccaaggagtggtcaccaaggccatgaaaatagcagttgatcaacttttcaaggactttcctcacttggtaaggcttgaaggttttgttgatgtgaaaaatacggcctgtcaaaaggttatggacaaagttgggtttcgaaaagaaggtcttcttaggagtcattattttcttaaaggaagacttggagattattttatttatagtattttagccactgattttcttcctgtctcaaagttgtaactatatctatatgtaatactattattgttataaaataaagtgtaataagtatgccactacttctcagtctttgtaataattttattccgtgttgtgtaggatgcaatataagagtcccacattggaaaagtatagaaattggttgaagaattggatgtatagatagaaaagatgggaaactgattaacatacttacctggacggggttaatgggtgatcaagaaggcccatagcctgagctggtgacctccattgcacttaggaggggtgcctgcttatggtctccccaagtgggagagccaacgtcataatttgtgtcagcgggggcctgcgttcgcgcggcccctctccaattaagttaaatggctttaagttctactcttcatatggacagaatcataacatttcggtggcgtttggtaggaggtaatggaatagaaaggaaacatttttcattccattcctttgtttggttgcattttaaagtattggaatggcattccaatggaatgct

SEQ ID NO: 243675 - DNA, 2766 bp, Cannabis indica
cttaggacaattaagccgtctcacagagttgcaaatggggggtaatcagttttcaggcaacatcccattggagcttggccaactttcttcattgcagattgcactcaatattagccacaacaatctttcaggtccaattcctgaaaggttgggtaacttgcagatgttggagtctctcttcttgaatgataacaagcttgatggtgaaatcccctcctcaattggtgatctgccaagcctcatggtatgcaacctctctaacaataacttggtaggtgcagtgccaaacagccctgcatttcgaagaatggattcaacaaactttgctgggaacaaggatctgtccagattggattcaaatgatcatgatacatctgcaacacaatctcttactcagaaacaaagtgggacaaagaagggttcaacaaaagccaagttagtgatcatcatcactgttgttgctggtttaattttcatttttcttatcatgggattgttttgggcgatcaacggtaatcatcctacttttctttccattgaggaacaaccaaagcctgatgttttcgacgattattacttcccaaaagaaggattttcttaccaggatcttgttgaagctaccagcaacttttcagagagtacaatcttaggaagaggagcctgtggcactgtgtacaaggctgtcatgagcaatgaagtgattgctgtcaaaaaattgaagtcccggggagaaggagcaagtgcagacagtagctttagagctgagatatcaaccttgggtaagatcaggcaccgaaatattgtcaagctccatggcttttgctaccaccaggacaacaatcttctcttgtacgagtacatggcaaatggaagtttaggagaacaactccatggcaatgagcaaacttgtttacttgactggaatgcaagatataaaattgctcttggagcagcagaaggcctatgctatctgcattgtgattgtaagccacaaatcatacaccgagatataaaatctaacaacattttgctggatgagtttctccaggcacatgttggagacttcggattagcaaagttgattgattttccatactcaaaatctatgtctatgtcagctgttgcaggctcatatggctatattgctccaggtggatattaatactttttgtgttcattcattatataggttgcattaatatatacatcattacattgccatatgttgtgtccaaatatcatagaaatttactattggcatgctcattcgtcatagactctatcagtatgaatacatgtttgacttacactgcatttgctttttcatgtctttgtgatagacaatcagtcaagcatgaatattttgacagagaaaattagtcaatttttaagaattgaaatgtattgttctatagttgatgttagaagaaagtaataaactacttgttatatgatcaatttcagagtatgcatacaccatgaaggtgacagagaaatgtgacatctacagctttggggttgttctgctggagctagtgaccggaaggtcacctgttcagccactagaacaaggtggggacctagtcaactgggtgaggagggcaataaaaaatgcagtgcctgcatatgatttgtttgacaagagactaggcttggatctgagtgagcaaacaacagttgatgagatgactctgtttctcaagattgcactcttctgcaccagctcatcccctgtgaataggccaacaatgaaggaagtcattgccatgatgtttgaggccaggaaaactgtcagcaaggactcattttctgcctcatctgaagctcccttagcagaagatgcatcttcaaaaggtaagacaaaccttttggaacccaatttactatatgcacattggtctaaaccttttggaatctttacatattttttatgatcaaggaccctgctgcaggtaatgaagtgaactaactctggctttgctttgattactggttactgtgtatgcaggaataatggagttgtgaattaattccttcaaaagcggtggtttagtgaagttggacacatgttgatcttcaataacttctactttcagaccacgtgattaatgatttcacctctcattttgaccgtggaggaaataaagaggacgttctctttggtcttttttatgtactaaccatctacatataaatatatatatatatatatttatacaatttatcaatacatgatttggaaaggcttcaaatccaagcataattaatatgcttattacataattcactcactcaatcgcttgtaggcaacacaagcaaaaattagatttgattctcggattccctccttttctttctataatattgttaattgttattttaatattgttactggcaaaagacatgaacgaaaataattgctcatattaacatgtgaacgtccacagttccatatactattagaacacagaaagctaattattaagggaagaaagagaagaacaataattatcaatttacgaataaaaacaaaaatcatgcaggaaattaaataattacttacacaattataacgagaaatatcagttagattaatacaacacacattcataaaataaatataatttagtatagaatatataattgaatacagaagacttgtcagttgtcagtgctattatatttttattaatatataacttaaaaagtcgtctaatgctgctgaggtttttccttttcttttttttttattttttttttgttttt

SEQ ID NO: 243676 - DNA, 2304 bp, Cannabis indica
aataataataataataaaggagttacatactgtcgcttggagtctggatcatcatcgctatcatcttttatcttagtcgattgagaaagtgagactttgaactatcattagaaggcaaagctgcaatttttggaatcagaggagtatgtacatgctcattttgagtggatggtttcctatgctcatctactgatgttccttcaagacaaaccaaaatgttagtcgaggtctcttgaggatcaaaatgtagtaagaattataattatctcagtttcttgctcacctttagcagggtttaacgaggccgccccattttgtttctcttcaacaacagacagagcgaaaccaacagccactgggttgttatgctgaagttttggatgatcatgctgaccaaagtaaacaatattgacaatcttcccttcatgtgaacattccaattgctttttgaccagacagtttggatgggtacatctatagtaacttcgcacatattcatttcccttcacaagcttctggccatattttctccagttatatccgtcctcagacactttctcacgaactatcgatggagtgcttccttcctgaccagattgtgaggttcggactccagtttcagggacttttgacgctttcatggatattttaggggaagattttccaagttgactcaaattgaatgcatcaagtgcagaacctcgcactgactctgtttttccaggttttatacatgttaatttcccacttttatctgattctggtatggaaacatcagtcccacagatctcttgtgacacatgatttccagtattgtttctctcggtctgttgctgcttgtccagaacttcagctgctacactttcttctcctaaaggaaccatttgagcgtgtagtcttatatgtgaatataagagtctgcaactcaattcaggttgccactaccataaccaacgttgatctcaaaccaatttcatacgctacaggccatctaacctaagtagatgaataagcaaaacaagatttccagttcattctcttccctctatgggatggatgactacgctatcattcagccaaaacactgattgaaatagcagaagcaagcaaattcagcccaacaaatacctaatgaaaaacgtcaaattgatcacacatttccatctctaatatagtaaaatcagcactaactaaccataataaaaattttgggtttaaaacccagaagaagaaattctcaacataacaattaacaaaaaacttccaaagtaaaattagtcacttgttcagagcatattctcttcacatttattcagacgagaatgactaaaaattagaaagaaagagaagaaaaaaacaacaaactttttaatggtattttttccaattcccaaataacttcttgtactgtaagtgattaatttgagttgagaaatctatggaaatcttttattatgaatataaatcatcaacaacaattcccaatcaaaagaaaagagagagagagagagagaaatattaaatatatataattttgttatttatttataatttcagcttttacgtacaaatttgtaatcaccaaatttcacacaatcaaaattcaactttatttttcttttctcaattacagtttcctgagctcttataagcagccaactacagacaccaaaagttcatcataaccttaaaaaaaaaaacagaaaaaataatgatcactaaattcatgaaactgaaaaatagtaaaattaataatactagtaggaataataattagcgaacctttcgaattttgagctggaacagtaaaccctaggtggagcgcgaatagttccaaaagcaaaagtttggaatagaaaagaaaaacaagaaaagagggagatcggtccgggcagaattaggagagttaggttggccgttggcgtggtgagatgagtagtcgaaggtgtgagtatcaaaagtctaatccattaatctgacttggacttgagaataaccagagtgggtatttcgagctctgctcccctgtcctcaactccacaccgtatttccctgttccctccctcctacgaagtttccttttccttgtcttttccacacgagctgcctaattgggctttcgggcctaacattcggaatagtgaaagccgcctcatggatcaacttttgagccccatcaattttgttcccatatatacaccagttacaaaaaaaattacgggattttcatttttacatttcaaaagacttattggctttcctagtaaaagactttgattatcttacattgactatttacaggat

SEQ ID NO: 243677 - DNA, 1389 bp, Cannabis indica
tatgcagacaatgatgttccatgcttacattctaatctgatgtttgcaggttttatctgttttaaaacttgagaagggatcccaaatgcctgaagattacccgaaatcttttagagaagcagtagcagttttccagcatgctcaaatgtcagtactttattccacatatggactcaattgttatatagcattagtagtgttacattattctgatctttgattatttccatacagatatgatgttgacatgaaaatgctcaagcatatgaaacctcttccggaaaagcttctgcagtctctagatggagagctcgatttcctgggaccgtatccttctatttttacatttgaaaacgtcaatctctgttctaaaatgcttgaacttgatttttcattgaccatcaccttcataactcgagagagagagagagagatatctcaaatagtcaggcatgtggtttgcttccaaaacgtctgaggttcgagtccctcccaggtacttggatagcaaatactatgtttttttagtctccaaatattgtaggcttaagtggggagcttagtttcaaatcaaagaaatatgaccttcctcaaagttgtatttgcttgttcctagcaatctaaagactaggagattgtgttttcgccccaagattcttagattctgtttggctgagcttctactttcttcttttagcttctcaggaagctcttttcgagaaagctactgaaactgatttctaaaagagttctgaaactcactggttagccaaccaataacagaattgcttttggagcttcgaaagcccaaccaaccagggcctaggaaaagatcatttcataacattagtgtctcttattcttttgattcccttgaccaatatttgggtggacttagtgaactccctccatcaatagctacagcaattgcagaaggaaaaatggatccaattagtatggaagcctttgatcgtatcccaagttcgaaatctcatacagctcctattaggatccaaacttcaggccagccaccaagagttgaggctcctatggtgtctgcaagagaaagttgctttgtcactttttccaagaaagccaaacaggttgacaatacaggcaagtttaactaaccttttctttatggtttcttaaattccaacattgtcttgatatgcatgttctccaccacttacatgcatatacactataaaaagtaggttctaatatcacctcaaaatagctactatttttttctcatcgatcttgaactgttgaatcataaatggccaattttgatcggataatactacataaagaatcataaggttctaatcttaaaactaattggtcgtaaatagagatactcgtgagtagctgcattcatgcatt

SEQ ID NO: 243678 - DNA, 5187 bp, Cannabis indica
agaaaataaaaatcatttctctcattttttctcatttttctacacattgacaaactttactttgtttcgagcaactaaagcaatcatcgtcgatcttctccaggtgctgtaattctcacttcctgtgagaattttgggaactagaacaactcttggattatcaccattagaaaggaaaaaaaatgattcaaaagatcattagcattagtggatctagaattttcaccaaaaacagaatatatgtttgaatcattcgaagtattctccaaatcacgagtgctacgagtttggactcctccacctcgtgccatgagtattagaaagaaaaaaaaatgattcgaaagatcattagcattaatggatttagaattttcaccaagaacaatatatatgttcgaatcattcgaagtattctctaaatcacgagtgctacgagtttggactcctccacctcgtgccatgagtatcaatccacacgatcagtaagaaacaaaagaaggatgaagaagaagaagagcacacaacaataatagctctgataccatatcagttcaaaagaaaaaaatatagagtagagaaagaattctatattttgtattgaatcaatcaaaatagaattacaataaaatgcagctacatacaatagctcagagttagttacaatagattaacaacattcccaactaaatatataatagctcatacaaaacctcctgactaccaactaaccaacctcttatcctaactaattttgataaatactgttaagacccagagatggtaacttgtatgtcatgatgggcaatagcttgaaaatgacccttggattttcctaaagtaatccttagtcagaagaattacagccagaaatatgagctctgtgatgaagaaatccatggcatttttgtagctttatttcacaaagactctctacttcatttgtgcagatagaagagaggtacttgaaactcaaacatacttcatgttgtttcctgagaaagtcgatcttcaatctcaacttactcctaagaaggttaataacacagaaacaatatgacgagatggatataaattaccaagggtgaaaactgtggctaacctatttatgaaggcatatttcatcttaggcatgaggacaacgtttcttttgactaaactaatataatccttcatcttaggtgtgctacaatatctggtggctatttttggcaaactataatataccatttaatcaaagcattagtgacacccatctgctcttgctctaagatttctgcttgatgactatgttgcttttcgccattttgggctgttaactggatgttcttgcccactttgacacacaagtcctccaaactcaccaactttcctgcatccacagtgaaaagttagttctaatagtgctgacaattgggggtaaaaaaagggagctaacagaagtaatttgcatgccgacaaaccacttctcatcgggtacaaacaacttcacatcagattttaagggaaaaggggccacaaagggtgctaaatctatctatggttgatcctcttaatataccttctatgataatgtcttatgttgatagtgatgcagaaagataattgtcttccttttcaaaaaaacaacagtttctgagatttcaagggtacttcttgtgccctgaacatgtagccgttcaaggctcagacttacatactcttccatgaaatgatgatcttcctggaaaaaacaaaaaagtataactcataatctaattagtacatagaataagtccatttctacaagattagaggaattcgataatggaaaaaagattaagagaaaaaacagagaattctaaaagaaactttgttctaaacatccatactaaatgtatcagctagcaactttattacacaaaacaaatactagtataaaaattgataggcatcctattgtactccacgaatggtacatccaattaatgtgaccaagcttaaaattacagtgaacagtacaacaccaattatatgaacaagtgaaaaatcatgtcagtatgtgaattcaattgtattattaactgacaattttggccaagtcaagttgcacaacacaaacgaaacaaaattacttgaaacaaacatcacccacaagcaatgatcccaaaaatgttttataaaacattaacaattttcatgattataagcatacaacatcacattcgcataattgaattattaatgaggaatgacaatataagcactgctgcacaaacaaataatggactaaaacgaaaattaccatgcttttcaatagattttggtcagtgccataggcctagatgcgagcttaattcatatcaaaagacagtaaatacagaaggaccgctcaatcgtcacaatagacaaatcaatctaggtcctgctgttcttggtcctatccactatataattctcgatcatttcatcacaaagttcaagagtaacatccatgtttccttctttatagttcatatcaacaaaaatttcatatatttctctatctgcaaccaaaccttgcctcctcatttcttcaaatagtttccttgcctcttcaattttctttctcttttgaaaaccctttattaaagcagtgtatgaactcgctgtaagaagaaaacccttctcaatcatttcccttcgcaaaaactcagcctctttcatattccttgctttacaatgtccctttattaaaatgttataggtattgctatcgggcatcactccttgtgcacacatgttcctataaatctcagttgtgtaactcatgttatttctgctggcgtactgcttcataagagaattataggttgtggcattaggcattatacccttatccaacatccacttaattagtttattaccatcttccaacattccagacatgcaaaagccattcatcagcacattgaatgtaacaacagtaggttgaatcccactatccaacatctcttgcaagagcatgtgggctttagacatcttccctgtcttgcaatatgcatccatgagagtagtatatgtaaatgcatcaggatgtggcccagccaccttcaattcttccattaatttctctgcatctactatgtttcctgatttacaaagtccattaagaattgagttgtaagtgcagacattcagttgaagacctttcatggacatttcttggagtagttcatttgcagtatctacctctccttgtttacaaaggccatcagccagtgcagtgtacgtgacaatgtttggcttaagtcccattttgaccatctcattgtgaagaccgaaagctcttttaatctcacttactttgcaataaccatggataagcgctgtataagaaaattcatctggttccaaccctctaataaccatttcattaaaaagcttatcggcttccatcatctttccagcttgacaaaatccatctatgatagctgtatatgctacagaatcaggataaattttcctgatctgcatttcctcaaacaacctgcatgcagctgaaacattgcctgacttgcagaaaccatctattaaggtagtgtatatcacattatcaggaatgattccctgcgacattatttccctcaagaccttctcggcttcagagagttttccactcttacacaaaagaagtacaatgctgctgtaggtatacaagtttggttggacactttttattttcatttcttcaacgagcttcaacaccttctgtaggtcaccaacagaacagtatctgctaattatagtactataacttacaacatcaggtacacagcctctcaactccatctgcaagagtagatggtgggcttctttgatttttcctaattcacaaagtgaattaataatgatattatatgatgcagtattccagcaaatacccacttgaggatattcattgaaaacttttattgccatctcaattccatcaagattgtttgatagacgagtaagaaataaattacaagaatcaacagatataaccaatccataattcaacaatttcatgaaaagttttctcgcttcattgagcatcccaatttcaacaagcacttggaagaaaatatcaaatacatatggatctgaaccccaatctttgtatgtgtatattaatctatcggaaaaatgaatgaatgaaagactaatatccaaattgggttttctccaaaaatcaataataaccccatgtgccattttaagatcttttgatgctgtggcaatttgagcaacaatgcaacgagcctctagtgttgattgtctacgaagacatgcccaatcaaatagatccaaaactaaattataatcattcctaatgttcataagaatccaaattagatggtcagacctgaacttagattcacaagacttcaagatgcgacgcaaaggctcagagcgacgcagctttattgtggtagtaatatgatgaacaagttcagcatctctaatagtaggtttcttaggtgaataatcaggaaaaggtctggtatttgttgagactacttggctcaagtttcttctcaatgagaataaaggagagaaatataatccaaaacttaagcaaggctgaagagaaaagattcgggaacagtggaccgaaaatatagtgagcctcttcatgtctgtgagaggcatccatcaaggaaaattttaagattgcttacctccaatgtagctgctctccaccattgataagaacaaaaacaaagaagttttcacattattccatcacctgtacaaatacagtcagtataacagtaaacaaatgtccaactttatttcttcaaacattatgcaaaaacctacactattccgtttagggctgcacatggattggattgaacaagttgagggtattttaatgtaccaacccaattagttcggcctataaaattataactctttcaaaatgctttcaaaatataactcaacccaacccaaaatctaatgtaaaatttgagacctagctaattcatttttccatatcataatattaaaaaaataagttagatcaattttaaggtatttacatgactagaacttaaccaccctaattagtaattattaggatcatgcaaaataattattagttattacagccatccataatcacaaataaaaatctgaacattaaaataaattaaaaaagttacttatttaatcttcaatagc

SEQ ID NO: 243679 - DNA, 2411 bp, Cannabis indica
agagtctcacattgataatgttacaagaatgtaatactttatataaagatgcatgagctaattttctcattgcaaattgattttgagatggttaccaatacatcttactctacaccaagtcctactctactttctccaccattgtatttctactttctaacatggtacccaaaatccaaagccgatcataaagtagagctgaaagagctatttgtgtttcggagataataaggcaaaaaatcgaaccatccaaaatggtgaaccaaaatagtcactatcttgagggatgttagagagtctcacattgataatgtgtagaaatataatatcttatataagatgcatgaactacttctcttattgacaaataattttgagatgaaacctaaaggaataattcttgttgtgcagagatgacaatgagaatgataatgaactagattcaatgataaatgatgtgatcaagaagctaattgagattgagaacacacctctaacaataccaaatgaagagtctaaaaccattctcaccgaggacgcttatagaaaccgatcaaaattggagacaaataattcaacaaacttgagccctcgattcgaatcaggagcaacacttggtgattttctggaagtgacaagtttctcaagtgatataagaacatcatcaacaacaatgaacttggaatactcttctaagagtttaggagtaattgaatgtgatcaaaatctaaaatgtgaatcacatgaaactaaggttagtactaaaagttatgatttaccacacttaccattgtctgttgatgctgttgaggaaggtgataacaatgactttagtaagtaatttttctcattatgattgattctttgtaattttagtagcaaatttaatcataaatagttactactttaatggtttatttattctcaccccatttaattaaatttattataattttctttaaatttttttctaacaatcccttaagttttatcttttttaacaaaattttctatatttttttttgaataaattatggaattttattaataataattaactaaaataataatctgcaatccaatcagaacatatttcttattggaaacacgaccaagatatgaattagaaaaataagccaaataatcagtcgtctaattctcagatcgtttaacaaaaaaaactaaaatgaaatcagatgaaaagattccatcatcacaatcaaccttaagagcacttataatctatttcatccatcgctcagatgacacaacaatagaaattgttgcagtatattcattcaacattgtagctagagcactcaactattgtgtaaggtaagtaactacactactaacaaccccttcggtggcagagaacttgttatttctaactactaacagcgattttattgcgagttatcataagaacaaagaagaaccaacaacaaaacaaaacaaaataatatcacacagacaagactaaaacactcaaaattatgtcacagagacaatactaaaatactcaaaatcatatcatattgagaaaactaagtaaaaattaaattgtagtagcaaaatacaatcccgaccaagtcgcacctaaccctagagaaggttggtgggcttggctgaaaattgatgttttagtgatattatatgcatttagggggttaatttttttattgagaggatattatttcaagtttctgaaatgatatatttaatttttgaaaatttatttagagaagaataaaagagcaacctttctccataagacataccctaactaaaaaaaaagaaaagttaccataattctctttcatcccatctctcaagttttttttttttttcttttttcattttttattattttattttttgaataaatacctaactcacaagtcaataatagaactttcatatattaggtaaggtaatgatgaagtgggccacatttaaacgctaattccaaccagtggcctaaggctggcccataattggcccaagtcagatttagtgggcctagtattgaataaaagtccaagtttatatgataaattttttttcatttttcgtagcaatattttaatgggattattttacaatttacacaaaaataataaaacaagtacaaatatatagttgtaccaaatttaaaatttttacaatttttatgatttttacttatataaatacggtcttttgtatatattttttatgtttgtacttttcgttaattttggtgtttgatttttttgtttattgttttttgatttgctatttttcctatttactttttattgtaatttttttttttatttattttttgggttggttttttagttataactatcgtaaaaatacaaaaaataatctttctaacgtaaaataataattttttactaaaaaat

SEQ ID NO: 243680 - DNA, 1922 bp, Cannabis indica
ttgctataatcaataaaaagcctgaagcaagaaattattttaattgtagtagttatgattttaaaacttaaatatatacatatattcggggcgggtatctattcccctgtcccgttttcaactcggttatgaacatttaaacccatatacctgtccccacccccgaatgttaacccctgcccccgccctattaggggcgagtacccgcaggtacccaaacccacaggtataattgtcatccctatttaaatatataaattaattaaaaaaataattttaacttttttgttttgagaaatcaaagagttattatattcaaactaatccaaacatttacaacctatcaagaccttataaactcaaggcatggcaagaactatacatttgtaagtccaaaaaagtataatttataacttctcaaaccactttctatatcttgcttgctaatgttctttaacaaacaatactaatctatttttaacaatttcaacaatctaattatatcaatacaaacaactttcagacatcatttctagcttacaaatatatgataaccaaaatatcaatgcaattagaaaaataatgattcttgaactcactcatctttcctccagcaattcacgtactgagtgttgaagagaatcaactgatcagacattctacttgagctatttctttacttccatcaagcatttcttgctaataacacattccaaaaataaatgagtaattgttttcttcccgattccatatagtaagcacgagcaatcctgcaccatattatggtgatacaacctatcctgaatattcaattaattttgaatagctaataaaaccatgtttggagagattaaatctaccccaaatctccttaatcaagtgtagtttatccgcttctggacagatgcgcttatacccctaatttatcttgtatttttctgttgagaattgctgctcatcaaccagatttttaggctcgtccttcactgtaacaagctttttccagtagcaactacattgagaaggagcagtgtagtcccatcaattttgctcttttatgtatacattattgatctatttgacccaaggtcatccttctttgttgagatttcctagacatatttaccaattgccgctttgttctaagtgaggatattttaaaagacaaggcctccaacctttttaagcttagaaatttgatcccaagcaatcattcccggacttgtactgtatatgctttcccttgccacaagaacactcagcaggtgacattaatctcattcagaattttttttgggaatcaaaaatatatttgactccaatacgagtgaatggagataagaaccaatttatgagtgtgattcttctagcaaacgatagatttctggtactccaccttcttattctcccaatcatctttctattaagacttcacattcttttgcagatatctttttagcacaaattgggactcttagatttctgaatgggagggtgcttcgttgaaacccaaaagcatctagtagatgatacaccttattttcatttagatcatcataataaatggcagattttacttcacttaattagatataagcctgaggtttttgaaaaaaaaattgagcccttgtaacatgtaataaacttatttgaagtcaccattacaaaataatataacatgcaaaattaaggtgatttatcatgagctctccacatctttcatggactttaaaataaagtaattgttgagttttctgccctaaataaaactcattttaatataatcaaaattattaattaataaatatcaaaaataattttatgttgcatgattcacatattttatttcatgattatacttaatgtataaattctattaagtctagaacagatatatatttgttcatgattatagtgtcgtc

SEQ ID NO: 243681 - DNA, 1245 bp, Cannabis indica
ataaaaaatatggcatattgtttatagtttatgtatatatattaatattatatatttattaaaagacaaaatataaagaaagtaatagaaatagtgatgatgtaatgtaaaaaattttagtaaaataaataaagtagaattttgataatgtattttaaaaagtaaagaaaaaaattgttgggagtgttctttatgttatgtgatctggggttgtcttgtttcctttctagttcctaatcattatttttttggacaacattaatggacaaaaaaaataagtttggtttattctgaaaataagagactaagacagtttaattagctttctctttcttacttaccctttaaagaatagcttaattaacactttgttacgcttaaaagggtgattgaaattaatgcgaactaagtctctttatatatgtctagaaagaaaccaaagaaaggcattgacataattataataattgcctcttcactaggtctggtcaaggtttaggttgtgagtgagctgaggtgtttgatcagacgatcagatcaagagatgagttaatccaacggtcacgcattcctaactccagccatggcattcatttcaccatttaatgtcatttcctgttgtagttccagttagatgtatacagttgtgtacatcattctttctacactttcttttctttaattattattaaaataatactaggccgataataataataataataataaacagattttattatctaaatctatttaatttattagtacaataatttctaaaatatgtggaattttataagtatataagaaagtgtacacacacaaaacaagaccaaccagaggcagccacatatagcttgaagacagtaatagcagcagccttcttctgtgacttattttctgaggcctttgtctgccttcaatggcttcttttgttggtaaaacaaagctcttcaccattttggtgttatggttatccatcttagtctccttggctcaaggttcttgctttttctactcttgtttcatctatcaatacttataatttatatacatgtgtgagttttaatttgttttgctttgctttgtgtacaaattttttttatgactttggatttttcttgttcataacaaaaaaaaagttcaagactgaaatctcaaaaggggatttttgtttttttagtgttgatatcaaaccccttctctttttctccaccatacaaaagagaatatttgtatatattc

SEQ ID NO: 243682 - DNA, 2089 bp, Cannabis indica
aaaaataaaaaagttaaaaatttcagtatatgatgtaattatcctttaaactttattgattatatatttatattaaaaatttcaataatatacattatgtgaaaactaaaaattaagtagccaaaataagttaaaaactaaggccgtctctgacattatgttcctacatacacaattcgtaaaatttaatgtaaaatttaatattctatttttaaaaaaataatatttttatttaaaaatataacaaattaataactttattattcattttattattttatcatagattaaaataaatgtaaaaagtttataatttaagaaattaaataagtaattttaataatgaaacaatgatattaatggtaaaaatatgtgaattttatgtttttaacacttaaatacaaaaattaaaattttaacggcaaaacttattgaatttctattttgttttactctttacacttcgatttaaaaaattcagttaagtgtcacattggaatacccacgtgcagggtcgatgctaagcataggcgagctagccctgcgcctaggggccactcattttagaggcccaaataaaaaaatagtactttttaaaaaatatacatttttttttaataattttcaacttaagaccggccctacccacatttacacgtggcaatctactgtgacacttaactgaaatttttaaacagaattgtagcaagtaatacagaataggggttcaataaattttgttatcaaaattttaatttttatagttaagtggtaaaaaatataaaattcaattaatttttcgaccaatatatcctaataaaatattaaaaatgacacaaaaataaatacaaaagaatattattgtaatgtaaaatttccatgatactatattgtaaaccaaacttaaatcaatttttactatataacaattatggaactatgaatattttggcaatagatctccattggagatgtacctaagaatgtagggtattaatttttattcgttcctatgtatatatttccacattgtgcaaaattattaaacctctcgattaataatggccatatatcttacctatattaaactcaactaaattctaactaactctacttcttcacattataaatatgtataattttaagatataagaaacacaagattgttctcacttagtaattaatttcacttatacatatacataattataatatggcttccataactgtggaccaaattcgaaagagccagcgtgctgatactccggccgccattctcgccatcggcacggccaatccggccaattttgtgacccaagctaattatcccgattactacttcaacgtcaccaaaagccaacacatgactaacctcaaaaataagtttcaacatatatgtatgtataatactcctctttctctcatcaaacttatatatgtaatatacatactagttgttttttgaaggaatatacatactagttgttagtaatatgcatgtttgtttagagttattagtgttactattattattaatttaaataataataataataattaaattaatacaatttaattatatttatatttagaaaatataaattatttaattttaaatttatttataaaaagaatatatctaactaattttattaaacaataaaataagtaaataaattaaataatataactaataaatttgttgtaaagtatgattgattaattaaattagtaaacaactcgcgattcgttatggatttttaaaaaattttaaatttaaattacattttttatttaattataactaagtaataaattgtatcaaattttaatttttattaatttttcatgcctctcccagttattataataatagatcaaaaagaatgatttataacttttgttttttattacttaggttccttatccttatattataaacgtttattagtgttgaataaataatatatatatatacatatatctaatagatttggattataattatttttcagtaattatatatatattgttattgatatttattataactactaatatgtaaatatatatttttttaaaaaaatat

SEQ ID NO: 243683 - DNA, 1528 bp, Cannabis indica
aaaatttaaaatgcataagaaaaattagataaaaaaaattattaaattttttttcatttggaatgtcttttcttctatttcaaaatggaattgtcatttcaacactttaatatgcaatcaaacaaaggaatgaaatggaaattattttcttttatttccattctatttcattacctccaaccaaacgccataatacctcacaattaggattaaatgcactatctaaatcaagtgaaaccgctagtagtagcaaaaccctaacttttgccatactcgtttgtacattataacattttcatatggtaaaatcgaaaggaagcaatacaatagtgaactttaatttaaataagacaatagtggacttttctaggaatgttttagaattcttgttttgggtcttccctatacttttatgtgtctaaacattatttttcttgtttgtgatgactcttatgaaaatagatcattatgcgtgcatattcactatttgagatgctactggacgacaaagtatttgaaatatagacaaaaaaaaaaataccatttaagtaatatcttgtttgtgatgtcttgtttgcatgcttgaggttgatgatatggtaatgacaacttagctgtgtaagcacaagatttgctagaacgcctctcccaactctcacaaagctcaaggaagtgctctgtaagatctttgttctcttcatacatctcctaaacatttcattgactattatttatttataatgattaattaagttaaatactaattaatcacttacgtgtataattaaatttggaatgagttattaatacctaaaagttgtttaagtaggattttattaatagaataatcaccaagtatattgggttttatttactatgtgggatttatatatatataaatgtgtgtggcataagattttaattttatttggttatgatatactaaaatagttatttatcttagtgaattagttagttaagcaggattttaattataacgtccctgacgggggtttctctcacaaaatacttttgtactacgtacttatcattttgtttgtgagtatgcgtacttacgtattcctatattttatagcacactataacactatgtaataaggattataaagagtagtgttatacccattacattagaaaggattacaaaaaggtaaatcaaacattagaataacactatgtaataaggattataaagagtagtgttatacccattacattagaaaggattacaaaaaggtaaatcaaacattagaataagaactttaaggtggtgtttagttggtaggtaatgaaatggaatggaaatgagacaatttacatttcattcttttgcttggttgtatttaaaattattggaattccattctgttagaatgacctttctatcattttggtggaatgactattctattttgaaatggaaagtaaagaccatttctaatgcaaaatttgaaaaaatttaatattttttttatcaatttttatttatgtcattttaaattttatt

SEQ ID NO: 243684 - DNA, 1703 bp, Cannabis indica
acacacacacacacacacacgacttagaccaaatgagtcggtggagtgatttacaattgtaggtccaatgggttgtggtggttgtatcctgtgacgatgagtgggcagtgctcggggtagttcaacccaatggtggtgtggcagttgaatctggtttggttcatcatccatggtagatctgggtggtgatttataaggatggatatggtgcctgggtatttaagagaggaagaaatgagatgaaatttgggttagggtttttaattttgaggtatttcagaagaatataaaatagaacagaaaaatattttttttcattattgttttatttttataatttaattttttttaataattaatattatgtggactaataaaaatttgctatgtgtacacttgtgtacatgtggacaatctactatgacacttaactgagatttttagatagaagtgtaaagagcaaaacgggatgggggttcactaggttttgcggtcaaatttttggtttatgtagttaagtattaaaaaaagtaaaatttaagtggttttattttaccgctaatatcctttaaaaaatttatgataaaaaactatgtttgtcaaatatatatatatatatataaaatagagaaaagacatagaaaattatagtgatttgactcgatgcttgagccacttgagcctactctaccttttgaagagtactatgtgtatgctattatgaccagctccttcaccttcaaatggaggtagattcacctacttatagagttgaatattacaaaattatggtcataatggattcatctttggcctttaaaaatcacatttagggataccatcgagaatcaatcgatagcctctcgacatgtttcgatagtttttcaattatatggttagaaatgttgtccttaaaatttctcaactattttctaatagtaatgtgacatgttttcgatattttactctgtgtgcatccgtttacattatttagggtgtttcttgactaagtatttttcattattattaaattacatgatcgactgtatttgtgcttgtactatgtgatagtgtttgaggtgttgagggttttagtttgatctttaaaagcgaatgtagtatgacgttgatggttgaaatttacatcaccttacagaaaatgcgtgatattttatatgaagagttggagattgactcattggagtatgatttgaaggctaatattttttttttttttggctcaaaacagtttttactgtaatgtcattttcgacactttgatagtttgccgacaatttttcaaaatagtcacgatgctttttcgaatttttttcaacaattggtaattttaaataatgaaattctcctacgtatcatactgggacattttcgatggttttttgataggattttgtgttcacgataatttttcaatgttcttttgatttactgcatttgattcttttgctacgtttgtaagtatgtttctcgataatttctcagtagtttttacgattattaggcaaattaatttgaattaaacaaaacattttggagtaatgattttgatactgtaaagaccgcttagtttaatttggaaattagcagttaatcacgtttaattatgaaaattatttatagctatttaaataattagtatactgttattattgaattcagagatgcatttttatgtcatgtag

SEQ ID NO: 243685 - DNA, 2294 bp, Cannabis indica
tttttttttttttgaaggaaattctttctttaaactttccatctgtttaacattctttaaaaaaatatacatacaaaataaaaataaaatatacaagaaaaaaaatgatgtgaaattttattaaaaaaaattatacataattttttaaaaaattaaattaaataattattgaatttaacacaaataatgtgaaaaataaaatattatgtgattatttaagactaatttaagtgttttttttttccaatgaactttaatgtattataattgtatctaaagtataggttagtagttgggtattttgtcaatttcaataagaaaaaactaaaaaattggtaaaaaatttctaactctcttcttcgtctggcgatgcatgtttgttggtttggcatcattttctactctaaatcagtatatatgctgcacaatgttctattttttattatttttttaatctcacaatgttcaacctttcttccttccaagttaattttttactttctttgcattgaaaatattctaaattgagaaatgattctcgaaaaacaatatttcatttaatagaagataacttgaaaaaactcaaatccaaacaaacataaagtagatatatcttgacttgtacttcacttctcaatattattgattagctgagctcaatagtcaataatctctctttcacaacttcaagtacacgtacgtacctagtattgactcaacatgtttttcataattatgaaaagaagcttcagaaaaacataagaaattgttgttaattaatactaatagtaagtactaagacaaaacattatatgccttgtaatataagtttccatcttatttatatgttttattcacaccaatgttaaaagacccatcacaacatttttaaacctccaatgaagatgactactttggaaacagatacttggaaagtaataacactactcttcatataattatatacccagtaaggacccaatttagtataataaaaaagacaggacctaaacaaataaagaatattaaaaactaagtaatagagtgggataattctagtgccatatacacaatatatgtttattttatcagaaactataaacactttaatatgtacttgttataaaatgaggctaattttttgaacccttcttctcctttgaatagaggtcaaatcatctactgctgtagaagaagctcccatggtgctaaagggtgtagaagacataaaagcgccaattattgtttgtcttgaattggagacaaaggcatgttactgaaaacaacacgatattgagatttaatcttaatggcaaacacaattgtcttaatcagaaattaatgttagtccctccaagtttattatttcaactcatttttctatacttactgtttgcacgtcatgaaattgctagttttcctagtataagtgatttccactcctagaaaatgttcactatgattttgcataaaccaacaattaaggcaatgataaaaatggggaaaaaattctatataatagttgtcaagtacacacctagttgcttcaatgggtcccaactccaacttatgtgacatctgtactttcagtgatgaggcttcaattcttcaagttttctgtaaaaaaaaaatcatagatgaaacttaagtggatgggcaaaactagatgagctagacatattcactatttctatctgtgaacatagatgtcaatgttgaaagtaaattattacctcccattctctgaaataggttggttgtgtgcaattgtcttcagaccatcatgctttccgaattcagaagcatcaataaatccctataaaccaataaggcaagcacaacaggaatcttacaatttgtacaaaaagaaaaaagaatacttcgcagaagttattaagctacatctttagggaaagaaaatagttatactatgaagtaataaaatacgaaacagaagatgaagatagttctttgcaaatctgtagctttcgaaaagaactgaaattttcttacaccagattcatcttgcatccacccaggaattttttctgaaagaagtgagatataacgctccatagccgtctctggagtcatttcagcaagctgttgccaagcgttccttgcaaaatttgaccaatttcgtcaatcacttaatcaggcaaaggcccccataacttctcttattataaagtactaaagctgttatgcaaaactagaaggacaatgcatttgtgatttgagaatgaacagcataatttaatctcatagcacttcaagaatctgttccttaaatc

SEQ ID NO: 243686 - DNA, 3587 bp, Cannabis indica
gacttaatttttagaaagaaaaaaatttaataaaagttctttcttggatttgcttaatttgtttttcattatcctttggtttaagatcaacaaaacaagcatggaaggaggaagaattttcaatgtttcaagtaggaatattcagccttctctgtctggttagctcattgactgactttactacaataaaatagaagtcatcagtcaaagtcatgtgtgtcatttgacgttttcctagaaactacgagctcatatacatttgactttaatttttatcatcactctctatacccataataaaagcctgtctttttttcctacatcttacatagaaaagcatcaagacccttgtccttatacatcatcacctctcaaatccaagcttcatggccaactatggaaccgtccaaaggccgtccacaacctcagcttctccttctctaggcgagccctacgacccaaagaactccacaagaaagaacctatcggtatccgacttcaaacacctttggcctttcaatatccccacaacctcagaatctgcagccgtaagaatcatcagaaacctgggtgactttggattgttctatgctcttttcatatggattggcctcttcatatcccttataccagaaagaaaagtctcattgatttatttggtgattatgacctatataacatctgtgtaccttctggtgttgagggcactgcccatgtctattgacctcaataggtttatagacaaaaaagttgtccttttcattctggctatagtgactatggttgagctcatcttaacaaaggctggtctgcatctccttgctactttgggttgtggtgttccaataattttggttcatgcagtttttacaatccgaagtgagctttcggtgggtggtgaagatgctgtcgaaggtgttcctcttatgaactccagtgaaacagaatcagttgatatagcttgaagagttctctattaagtgtggaattaaatatttagttttaattttttttaaaaaaaagagtttgaagttttaattaaattttgctttatttgtgtactgttgattctaaatactgcttagtttagtttaagtgttcttaaaaggatatttttttagaggctttgttctacttagcactgctatgctctcgtgagatgcttattgtgaatgatagcactaaaaatttagtggctgcagtcaataatcaacttagtgcactttcgtttcacctcataaataatattgggtggatattaagaagattattggaatgtttaaacaaccagaaaatgatcaacaagaaataagtgccagctgtcccaattctgttaccattaattcaagtttgttaagttaattataaattgatagttcgattcctttataataaaaagtctataaataaagaatctatctcaattggattagttgagcagctcaaaccatttctcactcttcattcattcatttcaccataagcaccagagaatgttcaaccaactgctccattataagctcaagaggctgccttaccaaaaataatctactttcgctcaatctcagatttcatcgatctaactatactctgtaaaaattacttgtgcttgctgctgtttgtgcttacaacctcgacgactatcttcttagcacaatttcacaacctccacagctttttgcaggtaactatcctaagcctgcatttcaacaatggcttcgttttgatcaattcattatgcattggctaatgaactcaataactttattgatgcttgattatgtgataaattttcaaacctctgctaagatttggacaatcttcactaaactctgggccaccacatccagagcaagactccttctgatccgtggtcttctacaatccacaaagaaaggaccattttccattgatgaatacttcttgaagatgaatccgtatgcagatgcacttactacagcagcacaacctctttccaatgatgacttgattctttatattcatggtggtcttgattcaaattatgaagtagtagtggtgaactttacctctcgaactgacaatcctattttgcaagaggttcagttcatgcttcacagtcaataaatgagaatcaatcaactcacaattgactctcttacaaatgtgcaggcaaatcttgttaacacaacaaataccaaaggtggctatcaaggcaattcaggccatggagatcatggcttcagaggtggtcgaggcaactacggaaatcgaggtggaagagccacactagaataaaagagaattaagatcatacaatatgaataaaataaatcgatagtgtataaaagtatgaaatctttaatatgaaattattaagtacggtttactatgtactatactctagtgcgtgtgattttaattgagatcacatatgtggatagacatgtggtaaaggtactgtgtataatttgattatacatgattgaatcaatatgtaataacatatttcatcaacatgttatttagcatgaaagagttattcatatcacaatgatgatcattagtagatctgtctaaatccgtcagagtcgtggctcgtcgctcgagacttgaattcaccatcacggtgaggctaaagtttattctttaaacccgagctcactcaatgtaaaattcttatactacaaatatggtgtattttctaaaatatatataaaaattcttaacccaaatttactatataattaacaattcacaatcatgtaaataaactatccattcttaatatatcatatacataaatgtataatatccaacacaatatttaatttatgtaattgtggagatggctctggtactatttgttgactttttggatttatatcaaagtcgcggcggaagcataaaattggattataggtttttaaaaaaatattcgttgaatccgatatgaatcttaaactccggatctcaacacaatataacataaattaaatctaattacttggaataagtattttacctctttatgcctatcaggggattcttgtatcttttcatataattgtttgatcatctaatctaaagttttatgggcttaatgaagaatctacaccagatctttcagattagcctcaacacttaagataagagtaggcttatagagatttaatgaaatgaatctattttaaaatatttttattattaaataattaattaaattagaattatttaattatttaattacaataaagacaagaaaaaggatttaaaaattaatttatattgattagaaatttaaaatcatgtggtagtggtaaatggagtatgttgtgaaattcttaaagctacatggatggacaacaagagagagtcaagagagagaacaagacgagttcttgaagaggagagttgtcttagtgtagtttatttctttatttcaaagattagtaatttagaatactcaatatttactcggttcattattttatttatttatttattattgttaaatacttgtttactaatagttgattagtacatgcaaatacataaaatctcacacaatttgctattttgattattatgtcatctcattttagaca

SEQ ID NO: 243687 - DNA, 5039 bp, Cannabis indica
aagtatacctatcgctgattatcatgccagtctaaatccagtgaactgacaagtcatgaaattaaactttcgaacatataaacatgattatatttcactgtgctaacaacactataattatgaacaaatacatatgtttaggacctaatagaatttatacattaaatataatcatgaaataaatcttgtaaactatgcaacataaaatattatttctgatctttattaactagtaaatctgattatattgaaatgagttttatttggtgcacaaaacttaacagaagccattagagaaagaaaaacgctctagataccacgtaaagtatgagaaatcaaaaaactgattgaatgaatttcttttattgaattgactgaagagtttagcttatatacaagaaaaggaaagtaaacagaggtaaatgatcattacaagagaaataacagaatcatcatactaactgtatttacaagaaaagccagcaaagctaactaactaatacaactatccttaacaactattacatgatttcaagatttgaaagaagaaaaaagacaaatgttatattttaattcaaattcaatttcattctttcattataattgtagatagaattctgatattgtgtgacataaaattaattgaaactttggacgaatcactataatttgaaaacgagatcaactcattgatgcaggaggtgcaactcattgaaaaactaatacatgaaatatttgtcaaaagaaaaaacccttctaataaaataagattaatatatacttacaacaaatgctattacagattacgaatcaagagatgaaatctgaagtctccgatcgattcctatttatgaaatctcacacaattgtagacaacactacttgcgtatggaattaacttaattctcactgtttcacttctgagtcctatgtaaacaaaagaactaattatacatactcgtgtatgttttgaatgcacaaaggctttcaaagttcaaaatctaacataacatccctttggtcgttggattggatcatcagtctgagcgtaactggagttctacttccccacattcgacatttctcaatcgtagaatcatactctgcacaagtttgccacctgaccagacaatggagctctcttcagtaagacaattttgcttggttggttgtactttggcaactgtgattccatctgggacaccctgcaactgcatcttcaaggctttaaggaaaggaccaacgtcgatatctacttcccccatcttgtcatcgaaactgaacgtatctttgtcatacacacactgcatccatatatcaaacaaattctccacattagtaacaattaacataacttcatatatcactcatgtattgtatggtgatgatcttgtagacaaaatccagttgtagattgtagtggcagcagacaagattcagtatataaaagagaaaaacttacaaggttgatgggaacatgtggatcggaagcagagatattgaaacactcattccactcaggattcacattcccctttattactcgagtttttagcttctgaaacacatgaaacaaatgggtattcttttttgttagataataaataaataaagtcaaagcacaattagaggcctcacaattctctgtttttcaatcaaacagttgaaaaacaaaaagtaccaatacttctccaaacacccagaaacaaaaacaggtgaaaagttggattacaaattacaaaacaacaaaagagacgaaacaaacctgcttgcccaacttgagaacaacataagggtcgctggtgacgatatctctaacagcgaggttgactcctctttggatatgaaccttaaaaaaacccattacttctcctttgaacaaaaaaacaaagagttgatgatgtttgggaacaaactcacaaaattcaaggatattcccctttatcttctgaaggcggaagaagaaagagaaatttcttgtggttagttgtattaatattattattaaatatgtatgaaaaggtaggataggtacatttattttatgttgaaatttgagccttagagatgaaggaagaaaggtgaggagtgtggaacaacgcgtagtcgaatattggtgtcgttttgcttgttctttgaagaaaacgacatgtgaagtcggcgtacgtgttcaagttcaagggacgtgtattgtaagaggcacacctagttttgggttattagcttagagagttagagacgaaacatacaacaacgcttataggtttgacatggtctttggacttttctacaatagtggcgttgaaactgccctaccataactatatgagtgccgttttgttatcctcatttcattaatgcttggatggtcctcatttcattgttaatgccacgaagtatatttattattgtaaactaaatacctgattacaaaatttgaaaactgaaaaaataaatattaataaagtattaaaaattaaaaatatatatcattcattacaaaagaaatttgccgtcttggcctaactaccatactattacaattcattcttaacctcagacaaacggcagctagtttagctttgattgatataattaccagacaaagacatccatccatgggaagatactgacgaataaattatgcggagaatatattattcaatggaataataaacaaaatattatatctacgttgaaggaattgagaaaaagatgaatagatgttattacaactgaaagtaatatatttgtaaattaatataacaataaagagatgaaaagtcattctaacacttttgtcaaaatttattttcaccctattctttaagatctaagggaactttcaaatggaaataattttgtagaataatcaagtcttttctgttatatattgaagatatgtctctctagattaaaaaaaagaagtgtgaaacaaatgatcattagataagccacctatatctaaagtgttttggtattaccttttgaaagtcacacctcataactgttacgggtcttaatttagtgtaaatggaactaaagagaaggatttagaactaaccacgccactgaaaccaacaagaagatctctagaagcttcaaaacgtttgttgaaaaataatgtaggagatatggcgcctcacacagggcatcaggtgcttctttctgtagtgttttttcatcattgcggttttccaaaacttcccatatcattttcataattattttaactaattagtattaaaaaacataacagctatgatattgtggaggttacaaacggtaaccaataatttcacagaatacgttgcaaatttagacaaaaaaacatttattttgttatatttttatatgtattctaaattatattattaatagattatataacatattatgtgcatacatcatactaacaaggccgcatagaattattccatagaaccttatgaagttaaaacatctacccattgcaattgaagctcaatttcgccacactccacatttctcagtctgagaacaatatcttgaacaactttgccattggagatataaattgggctctcttcagcaaggcagttttttctgttgggctggacttttgagattatggttctatttggaaggcccgttaggcccatcttcacgacattgaaatatgggcctatctcaaactctgcatcacccattttgtcatcaaagctgaaggtgtccctgtcatacacaaactgatcaaattgatcacattcacaggtaagaaatcatcaacattcacatcgaattcaatcatgaaaaggagattttgacttataattattaccagcttgactggagtatttggatctgaaaccgatagagttagaatctcattccattctggatttacattctttttcaccacacgggtcttcaccttctgcaagagacaaattaatttgaaggaaaaattagcacataaaacacattagaaaagaaaataaggcaaaatcaaaatcaaaatttcagtccaatgaaaacacacatatctaaattctaaagttaaaaacaataaaatgccagaccggaatcataataaaatgaggatgaaattaagaaaaacttaaacaatttacatgcttccccagcttgaaaataacataggggtcactgcttcgggagtctctgatggcaaggttcactcccctctggacgtgaatcttaagcagacccaaacagttgtccattaaaacgaaccagaatgaaaggtcgtaacaaataaaaaatgatgggttgggggaaaggagtgaaatgagagttgtttgtaatagtaattttggtgtaaatcgtagagtctgatggttgcgtagctggatgttcactccgtccgtccgtagtttctagagacgcaaaaaggaagagtagtttacttactattaatttttgttttatggtgtacgtctcgtctcttcttatatatttttatgtttgaatgaatgcaatgaaatcacggatgtgcagtcaaggtaataataactggccctaaccctatattttttagctgcccaggaagtgcctgtagtcagtgggtgtcacactcacataattaagttattgcctttctaacgcgccaatttggcggatttttcatcataatttaataagttttgattttttaatgaaaatataagcatatgattttgtcgtgtgatggtacttttacggaatgcattccgtgatgtacggcagccgttagatgaggacttatttgatctgacagtgaagattgatttaaggataattagggttaaaaagtaaaaatgtacctgacactcatttaatgtacctcgagacccctctaatgtaccatgaaatatattccgtgaaagtacatcacaggacaaaatagtatccctaaaaatatataacggcaattagcttcgacggtagggtttgcaatatggttggacatgctgattcaaaattaagataattacataaaaatattattttaaaaaattattatttatatatttttacaatttttataaaaataatacaaa

SEQ ID NO: 243688 - DNA, 2772 bp, Cannabis indica
tactttgggctttagcttatttggtatgtgggccttctttttagtgtatatttgggcttttataactaccatatttaaactagatcgctattctaacatatatcctttcaacaaaaaaaaaaaaaaaaaactaacatatatccaaagattatgatagctttgaaaaaagagaaaaatgaaagaaagttagaatggtgttcatcctttacttttcttttcaaaaagataccagaaaaaaagtaagatttgtccggctgtcaagagtctaatatgaacaaaagtaagcaaaagtcaaaattaaccaaacttttgttttggacttgtgaagattgattccaattttttgtttacataaatggacttactttttcaactagaataatagactatgtctatcaatgatttcaattaatttatgtccttttctcttttcttttttgccttttttttttcattattctttccatgtaatatgctcgaataatcaattaccacattttaaaaatacaataagagctataccacttctaaatctagtagactatcatgaacactcatgatatccttttccgagttttgcgattaggcatcagtacactacaaaaaataattacttttagtgataattttttaatctcaacataattttttttttgaatagatgtgacttttagtcataacaaaaaattacttgtaactaaaacgtagtatttagatacaatttgtcactaatttagttttagtcacagcaagtgttatgactaaaaacacatttagttacaactaattataatttttgtgattaatacttttagttacgaacattttagtcacaatatagaaatgataatttataattagtcatgacttttttacttttagtcacaacttttgttgtgactaaaagtaagattttttgtaaaatctaacattgttatgaagtgacagaataattaatataatagttattaaattgaaatatataagacctaatattaaatttcatcaataacaatatgacaccttactaccatgtttattttgtatttataggaaagtgagtctaaacgacactgcccaaaagagaggcatggaattgaggctaatccatggagttgcttatggcgagccatggttcggaaggtggggttacaagtttggtcgaggaacctattgtgtcacacaacaaatgcaccaaagagccctagaagccttaagaggcatacccttaacacttcttatccaccatttttgcacatcaaatcgtgacttacctttaataatctcaaggtaccaaacactttctgatcattctttgactaccttaggcgacatattccattacatttagaactcaagtctcgcctccctaatgaaacttccaacatggaatcatacaaccctggaatcttggtcgaaactacatgtcgttggtctccaaaaagagtcgaaatggccactagggttattgtagaagccttgaaaagagctcaatttagatgggtttcaaggcaacaagttagggatgcagctcgtaactatattggagataccggtttattagattttgtcctcaaatcacttggtaatcaaattgttgggaattacttggttagacgaagcctaaatcctgtcacaaaagttcttgagtattgtttagaagacatttcgaatgtatttcctgatcatcatcaccatcatcgtgaaggtaataataataatgataaaacaaaatactcaaaatacaaaatcacacgatttcaattgatgaaagacatgttttatttgtacaagtacattctcaaagaccaaaacaacataatttgctctatgaatggagatggaagtactaatattctttcagcaattccattggcggtaaggattgtactcgatactaagtaccttatcaaagagtaccacaatgatttttcatcaaaaatggagttaagtttggaaggaaaatttaatttgtgttgtacaattatgttgaaagacactactactcaaagtgaagaaggtaacttggtgaacaagtcattaatgatgccattgcctccatatgagtgtgtgagtattaataaaaatgctaccatagatgaattgaagctagaagtagaaaaaaacttcaaagagatttattggagcttgagtagcttagttgtggaatctattcataacttgaacacaaagggaaccgatttggctcttgggatggtttcagaagttggtcaaaaactagtttttgttggtagaaataatactaaatacaattgtaatgatattatcaatagttatgagtgcttatatggatcatcatgtagctctagcattaataacaacattattaatagcactaatagtaatagtaatagtaataaagaaagtgttatggattgtgtttgtggggccaaagatgatgatggagaaagaagggtctcgtgtgacatttgtgagacttggcaacatactcgttgtgttgggattcctaatagtgaagatgttcctcatgtatttatctgcactagatgtgagcaagagattgtcttgttacctaattctcttccttaaatattgattaattaagtaataggtttaagtgtgaaattagttaatcaattattgtttgtaataattaataataattaagcttctaataataagtggtagttattgattttatggtcaattatttgcatgtgtttgttgatcttttcaaacattgtgcattatgtaaaaggagttcattataaatgaagtactataaagttt

SEQ ID NO: 243689 - DNA, 1611 bp, Cannabis indica
atatatattatatatatacattaaatactaaaataaaatcagagaaaaaaacagtccaaaatcctctgatttcattatatatgtatatatatatatatatataatcagggaccgacagagatgggtgtggaagaacaagaaacaggtccacccaaaggagatctggaaatctgttgttgtcgactaataatctctctaacaacaactgatcttctctctgcttttccaggtaaccaatcaacaattttctctgattcttccttgattttcttaacctggttatgaactggacttgagtcgatcaatacgtacctactattcttgttattgttgttgttctccatttttgaaatttaaaacgaagatctgatttgtttgaactcgaattctgagaagatgaagaagaaatatggaatgtgggtgtatatatagagagatatatttatagagagagaaagaagaaattaggtggaaattggggggtgtttggatggagtgataagtttgaatcttttattacacgtcatcaatcatgatttatttattttttacttcttctaaaattccaccatttaaaacggttttaacattttcaattccaataatttattttgactattgttgttgggtattattagtggtggtggagttttatgattagttagagattcgatacttaattacactgatagtgtatgataccgaatagagtattagacactaataatgacttatagaaactcactcaaaaaagatgcactcatatatcttttagaaaaaacatgtagtttatttttttttatacattcgtgtagcttatagttatttaaaatattctccaaaaaaaataaaattcagaataatttataatataaaaatcaatgttcaaacaatgtatttcacacgtgtataaaataaataaatcaatcgtatgacacactgtttgaaccttgttttcagcgtgttaaatttttctaatttttttaaaattttgcaggatgtcttaaataactataacgtacatatccgttaaaaaaaattcactaaaaaattatttcggatatcaaaacagatgcatgagtgcatctgtgcatccccacggtagaattttcctttattatattaaaagaaaataaaataacattagaaaattctacatttcttattttggtatttaggtagaatttttttagttatttttttcatatcatctatgttgtagttattttaagatatcttataaaattttaagaaaatttcaaaaaaaattaaacatttgaaaaataaaagttcaaacaatttcactcgctcataaaataaaggagaattttctaaaatgggtttcttttatattttatttataattatacaacttaaaatttttaatagcaaaattacacttataaaattgtaaaattataaaaatatacttttctgaacaaaagtaaaaaaaaaaaaaaacaaactgaaaaataataataaatcaacctcacaacaacgtaaactataaaacaataaataaataactaaaaaataacgagaaatcaaccacacaacaactataaataaactataaaataacaaaaaataactaaaaaaataattgatcat

SEQ ID NO: 243690 - DNA, 6208 bp, Cannabis indica
tcaatccatttaagccctcttcaactatgtagtcccatacttacatagtctcagaatcatcacacttgaccttccccatgcgatgtaggattgtacaactcccagtctttctccttcgaatcacggggctctgattgtcacaccgaccagacccgctgaccaagcctagggccagccaggaatccaatttttaggtataggccgaccagcctatggggtatacccccttggccagccagaccccttaatagccatccctggccgaccaggtttcaaacaagacctctttggccgaccaggacctgtacggatctaaacatgtattttttcaagaactcaaacacattgttcatgtttttcgtgactcaaagagccaataatgacaacgaatgtcagattcagatcttttttatctagaaatcacacattatatatcctctatcatggggatcaaaataccgaaaggacaacaatctaacataggaatcaaaggatattcaaagcaaagaataatgttcatgcattcatggcaaaatcaaccaaatcaagtaaaatagtaggaatagaaagcttacccacaacaagaaattgctaagaaagaaggtgggaagcttggatcgtcgaaaggacgcaaaaatccagagagattaatgcttggtaggttcggccctctagagagaaggaggagcttcttcaaatgtcaatttctaatgagagaagtaaaaagtaaaaagtgaaaagggtttccccccaaaagcacttatatagtacatgtgggaccccttcttcacttgcttcacctacacaacaaagagcaaataaagcagttagtttactacaataattgagattagacagtcaaggcaaagtatttcaaagggctaaaacgcaacaacttttattcagcaaatgctacatcagttccaaccgcaccaatctaattagtaagttcatatccgtacagacatctacacagggacttggggggcaaatgctatcctgatttttgcccacctgaggtggcattacttacgtgggaaaaattagcactatgtggcaatacaactcaccaacaataaggccaagtcagtacctcagctaacagggatcccgacactcaaaggggacatcaagtgatagaccatcttcctcatagaagttggcccgccacccctggctggccctatggccggccaacctctgaacaacacatggttggacaacctacttcctgcaggtgtctggccgactagggaagggcctgtcatgattttctgtgcaattccacacgtggactacgagttgggccctaacaacccaataaaacagttggaaaatatctatgtttaagggcattttgttctttagtaattaactaatttaatatacaaatatctaagggtttcagttgtaaattagggtttaggttttcttatataaatgccttaactctaacctataaaacctaagtctcattctagcctccaagtgataaagctctaagcctaaatctctaagtctgataactctcttcctcacactctctctcacatgcccatacaagcattctcaacacttgagatttgccaaccttgatttctactgtgtatccttaagggagctatatcagatcccacctatagtaatctgaatagtattattcctcggtatcaatacaactaaaagagaagtaggtcattacccgctatctaagggcgccgaactgctataaaaattatgtgtgttttttactcccttattctaattgtgtaacacgtggcaaacattatattcatatgacactgctatcagttgaccacttttcgaggtcaacacaccctattcgacccaatttcaggttggattgggtggattgacgggcccaaccctagcatgtgcacccataattataagttgggatcattacacaaagcaccattttttgtaaaaaatttatatttttacatttaaagattttttttttttttatatttttacgattttgtatagaaataatacgaaaacaatacgaaactacataaaagtaacatgaaaataacatcataataacataaaatataacatatcgataataaaaaatcaacaacaaattaacaaaagtacaacataaaataatcgtattttctataaataaaatggtcaaagtcattataatatttaattattctaaagaaccgtatttttagtatttgtgaaataatctcttataagtttccaaacaaatatattctctcttttattgttggaaattaatattatgttaagcctttcataccaaacgctgcattgaagtacagaaaatccagtaaaagaaaataaaattatacggaggagtaaggttgtccacaaaggtagggagtagtgtgacttgaggttgtgaaaagacgcgggaatatggcggagatttggttgggtccccgtccctgtaacactactactcacacgctattcctccctttctcatttcctttcatttccatggctgctcctctctaccttcccttctcaaaacccacccactgtcgttcctcttcgtcttctaatcccaaccctgggccctcccagccctctttgctcgtattctcaggtggtactgccttcaatggcgtcgtcgaagacctcaagacttacaccactcgtgtcgctcatgttcttcctgtttctgatgatggaggaagtacggctgagattgttcgcgtcctcggtacgtactactcacatttggggctctgtagcttttgtacgtattaggatttaactgttcgatctaaattatttgatgttttcttttctaatgtgatcaggtggccctgcggttggtgatatccggtcaagatgtttgaggctgtctgatgagagtacttctgaggcacttgctgtccggagactccttggtcatcgtttaacgctcgatccgcgccaagccaaatgcgaatggtgactctcttcctacatttaaattgtttgctttctattaattcagtaattgtcttataataatagtacagtaatttggtggattctagacaattccgtatatggcattacttggtgtgatgaagtatttaactggttcttgcgtttaaatagtattaaatgggattgttgcagtgtttcgtttattgtttgttattctccccttgcattcatgtgtttgtgtgtttgaatttactatactagatttagattacattagatagaaaacagggtatacacagcgatatttgtgcgaaagctcagttaatggaatgctgagacatagcctctcatttataggaaaacaaatacacagtgattcaattagatgccgatgggaacctattgaaagtgacactgggatcagaagagactattataggcgaaggggtgtgctgtgattcaaaattgtcatctccatttaatgcttttacctctagtctatcaaatgttgtgatttctaggattatcaacaaagttcttggtacttttctatggaaaacatcagttctcgaagagataagagcatataaacagaatgcaacttggagactagtggagttgccatcggacaagaatgtaatagggtgcaactgagtgttcactgtcaaataaaatgcaaatggatctattgagagttaaaaagcctaattagttgccaacagttttattcaaacttatggaattgactaagctgaaacatttggtacgattttcaaactcaacactatcaatgtattactttctctagtagttaacctagattgggcgctgcatcaacctaatgtaaaaaatgcattcttgaatgggtgagtagaagaagtgtacatgagcatggttcaatgcctatttagaacaaatgaagtctacaagctaaacaaatcactctattgcatagaacaatctcttcgagcatggttcaatcgttttttgaaagtagtcaaagggcttggatacaagccaggctaggctgattgtacgtcgatgacataattgtcactagtgactacattgaagagatgaattcgatcaaataaatgttggcaaaggagttcaaagtcaaggatcttggttaacttaggtattttatgggagtggaatttgttagaagcaagaggtatttttgtgtcccaaagaaagtactcttgacctcttaaaagagacgctcggatagaagaggaaaatatttgaaggaagtccagttgacaaagaaaggtactgacagctagtaggaaatcttatctacctcacaaactagaccaaacattgcctttgcagtaagtatggtcagtcaacatatgcataatttgtgtcaaggacatctcaatgcagtgtagaaaatattgtatttattaggatttattcgatatcattatgataggaaagctagttgtataaataattttatatttagattattctattatgggctagaatttctataatttactttaaatattttggtattaagtactagatttgttagggttgtacaatgcctattgataggtattattcgtcatgaataagattgtcagtcttattttccacatggtatcagatctcaacctaagaatttcgaaaatcctgttcactctcagccttctttatttactcagggttgccattacagaaaacatcagattccaccacctcagaaaacaatttggccattgctcccaatctaaaaaattgttctgatccttcacccactacctttaacaatcaaaactttccaaatgactatccacaaacatggtcaaaattttcttcgatggtcataatctgtcaagatgcatctctggggtaggggacacttgggctacttgacttaaaatactacgactccagatgctgccaactcaccctatgcctatggggagctgaaaagtctctcattatgccctggttaatcaacacaatggaggtagatattggtaagacatttatttctttctacaactaatgaggtgtgggaaattgttcaagaagcgttctttgatttggaaagctcaacacaagtttttgaactcatattaaaacttcaagattagcatcaaaactcatggtaacccaatactataatattctttataatatgtggcaagaaattgtcatgttttatgttcctgaatggaaatgttctgatgatgcatttgcctaccaagaaatacttgatcatgagaggctatttgattttctcctcacccttaattgtgaacttgatgaggttcctgggcgattgttgggaaatgttgaaaatatgaacctaatccgtaaagatttggaaacttattgtacaatattaattcagttattctgaattatttgttcccttgtatagtcatttccttccatgtttattagtgattagaatagtctagaatattttgtatttatttggttatattttgtatctgcctatttaaaggctctaaccctatcaaataaaatacattagagttttagtctcttaagtttttaggaaaagtttgctctctcttctattcgtgaatcatttttctgaagtccggtgagaggagagttgcaagagtgttatgttggggtcttcagctgatatagtccaatttgctcttgttgcccatcgtcctaatactcttcgagaacgaccttattatactcaccgcaacacacactaaagaaacttgctgcattctccatggtaagcccgctgattggaaaccacgcttatcaaacaggctacctcaggagagatttgtttaaaatatttgttcactatgttattttaaaataaacacttgagcatacttaatgtgaaatttgtccgttcgctaaacatacttgtgctattttcgattctatgcaatagagtagcatagaaccatgcatagaacaatcacgcttagcccgcagcaacttcgattacaatgaggaaaacgagctcgaacaagtagagactccaggtgctgttgaagtatccttaaattcagtttcgagattgacaactccaaaaaccatgaagattaatggtatggtgcccaaccggggagtggtggtgctcatcgacttggagcgacccttaattttatctacaatgatttggcaaccaagaataagcttccattgatcaagatgggaacctatggaaagtgacactgggatcagaagagactattataggcgaaggggtgtatgtgattcaaaattgtcatctccatttaatgctttt

SEQ ID NO: 243691 - DNA, 2968 bp, Cannabis indica
aaagctcaaaaacaagttactgatcttagaaacttggatctttcaaatgcttattttttttttttggagctccaccaatctgggaaaattttggacgatcttcttgagaaagaagagacatactggcaccaacgatctcacattaattggttgaaagtcggcgatgcttatacaaagttttttcattctcgagcctctggatgcaaagttaataatcatataaaaaagatacagactagcaatgggaattttgtctcaaatcttcaaggtatcactgaccaaatccattcctatttcaccaacatgtttgacagtaatggtgttaacacttctactattgatcttactttggataccatccctgcaaccatatcgcctgcaatgaacaacttgctacatcaacctttcactagtgaggaggtccttactgcccttcatagtatgggaagcgaaaaaagtcttggacccgatggcatgcttgtcatgttcttcactaataattggagtactatactccgattcgaagccttttctgcacttagttattatgaatttcagagtgcattcatctctgatcgtttgatcactgataatattttggttgcttttgagttactccactgtcttcgaaacaaaataagaggcagaataagttatgtaaacttgatataagcaaagcttttgacagagttgaatggcattttgtggagcgagttttgttaaagatgggtttcggtcatggtgttattgagcttattatgtgttgcatctgttcatccaattactctttccttatcaatggccatgttactggaaatctccaaccaaagagaggtattagacagagaaaccctctttctccatatatctttctcatatgtgctgaagcgttttctctgcttctccaatcttaagaacagtggggtatgctcactagtttaggtattaccaagcacgctcttaaggtttctcatctcctctttgtagatgataacctcctcttctctcgtacggatgcccgctcacttgctgctattaaaaatactttagatctttataacagagctttgggtcaactcattaactatgacaaatctgtcatgttcttctctcccagtacctctattgctgatcaaaatgcttttcacctccttttgggaatgcctatccaatcttgtcatgagaaatacttgggtttgccctcatttacaagccattataagaatgaagccttcaatgttatcaaaagtcgaatatggaagcttcttacagcctgacaagagaagctcttctctattggggaaaagaaatccttcctcaaggttgaggtctaatcaattccaacatatgctatgagttgtttcaaacttcttacttctttttgcaccagtgttgaaagtatgatggctcgcttttggtgaggattcaaagctaagggtcattgtatccattagaagagatgaaattatctttgtcgcagcaagcaagcgagaggtcttggtttcaaatcttttgttaattttaaccaggctctcttcgctaaacatgcttgacgtatgtttgataaacctgactcccttttatatcatattctctctcactgttattttagccgcacaggctttcttcatgctcaattgggtaataacccctcgtgtacatggcgttgtattcattggggaaaagaacttcttcttgatggtctttcttggaaaattagcactggtacatctgtttgtattaacaatccttagcaccttgggtataccgactttaagccttttggtgtcatcaatgctgactataatttgcgtgtttccgatctaacttctcaggattgtacttggagtttcactgctcttcagcaacacttcttaagcattgatattgaccacattctacaaatacctgtaagcctctacgcacctgaggatagactaatttggcatcactctccatctagtatttatactatcaaaaggaggtatcatttagctacatctgtaagggatgcaagaactccatcacaatcacattcacctactacttagtggaaccgtttttgaaaactgaaattgcctcgcaaaatcaagatttttgcttggcgtgtgatccataatgctttgtaccttgctgctaatctccatcacaaacatattattgaagactcttcttgctctagatgttcctacccttgtgagacataaaccataatttttttctcttcaaatcagtgaagaatctttggcatatgcgcccttttctaatagattttattggtttatcatccttaactagcaatgattttatccattcactcttctccaattttgatgatgatcaaatgaagactatcctttgtgtcacgtgcaatgataatttacattgttcacgaattcttcctcaacattgtctttatgaaaaaagctcttacataccttcatgaattctacacaaataacagctcgtctactacgcctcctcaaaattttgatgtcaacaatcaaccatggcagcctccacccactggtatgctgaaacttaaagtggatgctgctttaggtagtgatggtcaaataataagtattggatgtattattcacaattctaatggtcatgttattattgtgatttccaaaccaattaagggaaagtttttgtaaaaaaaaaaaaaaaaaaatagaggcaaagacaatctcttactttttacaatggttgagtgatattaactgtgttgttcattttattgagtgatgttttctttttcaagtatctctctaagttatgctcatgagagtgctaatttgactacacaggatcttgctagatttgctttacgggtgtatactgatagtgtttagaggacactctctccaagccctattcattgtaaaaaaacttgtccattaatatacagtatatagcttttcttaaaaaaaaaagctcttaataaaagtagatggataat

SEQ ID NO: 243692 - DNA, 2356 bp, Cannabis indica
aaaaaaaaataacatatattaatattagcaaatgctagactagagcttacttgacttagggtcccacacacatttgaagggttccttttttttcttttttaaagatgatacccaacaaagctcctagtcatgattcatgaaggtttgagcaacatcatcataacaaagtcaaatattcacagccaaaatttcatacaaagatgtcacatggcacttgcatgaaatctctatgagacctcactacggtagttctgtagttgtaaactatcttcagtttacaagtataaaaaaatctgcccaattttttcagcagcaaaatcttccatatttacttccaagattatcttataaaaacccaaaaccagaagttaccagaaatgattttgggagttgtggagttcatgaagatgggctaagttctttcgttaagcaccccgttctgatctgagaaatggggagttccgccaagcggtagcatcaaatccttcataatctcgtactctgcagcactaatttgggcaccatccagtacctatgttttcaacaccaaccacaatcattggcttaacattaattttcattgataacacatcatatccaatataattggagatttaaattcaagggtgctaatggatgactagaatgtcaagtcgaagatgcaaagtcattattaacaaccccatattaactaaagttgaggcaacttttattggagaacaaaagtgttttcatgttttttgtagtcaaacatctcaatgtacttctaacctctaaagtctaaactcattgttttattggttgatccagtttcttaggttatgatggttaaaaatacaatcataaatgattaataaacatgtaaattctgtgaatacagaactaccacaagaaaatattattcaccacctaaaaaattaaaggatatttacagcataacaccttgttgcacttaaatctctacgtaaaattaatggtggcaaaaatccttatatttgttgcacttaatccctatgtcaacgttttagcagcaaaaatctctatgtaatcattttgttacaatgttagtccttttgttgtttaccatcagagactaattttacctcaaatgtgtaacggtagggtttttggcaccaaagataaactacatacaaatttttgctcctaaactaattaaataagaatttaagtgcaacaaaacaaacaacatagggattttttccaccaaacagttagaaagagatttaagagcaacaaaatgacctacggtattcaaacaaagcatatagaaagccagctggcaagaaaattcaacatcacaactctgacaaagcattaggtagaatatactgaactccccatatgtaaaaatagaagacaataataagtaaaagggagaaaaccttattggggggctcaccttatggaacaacaccctttgatttgtcatgtgtggtgtaagtgcaggaagtctaaagacagagagagcctcaatgaggagaaggacaattacttgccattgctttattctgaatggtggcagtgcatcaacaaaagacattgtttccaataaacgcccctgtttgccaaagcaaatcagcgaacctctcaatcatcttaaatctatccaatcaaattattttgaaaaagaggggaaaaagaacagtttcacgcatcaataccattccttgctccaaactagacactggtactggcagcctgaggtcagcaacaagtccaggtaaggctcgagcaagagaaccagcaagagtttgcttgatttcagaagaacgaccatctcctaaggcaatcttttgaggatactcctttccgttaactgataaatactcctcatgaacactttcgtcccttccatatatataagccaaagtggatgatgtcgtccatgtaaatagtgcattccacatttgtgcaaaatgtgataactgaaaggcagttaatgaaaggaattaagagaagacacatcaacaaagcataaattcatgcaccaaataataagagttttaagaagttactgttaaactaaacccctcaggtggcgtatcaaaccaagaatcctcgcgattaaacacatcagaatgctgatttacgggtttttttggccatttcgaaggagctttttctggttcagatgtatctttgtcctccaaagacactcctccatttgcatcctctggatgaggtaatataataattccagcttcagacactgcagaaaagttcaatacacgtaggtagaatatctcagtcatgaaacgaaatcagctatctgaaaaacaatagcataataaactacaaaccataaaaacaggcatagaggcatacaatattacat

SEQ ID NO: 243693 - DNA, 2082 bp, Cannabis indica
aaagactaatttaattgtaaaatgagagaaaaagaattaaaaagctcagaacatggatatatatatagatgtcatgtacacattagtatacacatacatgaggtaacaaatatatatgatcgattctgagaatattaattctgccaaatattgttgatcatttacatataatgaaagggaatgcaggagcaacacttacaaagcaatataattagtacctaattatgaagaaaaaagaaagaagctgctgattatatatataacgacaaattaaaattaatttgggcgttttagctaattcacaatatatatatattattagccatttgctcaatatatatcccctttcaccaccattaattctggataactcgagtactctcttcttaataattaaaataaatagaaaaataacatattaaaattataataaagttaataagcatttaattaggttaatatatatataataataattgaagaaacatactaggatgatgaatggagatgcatgattactaatcgtggcgatggccaagtcgaagttccaaatcaacatcatcttcacagctagtactcctctgatcatcttccaaataggatgaaccagaattcatccttaggctcaaatttccaagatcatcttcatgattcaaacccaaattagagggatcatgaccattaatacccctcaaaccaaactcatgattaatgttataatgaccataattaacaggaccaccatatatatcatgacttggctgataatacataccatgatgatgagaaggtggatgctgcggatgagtactactactcgtccaagccgcagctgatctgttggctgaaaacgtcgtcgtaaagggagaattacccgccaaccccatttcagcttggtaattattagaacaagtagttgtaaaagtagggttttgctgcttggctttggctcggtctttacgatggatattcatatgtccacctagggcttgagcgttcgtgaaaccacgcttgcaatacgtgcactcgtagctccgcttgccgccaccgccgccgctgccggattcatccactgatcggctgaccactccgctgttgtcgttttcttcacttgatgtcgttgtatccgaaccttgtttattaggttccataataaagttatatgtagtactacttccgatgatatatatgatctcaagattttttgaataaactttgactcttcaattttcacagagagagatggagagattaaattattagggttttaagagggaagtttagaaaggtatatgaatgagttaatatatagacaattgtatacaagacatatatgaatataacaattgtggcatgtagtgaatagttgtaagtatattataaacaattaattagttttggattatgtagacagactctttcgtttagccggctttaattctcctatataaatatttatttaatttttgtcaagtaataacctaatgagttttaactcacattctctcatctctcactaaaaaaaattattgttattaatttccttagtttgaataattttttgttttttataaagaaatccttaaggtggaccattgtagatggttgtgtagctttcctaggattttttttttttttttttttacttagacgcgttaatttgttacatgtcatatatatgacctcgttgtggtacatatatgtgtatatatagatacctaaactaagctacagctactctagttcatgtgcctttcaaggaaatgattttatgatatatacattatattatatttatatagctcctattatactaggaaaatgaatctcaatattccacatgctagctaataataattttgatgttcacactaattataatcacgatttcatccccgctagctagtgaaatatatgtttataaaaatgtatacatatgtaattttagtacacattttatgtatatatatacccatatatattgctagcaaactctagtatcatcatatgctctatattaagatgggaactctgatcacgaattaaggagagagtgatagttttatttaagaggaaattaca

SEQ ID NO: 243694 - DNA, 5463 bp, Cannabis indica
  modified_base (69)..(69): a, c, t, g, unknown or other
agtgatttgatagccaggatacacaagatttgcaagagaaagaagaaagaaatgggggctgcaaagganacaaatagatgagttgagcaataatgcagtcacgtgagaagaaaaacaaaaaaaaaggatttagggctcaaaaacattaaaaacacatttaatgcattgaacatagtatgatggtaatagattaaggggttggggcaccagaaaccaccacacaactcgagtgggtggaccataaacccatttcaggtaccagaaaggggaacacaagccaaactcttgaacattctagagagatttcgtgtctctacttttttttttttttaggttttgaaatgtctttaaacaatgaatttgaacgtagttttcatctcaaacgaagaaaaatgcatagaagaagcctatagttttaatatctttttgtctaacatagctttaaaattgaaaaagcaaatatctgaaaaaaaaaaaaaagataataatcagtaaaaccatcaaaatgaccgcccactggttgttactagcgcaagccacgagtcaatagaagaaaagtaaaatgtactttatatgagattaacggctgcgattagcgatgaacctaaaaattaatcgtacggccaaaattaaactaagttctctacaaatagttcactctcggaactaacgctactcacagtcacacctttttctcacaacaactctcgatctaaattcattttctcttcttcaacctcaatcctcttctaatggctaccattcaagctgttaaggcaaggcagatcttcgacagccgtggcaaccctaccgtcgaggtccatatcttaatctttttcactcttttccttttctttttcctgttctaggtcagtttttggatttggttctctcaaattatggtttcgtaactcccagatccaattgcgattgcaaaatcgcttcttttctaattgctagaaacagtctatacctacgttttttatctgtagattttatgaacagtatgtatctttttttgtttttttttgtttgtaagatgaagtgtttgattatattgatgggttttcgttatggcaggtcgatatcaaattgtctgatggtcacttggctagagccgctgttccaagtggtgcatctactggtatgatacttgattagctgaatcgctaattttaacgcttttgatctgtttgattataaaattgttttgaattttaagttcactcaaatcatatgtatcttagtgtaccttaatgtattgaaatactttggatttaaatgaaacttgaaaacataaaatttgtgtgtaaaactagttttaagggtcttttattcgcataagcatatcttagaactgtgtttgagatattttgtgtttttcctatttgattttactaggagtctacgaggcccttgagctaagggatggaggatcagactaccttggaaaaggtgtgcttaaggtaaggatcggtctcatagttttactgtcgcacttgattgatctgtttgatagatttgtttatatgtgtttaatctaatcgtttctctggacatctaggctgttgagaatgtgaacgctattatcggccctgctttgattggaaaggttagttcaatttgtttcaaactctcatctatacatttaagtcgttgaaaagttttttttcactaaacaatatctctataccgcagctttgaataaaagttcaggacaatatttatttcaacaatagtctttattcaccaacacagtttagtcaataattgattttctgtaatatcttctgaaaaacattcctgcaaatttattgaaattggtttttgctctttttaggacccaaccaagcagactgagattgacaacttcatggttcaacaacttgatggaactgttaacgagtggggttggtgcaaacaaaaggtagaacaacctttactagtttaaaagtcaaaagttatttgcttatttttgtaatttgcattaaaaacattatttgcgtcgtttcagcttggcgcaaatgccatattggctgtgtctcttgcactctgcaaagcaggtgcccatgttgcgaaaacccctctgtaccaggtatactatggtgaactttaaaatctaatgattatgctgttttcaataaggtctctcatcttgatttctttggaagtcaaagagatgagcaacgaagttcagacaagtatattttgatttataacaagtgcatttatttcttatcactaaatctgatatctttattacctctcattgtttaacgcagcacattgcaaaccttgctggaaacaagaacttggttttgcctgttcctgctttcaatgtcatcaacggtggatcacatgccggaaacaaacttgcaatgcaggcatgccttttgactgattttcatagaattcatttatgtcatgaatgtctctttagttaatgtatctgatttttatgttcttgcaggagttcatgattcttcctgttggagcttcctcatttaaggaggccatgaagatgggagttgaagtatatcacaatttgaaggtaaattttatattttgtatttttaaggacttgtactttgtctataattgttacttactaacttctgtttcccttttgtagtctgtaattaaaagaatacggtcaagatgcaactaatgtagtgatgaagtggctttgcactacattcaagtgagattcttagaattgcatatgcacttaattcctgaaagtattcctcaaattatttcgcttctcttttaccagcttactaatgtccccttttttctggttgatttaggaaaacaaagaaggtcttgaattgcttaagactgccattgctaaggctggatacactggcaaagttagtttcatttccagtaatactatataaagaagatcataatggttttcttatctatattgacttcaaaatcacaagatatttattcagcttaactgattaagaatatggtttctctcttgtaggttgttattggaatggatgttgctgcctcagagttttatggatcagataaaacctatgacttgaactttaaggaggaggtgggtaacatgtcactgtaaatgtgttgtagtttgttttaaacaacctctgttgttgatttagttaaaaatgacaacctcacatgaagcaaaagttcattttattttcaagattgtgaactcctaagacgatcacttcatggagtggtttgactgattaagtagttacctttattcctattgaatattttgttacagaagtttttgatttatcttcatctttcttttcttcagaacaacaatggctctgagaagatctcaggagatgctctcaaagatctctacaagtctttcgtaagtgagtaccctattgtttccattgaggatccatttgaccaagatgactgggagcactatgccaagatgaccgctgaatgtggtgaacaagtacaaattgtaggagatgatcttcttgtcaccaacccaaaggtttgcatttgttaccttttattatatttcagttcttttaaaaaataaaaaatctaacagttttgtgcttcttattctttcagagggttgagaaggcaatcaaggaaaagtcttgcaatgctcttcttctcaaggtactcactaaattttgtttagtcatccttgagatgtgtcgattcgagttctgttgaagtggtataattttaagtgaataaccctgttgtgatttgtttcaggttaaccaaattgggtctgtaacagagagcattgaagctgtaagaatgtctaagaaagctggttggggtgttatggcaagccaccgcaggttagaacatcgaaccctgacaagcagccttgctgatagaaactcttttcatttcttgatcattaattaaattattgcattacttgcttgcagtggagagactgaggacaccttcattgctgatctctccgtgggtttggcaacggtaaccatctaacgaaatgctgtgttggaatgaattaaaacctttttccagtcttcaattggctatctaaatacttttctgaaatctatttctgtagggtcaaatcaagaccggagccccctgtaggtcggagcgtcttgccaagtacaaccaggtttgatcttctaatccttgtaaactgtatctttctcatatgttcaatttgtttgtctattcttcactgttttctcacatcttccttttgatttaattcttgtagctcttgcgaattgaggaggagctcggttcaaaagctgtgtatgctggagctaagttccgcgtcccagttgagccctactaaattatgaagcgttgatatcttttgcgggatcctaaagcaatggaagttgactttccagtgattatgtagaacggtttagccttctgatttgatgatactcggatacttgttttttttcttgcaataatgctcagaaaagttttgttttgagagctttgaacaatgttcaactgatatttatgcggatgctatctgttattgagttgcattttgattattacagttactgagctgtttaaatccatttcaccatgccataaccttttgttttctttacgatcttcaatttgagtttctatttctacagttcttagctataattttgagggtataaaaatgaattataattttgagggtataaaaatgattccaaatggtgtagaatgtgattaacgcatataactatctcatcatcttttcgaacaaagttagaacttatctggcctctaaggttaggaaaatcttgtagtggttttatttatttatttttcttttgtaaaataaaagtaaatgaagtgaaatttataaaattattagaattttggttaacttttacataaatactgttacacggactttttttttaaaaatactgtaaaaacagtagaacacaaaacagaacaactaaaaacaatagtggaatgggtgagatcgcgtggggatgtgaattttgtgggccatggctaatcttaggggatgtgaattttgtgttaaacaactccgaacatgattagtaggtttgctctaattgacttacctgtgaagggtgatcatcttacttgggataatcaccgtgatggggtgaaccatataaagtcgacactggataaagctttggtgaatggggattgccttggtctctttccgaagactgtggttaaatcacttcatacatgtaactctaaccaccgccctctctaccttagtactacgatacaggatgatagaccgcctaggtctttccgttttgaggcttggtggactagagacccttgtagctcgcttgttgtggagaatgcctggggttctgtggctcacggtttggccccggccaggattttcaagaaagttggggccacccgccttgtactttgtaaatggcagaaggtccaatttggaaaactggatactcgcattgctaatctaga

SEQ ID NO: 243695 - DNA, 725 bp, Cannabis indica
taaaaatattaattataaaaattataatttgttgtgactaaatgtatttttagttgtgattaaaattaaattaatgtccaataattttttattgtgattaaaaatcaaatttaattttttgtgactaaaaaattgtaattctctagtctctactgcacagattaatgggtattaaaaattcttactttttttctgaattttagagaggatttgaacttggactcgtggaaccactactagcatgtttatgtttatgaccacaaaattcttaaatttaattttcaaagagagaaaaaaaagataaattactctctgatagaaagcgtttctgttttaaagtattaattttttattattttagtgaaataattatataaaaaatatttaataatctttttaatcaaattttttatacattttctaaatttaattttattcttttcttacaactaaacatcactttaaattcttaaaagacagagtaactttaaattgttgtctacgcacccaggaaacaacagggtcgtcttgagttttgttagatcttaagaaatttacatatatattttaattgtatttttagaaattattaaaaaaaaagtgtatctgccttagttcaggttaattgtaaaattaatttataggtattcttaagtgatattcaagggatgcttgggatgcttgaagcgatagatggcaccttttatcttggtttgcctaatatt

SEQ ID NO: 243696 - DNA, 4215 bp, Cannabis indica
cagcaaatcgagttgcccatgttgttgcaccgcactctcattttctctctggtcgtagtatttttgagtataatgtatggtctgatcttgaatctcttttgtactctgaatacttataattcaatgaagtagctatttcattaataataaaaaaaaagtggttagttttgcctccccaatacccaacttcttgaagataaacatagacatcaagttaatgcttattcctaagtcacaaagagctctcccaatatcatgtcctccaatagaaattggaatggtgaactattgggatcttttaaatttggagggatcttgttagtgaaaatggcacttgaatgttaagttaaaccaattgtttcaaactcgccaagtctttttttctttgtcaaattttttttcaaaaatttcacataagtgggcatatattctaaaacttttgccaaaggaatattaatgtggagttgcttcaaaacattcaaaagtctcttgaattgaacatcttgcttttgtttttgaaatcactatgggtatggaggtgagaattgatgtgaggcagatgttgtagcattctggacagaggttagtttcggtaagcttgaaatgtttgcattttctttgactttcttgttgttttggattaaagagggctcaccaaaatttgttttcattatctccaactccttgccgcttctcaaattgataactttacatcttctattcctcaacttagtagcaagctgcctaatttagttctccaaatttcaaaaaaattcatcttggcattgaatgagagcatcaaccttcatcatataatccttcaatatgccttctaaagcattagattgcatagaagagctactaaggtcagccctttgagaattccaagaataattaggaggttgcttccatgtttaattgtaataaggtgagaactgattattcctattttgattacccatgtagcaaatagatgtcggattagaaggacaattattaaacatatggccatcaccgcaataaacacaagtaacctccactagcttacccataggtagacaaaccagtgtgttatgacatgtggataataatcctgaacattaaaagaagttgttgaatacaacagatatctagcctcaggataagcggtaataaacagatacctgtctcgcactatgtctcaaagacagcattgagaaaacacagtactgtgaggtggcgatattttgagatcattacggaagctaactaggatgacagaataatataaagactgaatttgtattgctggaaagggtaaataacgagttttttaagagcttgtaactcattgacccacatacttgtgagtatgttaaaagattaagaaaaataagttgggagcgaccacacttggaattcctaaaagactaatacaacaattgtcgtaaaaggcagtagcaaggataaacatattcaccaacacctcgcggaacgcgatcaactattcctaaataccgttgaaagatgcgagccatagttggaatatgttacctcgacaagaacagactatttcctaataagaacaaaaagcagttatcaataattattttattttatccacatgttataaatataaaatgtgaggattggccaagtttcatgagcggttacctagataaaaataaaaaaaaaaaaaatggcctccccaaaaaacatataaatagggacagaacctagggggaaaaaaatcgatcattttgggaaggaatgaactagtgagattgagtgaatattcagagaaatcctcttataatctaaacacattgtaaggaaataactcagaaataaatattaactcgtggagtatgtagattttaactacaaaactacgtaaaacttagtgtttcatatatatatatatttattaattataaacaattaatttttatttaaaaggcttcatttattgttaatgaaaatctgagttaatagtttggtgctttcattaaaggcatttgtaaaaaaaagactcgaaacacatctccccctatttaaaccaaacaatttcgtcatggaaaataatcaacctaatgaaccagttgtggaagaagagacaacatgttgattgggaaaagaaccccatggagaacaaactcagacagaccaaaccaaggaaggggacctactaagaggaaccccgagagaagtgaccttaggaaagaagttcctgagagaagagaatttgatgcatatgaccccacgagatacgtttctattatggagttagatgattgacaactccgtcggaggcttgcaaagtccaaccgaagaaatgaggagttggaacaggccatggatgcatccagagcaactcaaaacaatgcaccaccattacatgaagagcaacttgtccagcgaccacgaggaagacctcgtggttcactaaccagaagggcacaaggacccaatgtcaaagaacaggagccaaataatcccacttgcccccaggagcaataactatgggagacaagggacattcctattgatttgttagaggatccgttcagaaaatatcaagatggagagtatgggaagctttcagggtatgattcggatgatgacccagaacctttccaccttgatatattgaatttgtaatttctaaaagaatttaaaaaccctcatgttgcgcaacacgacaggaccacatactctgttgcacgtttaaataacttcattacaataatacgagcaaataatgtgtccaataacttgcattgcatattgttccctacatccctaacaagggcagcaagtagttggtttgatagggaggcattgtctttgacgaatatcaagcaacaacctaaggaatccctaaaggcttttatgagttgctttagcaaaatagcagcaaaggtgaaaaacctgaatgatagtatacaattaacaatgctccatgctagaataactactaacttgtctactatgggaggcgagttatggaatgatttgcaagggcacccagttaaatcaataaatgaatttaatgacatggcacttatatatattctaaaggaagaagctaggtctaaactaaatgtattaaaagatggcttggggaataaaataaactcaagtaatgtaaaaatgaacgtcgcaaacacgagcaagagccatgagccacatgggaagagaaaggatgaattcaaggaatcatccaaagataaaaagaagaaaaaaatatgaaaagtgttgggattttatgctctaaataaaatccatttcaatataatcaaacttactaattaatagaagatcagaaatcattttatgttgcatggttcagatgatttctttcatgattatattattaatgtataaattctattaaatcaagaccacatagttattcatgattaaagtgttgtctacacagtggaatgtaatcatgattatgtatttcacagtttaagtcccatgattaatttgtcagtacactggatttatactgacatgataatcaacaataaagtttacttacaccttggataagtgttatatcctttttagggcattggcaaaatattctagtatcggatgtatggagtatacggactggaccgatattgacattggataagatatcataaatttattgttatatctttataagtcaatatcacttaggtgatcttagtgttggaatatattttaccaggacctagatttactaacaagtatatttttaacatcctaaatatgaacttctaaaacgatgaaaattaaacatataaaaggtatgagaaaccttacattggttgcaacggaatcaaatgactccttccgctcagatctttaacccttgtatcctttctatcgcaagtataatcaagatctgagcctgaaactcctttagttgtttggattctttacagtcttacacactatgattgaggactaatttgctatgggtgggcatgcactcaatcattaaagcttgaattttaatggtgaagaagactattgaatttcaaatcagaagagagaaaagaagaagaagaagaagtctcaagctctctagttgtctgacaagaagaaaacaggtcaagagtcattagttgcgttttgagaccattctttcctttttatactaattcacttcgggttaggattgaattatttgaaataaaaaatgataaaataatagacaaaaataggagttagtggccg

SEQ ID NO: 243697 - DNA, 938 bp, Cannabis indica
taagccatacactgcgctccaatattgcccggcactgaacatgcaaaattatgaaatttctatatatgacatataaaatgcattctgaattcaaataaatcatcataaattaataatttagaattaataactaattttcataaataaactctaattatctgctaatttccaaatttaagctaaacggtctttacagtttgtttgaatctttattatttttgatgacagaaaaattttcgaaacactttttggtgaacttgatcggaaacagcccaggttgacatcatgtctacttgggcattgggtccgagttatttcccttcggaagttctgtttgctcctcaaaaatagttgaatctcaatctttcctgaaaaacaaagaaaatgctcgaaaaagttcttagaaaacaccatcaaaatcagcccaggatctagcttccaagttaaatggatttgctgctacaaattacttttgaaacatttcttgtaggttcctccaattatggatcaatcctagagataaccttttccactcgtcctccgtagatttggtcaaattcagtgaaaagaagggacactttgcatcatcactagccttagcaacttgcatcatgtgattgtatttggagaagtggtccttagggtccgtccagccttcatacaattcaatttggcttattctaaagcgctccggtagcgaggcatctataatctttttcatacatggtcttgtatcttcttcttttgaatcgaacatagttccatttttctttctaaagttcaactctatgagcttcattaactcttcaactttgtgttccaagcgttaagttttgtcacttaaagattcccatctacagattcgatcattaatatgattccttagatcatctccgcgaggtctggctttttctattttagctttctctttcttttca

SEQ ID NO: 243698 - DNA, 10068 bp, Cannabis indica
ttattattattattattaatactataattactattacctacctggttattgcatcagaaggcagagaagggagagagattatctcagcttgtttggaatccatttctatggttggatcagatcagatcagatcagcttagcgttttgtatatttggggtctttccttgcttccccatttcaacctctctcttaccaattttctatatttataaacatcaataaaagcaggggatattaattattaaaaaaataaagccaagtgtgaatgaatgaactcggaacaagccaaatatttatttatttatttatttagagtagaatagtcactggatgtggactatgggaacataataacctattttttaacaaatatatttataaattaacaaagttaaaagagttaaatagtggaagaattgcttggactccatacagtgagtgagtgagttaagaagaagaagaagaagtggcttggcctgccttgccttgttgtgcctctatctattatacatataaatatataaataaaagcaaacactttagtttaacaaaaataccatgtaaatgtgaccacacatatcatgtattaactggccagaggtctaggattgggatggggtggagtggggggacctctatcccattctcttctcaaaaaatatatttttacatatatagccatgtggttagcaccttcacattttcccttattcaattctaatttattaaacttgtttgcagctagcaacccaagattggaaatttctttctgtctgaaatcaaaagtctctcacttgctcttaattttcttccatttgaacccattattgttgataaattactagacatgtttcccattttttgtttttaatttttattaataaataattttgggtggtggtagtggtgagggtggtggtggtggggtattaaaagtgtaagtaagcattagacacatatgttgttgtggattctaggcaaggcaatgcattggtccatccaatttgaaatctacaagtcattgggacccctccacatccaatttaatttattgcccatttttccaaatcagcagtcaagtttggagttttagtttataagataaaagatcaagagcctattagttatcagccagacattcacactgagaaaatggaataatgatgataattggctttattcttacacagtcaatatgctaagttaacacaaacttttgtctttgaaaattcaataccacttcatactaaactcaaattatgaaatgccccaaaagtctaaacctctcttctaatcactgcaatctccaattattgttggaagagaaaaaatgaaaaagataaaagctaagaaataaaatatacaagaaggaatgaaaataataacttatgaagttttttctcataagcatcattatcatcatgcctcaggttgcatcttgtcacattcttctcgaatcgattggaaaagaacagaggacaaatatcgttcaccgaaactagggaacaccacctgaaatgcaagtccaacaaatcatcattcaaattctaacagtaaacaaaagtatttaatcttattgtttcatttttatattgctccacatgaaacatgcttgaccatcatccaggtaaaataataataaaaaaatttacttgctgaaaaatcaaagcacccaataaacatgagtaatgtaaatacacaaatattgactcaagcaaaaaagtagaactttttttctttgttatccataccatagaactactagtagtagtgtataaacaatgtaaatacttaatagtattgtgttcaaggaaaaataatggtgggaaaatctttgtgttggcaaataattcttccaaaggtgccaaaccaaaccaaaccaaaaaaggagaaaggaaaagggtgagaagaaaacactaaataagtaggcctttttcaggttggccagtctatagtctttcaaaggactagactttggttagtgcacatgggacagtacaaaaatcacttcatgtggtaggcatgtccactttgaaaagaagaaaaggaaaatgttccatttttgtaaggtagaaattataaagcggatattcctcttctatcagtaatagtatgatggttttccacttaatgcagctacttttcaatgtgcattattattatgttatgtttggtttcatttgaatagagatgacatacagctataagcttcccggcattttcaggtctctttccaaccttgattgcagcggctgctgctgctcccgaagaaattccaacctgatgtagattaaaaatagattagaaggaaaagattactactttatacaaattagagaactagaaataggtataaaggtagttggaaaaatagagttcacttctttttctctggtcagaacttcagtgttctaaagtttgtgcaacagactttctatacactctggaaaaaaagatcaatcaatttcatcaaaattattaaaaaaaaaaaggcacaaaccaataagccctcttggagtgctaattgcttggcagtttcaactgcttcatcactggatatctgccaatgacaagattcaaaatttgtgagaattgaaatttggtataattatacactcaaacaagaatggacttcagatttcgttgtaaagaaattaacagtgctcaagttactattagctgactttgccaacttaaccataatatagtagctttcaaaatatagactaaatattatgaagagaaaacatttaatcaaataactaaatacagcatatatcttgggggaaaaattcaaacctctattatttcatcaatgacatcttgatcaagattcctaggtataaatccagcaccaattccttgaatcttgtgaggacctgtatgtaattgcaatagaaaaataaatgacaaaaattcaagtgaatgattagtatataaaaatagagggaaattttttattaaactaagttctctaaaaagtgtgtaggcttaccaggcttgccaccagataatatgttgctttcagtgggttctatgccaataacctgagaaatgggagtcatataatgtcacaacaacggaaagagaagtaaaaaaaaagacttgaagaagatgaacttttctttgtgaatacttttgctggagtggaaaggttctaattggagagcaaagtggatgtgctcataatggaaaaaaaataagatgtaatttttcattacctttacattaggattttgctctttgaggaactggccaaccccagaaatggttcctccagttccgattccacctacaaatatgtccaccttcccttttgtgtcttcccaaatctcaggcccagttgtctcatagtgtacctgcatacagggtacaagtcaaagtgacacactgcaagccttaatcactataagaaaagcattaaatccctctaaaattgacaaaaaaaattttcaggataacttttagcaggaaagttttgtaactccaattacacaccaagtataaagccacacatagaaatcaagcaataccgttctaagataaatgatgttgtgacatataaaccaatataagagatcacaaaccttaggattggcagggttgtcaaattgttgaagcatataggcgttgggtgtgctattcactatttcttcagctttctgaactgcccctttcatgcccttggctgaatcagtcaggataagctcagccccaaatgctttcaaaagaactcttctttccatactcattgatgctggcatcgttagtatgagcttatatcctttcgaggcagcaataaatgcaagaccgataccagtgtttccacttgtgggttccactaggatactctataaattggagaaatgaagaaaccaagttaaatcattgcagacactactagcaaaagcaacttccacaagaatgaagaataaaaaccaaacacatatttgcatatcaagctttcacatcagtcaatcatgctttttcctatccatttttaaggaaatgaagagcgttacaaacagaagggagaaaaagacagttaagtttacataattctcttcaaatgtaaataaaaataactggataaaacccaatgtcaatcaacccaaacgcttacaataagaatcatttgtaagcacattctacaaagtgttctaatctgttgctagcaaaataatgccaagtttttatgcaaactgttcaggcactaccatttgaaataacagtcatgtcacatagcgcaatgcaacatagagatgcaatggtcaagctcaagagatatcattcctcaacaggactgtcttactctcgtaaatattgatcaaaagtccccaactgcaaatctgcctaaaccctaaaaaacttaagaggaatatctgcctaattcacttgcaatttccatatgtgagctatatacagcatctgttacctttccaggtgttataagtcctttttgctcagcatcagtaatcatactgaaacctatcctgcagacaacatataaaaacaatttgatgaggattctaacaaataattggtttcatattcagtacacatgtctacatagcataaatgtgttcagaacatctttatccttcttggaacatcttatatctggttctcatatatataataaacaccaaaagtgtcctgctctacttaaagtttatgtgacgttttctaacagtgattgacatgacatgacatgacaaccatagtaaccatagtttcctcacctgtccttgacactgcaacatggctccataatctcaagtttggcagcaatgtttgcaacagaccccttcacaatattattcaggtaaaccatgggagttttcccaataagctgcattaccaaaagaacctcattaatttaacaccacaagagttgttcaggttgcaacttctactatggttctttcaatgttaaatttcaatttttttaaggatgaaataatcgaatcaatgtcaattacataccaataaacaattcgaaactttaatgtaagcacaccatgtataaaaattagataatacccataatcgtacaactgtcagtgaaaagtgtcaagcacaccatggttacttacccccaaccccccaaaaacacacacaaatagtcaacgaacacgaaagactgttcctttccatttctttacaaaaattaaattaaaaaagaacctaaatttatcaaattgcctatccacaatcactacaaatccataaagtttagttttttcttttccatgataatgaaaaaggaggtgggatagaggaggtgtgacctgagtaacatcttcggcaatgttaagaccctcagcttgtggtttgagggaaacggctttgcaaacaatggaagaaccggcgaaaagctttctgggtctgttggtgaatctcagagccgaaaatccctgtttcggaacgaacgaagtaactgcacagagctcggatttggtgcttcccaaacacgcgggcaatggattgaccagagaagctgaacccattcttcgttttttctttctttcttttagggaaaaaaaaacagagacagagagagtggagaagagatgagagtgtttgtgtttaaggttatattatggatacggttcttatgggtgcagtttgttttcttagatactctctgattttaccgtttgttaattaagactttcttgaattgcccaaccaatcagtttctgccatctggcggaaacaattacctgctgactttacaagcttgaaactagtattggagattaacataaaaatcaaaactttggtctaagttcaatgaaccaatatgttatcaatgaaatcaaatcaatcttgtaatgacaagctttgaagagttattatgactattccttctataagtcaacacatttttctttcgccttgaatgacaaagctttggatttagctttttctttcataaaataccaatttaaaaaatattatttataagtaaactaaaatttattcaaagttcgaaaataatatctcaaatttttttttttaagtagttggggaactcttaacttctcaaaagaaaaaattgattttttatggtttaccatcactagaaaagggggaaggaataagatggttcatttttaattttatttttttttgtaaaggaatgcttcattttaagttggatttattcatttttattttgatttttggatgaaaaaagtagagtaattgccttcatttcacttcactgtgtacatataggaaagaatattgtggagatttatggctataattgatgttgatgtaattgactcatcctttactctctctctctcaacctttttttgtggagaatcattttcctttctaacaaacccctacaaatgatacctatcccttcagcataatcaggagtcatgtttaatttgaatgaataaatccaaaaacaatattttctttttatttttttaccacatttataaacaaacatcaaacaagtggcattttgtttaactcaactcaatcgataggcacataccttcattttcaattcataaaaaagagctggaatagaaagcaaacaaacatttcgagttggtcataaacataaccattaccattttcatttccattagcatattagaaagaaatgtcaaattctacttctctactaacaatattccataatggtaaaagattttcatcaaaatgtttgtacaacactacattactcacatttcaattttcaatttcaatactaggttttcgtcatacaagctcctctctcaaaacttacttcttgttcatgtagctaaaactttcaccgccgcttatatctccccgagataaatctgcttatcgctactgcaagatccaatgattggttcagttgggtggaagacacactcgttcaccgatccaatgtgtcctgggagtttatacaagatgcgtcgggaagtagtatcccatatgtaaaccatcctgtcagaacttccagaagtgactttgcttccatccgcagaccagttacatttcaacaagttcttttcaaagttgtgctggtggccttccattatcttcacacaacggttctggggtgcatagggtcgcatgtcccaaatgcagagcttgcagtccattccgttagtaagaagataggaaccatcagggcttaatgacatacctgttatcatatcttgatgcccttgaagagtcatcattacttcgcccttacgcaagtcccagaccttaacatcattgtcaataccacctgtgaagatcttatctgatgcatctgagaagctcacagcagtaatttgatacttatcaggaaatgtttggattgcacccctttgacgcatatcccatagtttggcagttccatcatcagatccactcactatgagaggaggtcccctgcgggttgggcaacaagaattcacaaacgacgaatgttctgccatcttttttatttgtctccctgtttcaacatcccatgccctgagagttttgtctggactagcagatatgatctgggacccatcagtagtccactgaagatccaaaactgcattcttgtgtccttttaagaccataaagttcttacattcaccattgacatgccataagaaaatttctctgtcgtgagaaccagatgcaatcactgttccagctgggttaaacttcattgtgtatatagcactctgatgaccagtcagtaacatgattggtgattccaaactagaagttctttgctttccattttggccaggtgcttgagaagcattatacggaacagcagcccattccattggccttggaccaactacagataaagcactttcactttctgtaggatgaacctgcatcatctttgatctttttggctggtattggacagaagagcaaacaatttactttctaagagttccagttcaacacaaaaatgaatgagttagctaattaagcccaaactcccagattgggaaaaaaacacttgtgcctaaatgacttcatcacaaacgcaaccagaagatatatattaaaaaaattaaataacacaactaatgtaatggaacagaaataatgatgtaagttctaaaggcaattggcagtacagaaccctcttcccacaggactcgaaatggttaactattcaataatgattattcagaaaattgttaagtaatgaaattaattcgccaaaaagtaggaaggtgggaataagttgataacatatcataaactccttcagggaaaaggcagcaagaacataactgttaagaaaagctaaccaaccatattcaattatgtgcgttatagatgcatagaaatagttaaaagagaaatgttaatctgagctgaagaagaatgaaagattgatggaaatgggaaatttttcaaacgatccaccaagagccattgcactagaagaccgtatacaaggttaagaaaactaccagcgatactaaactttgaaatgatacagaaccatacaaacaaagaactgtaaagcccggtaaacccaaagctagagcaaaagtttaacctggtttcgctaaattcaaaaaccctagggacaatattgttcattttattaaaattttaatataattgatgcaattgtggatccaaatgaaaaggaaaatagcataatgatacctgaaatgagagagtgattcggtggtaaaaccctagagcgaagagtcggcaggtttggttgttctacttctacacacacacacacagttgcagtgcataaccaagctcgatggcgcaaagtgttattacttattggattcatctcattctcatctttacccccaattttcggttttttttcattttcacccctcttttttcttaaaaataaaataaataaataaataaaatttgctatttaaacaaaaaaaaaaatgataaatttacaaattacttcacacataaatcatcaatattaaccttaaattaattttatttatctctcaagcactgacagttaggaactaaggtttgagaaaatataaaagctaatttatcattcaataaataatttttataaaataaaatacaaaataatattcaccctaaaatcaaatctatgttattataactttaccaaaagatttatgttggtgtgagttccatttttaaatttattgaagtcataccacatggtattgatgaaatggtcactagatttacacattacataacaactaaaaatagtatctgtgttgggtagtgatctttcttttttttttttttgagaaaataaattaataacaaaaaagagttaaaggtcatcacataatatcagtaagtactgagtttacttgggttcgagtcctaagttatgtattgtaatttataaacgcttaattcaaaaaaataaaagagtactaagtttacctcaatagaactaaactaacaaaaagttagtgcccacttcacttcacaaccttatcggcacacattacaattatgaggaatccaaacaaaataactgattagcgatgttcctacaaactagggtataattattaatagtccgtctactaaactcgccattaagagcattaacaacattcaaagaatcacatttaacaacaataccatataaacaaggggagattatacccaagcaactccccaacaaggagatgcaaaaagaaaatcattttagtctcgacccaaattgttttcacacaatgaatcttagctacctcaatgatcccaacagctacatcataattaattttgatccaatccaccaaaagaggagtaataggagaaggatggctcggctcttgagaaaaaaaagtgtataattaataaagcaatgtagacaatattgttgtgatctttttgtcattcctagcatgtgaaatagtatccacaacaacagtaggatcaagtcctaataagaagaaaatagaagcatcagatagggataagatcccaacgaagaaaatactccaaaactagaagcaaagttagatgagagaaataagtgtttcatagtctcctcctcacaactcacaaccatactaaaggaaacaaaaaactagtccttgacatgaaaa

SEQ ID NO: 243699 - DNA, 803 bp, Cannabis indica
atatatatatgcatgtgtgggtaacagcttatgatcatatctatatatgatatgcacgtttgcttatttgttaactaaaagaaaccctaaccctaaccctaaattatttgtgtatttattttatcaaaattaaatagaaactttgatatatggttgatagggcttagatctaccaataataatatatagcagtataaattagctaaaattatatatattcagcaatttgttttggggtgttatattaactttgaacaaagcaagaatgtcctatttcttttttcatatatatatttgttaattgtggtttacatctttatttgagtttgcttctcttacgggtttaatttggcttttgcattaattaataaacagcttttgctaatcttaattttaataagattattaattaattaatttattaatagtacaaaagatatatataaaacgtacgaacaaaagatatataaaatgtctataggtatgagcagacacgatcattaattttaattttctttatatatatacatcaaattattactcatccaaatatgtatatgtacaattaaagtaattatatattgttcagctgcttaattatatatttcattcatatatagtccatcaaattaaggcactacgccttaatttctgctccatatgccaccactacgaaaggtgcaaaaataaagcatatgcatatacatattaatatatacatatatatatacatgagtaaccaatatatataataactttatataaagattgtattacaatagatatgtgtgtgtctttcttga

SEQ ID NO: 243700 - DNA, 2248 bp, Cannabis indica
actctatcacttgattcaacggatctcacactattccccctgaagttcttaaaaaaaaagctcttgcctacctttaggaattccatcaccacactaacaaacaaacggtctctaacagacatggcagccactttctattggtatgttaaaacttaatgttaatgtctcaattgactatgaggggtgtgatgggtatcagaggtattgttcgagactctaatggtattgtgattgttgctatttccgagcccattaaagggtgcttacatgttaaataaattaaagttaaaactatttcagcttgcttacaatggttgaagtctatatcattgaaacaaatactcttattgtttcgcaaagtattaatgtctatcacaaatattatagttgatttaatgacttgattctcgatgtaatttattagatatcctcttttctagttatttctttgccgtatgtcataagactacgaacttttcgactcttaatcttgctaaatatgctcttaggatggattctataatcatactattattgtaaatgaatttattcattaatattataatagctttctctaaaaaaaaaaattaatctaatagttcttttattttcatttatttaaaaaggactaaattgataaagaggttgaaatttgaaactaacgacccatttatactaaaactcgataaatttcaagaacactctcgtgtctttgttggtgctacttcgaatctgtctcacagccatggaccctctatcagctttgcgagaatacaccattagaggcgagctcgataagatcattcgatacaacgatgagttccgttttggttcggattatagctgcccttgttctactccgaccgcttaccgatccaaacaaggcaatctctataccctcgataccttagtttattacataaaaaaccatcatgtgaagcacaccgagtacatccagcacgctcgcacgcagggcgtccaaactgtcaccttccccgatcgaaagcccctacttgattaccttactggtaaagtctccacttccgattctatcgaatttctcgtcccccaaaaccctagatttcccgatttgccccttccttcgatcgacgaataccgtccggacgatgctgttgttgctggttcgaacgacgccgttgagcctggcattgttgatgatagacctagggtttttggggagcccgagagggtcgactatatggcgttgattagatcgagcgagcgaccactaaaggaccgtgaagctttgttggagagcaaaggtaggaattttcatagtgttctgttggcttcgacgcggcgcgaggaggaacgacagcgtatcgagtcgcagcagaggaaagatgggttggtggctaagagtcggcttatgaccgccgacgacagaggtatgggtggctacggcgatgaaatgggttacgaccctaacccgaaaccgaagatgcatatgaagggaggcaaaattggggaaggggttccaataattttagtgccgagtgcgtttcagactctgattacgatgtacaatgtgaaggagtttttggaagatggggttttatataccaactgatgtaaaggcgaagcagatgaagggactgaaaccagattgtgtaacagtacagaagaagttcagtagggatagggacagggtggtgactgcctatgaggttagggacaagccctctgctttgaaggctgaggattgggatcgagttgtggcagtttttgttttgggaaaggattggcaattcaaagactggccttacaaggaccatgttgaaattttcaataaaagtgagtttgagttccattttttaagctgtcttgtgattttgattttgcatcggcatttctatttgctgttttgatatcacatttcagataatttgagctattttctatgcagttaagggattttttatgcgctttgaagatgacagtttggaatcggccaagactgtgaagcagtggaatgtgaagattatctcagtaagcattctgttttccatttttgaactgcttatttccttgatctttagtacattgaagttctgctttccaattcactttctttgtgtgatttctattcttttttttttttgttaaattacacttatatttggatttttaatgtgcagattagtaagaacaaacggcatcaagatagagctgcagcattagaggtgtgggatagactcgaagagtttgtgcgatcacgttctcattc

SEQ ID NO: 243701 - DNA, 4048 bp, Cannabis indica
aaaataatactattattttcaaactaaacaataagatttgatcacttgttaatcgtttctcttacaaactgcaacacaaacttaattttctgatttattttggtcaactcttttttttaaaatgaaactatcttgtcattgtcattattattattatttaaaactaaaaggaacgttgactccttgtaactcagcctcaaagtcaaaactataaaactagacctatacattatgagctttgtgtagattagagttcttatcttgaccaagtctaatcaaaccaaagaattgtaatgattatgtataagtattgtttatggaacagaaattttctttcaccaaaagttcaaaaccttgaacaagatcttcatagtttataacacgttggtttttaaagctgtagaagaactcagaaaattaatggcttcaatctattttttgatgctgcttctgattactgctaagttctctatatcaacagctcaagaaagatcagcctaggctcttctctctctcccaagaccaataattcacattggttatcaagttctggcctctttgcatttggcttctacaaaacacaaagcaatggttttgcagttggaatctggtatgaaaaactgaatcagaagacagttgtatggacagcgaacccggatgatcccccattgtcccatgatgttacactgcttttcagcgataatggttcgattgtcttgcaagataagaaaggtgtagtaaaagccatcattgccaattcctctcagcctgcagcaacagcttccatgctcgattcgggcaattttgttctctacaacttggattcgacgatcgcatggcagagtttcgatcatcaagcagatacccttttgccaggacagcctctgcttccaggaaatcaactcgtttcagctgataaaaggttccggcttgctatgcaaggagatgggaaattggtccaataccctgcagcaagtccaagcagaccctttttagttattgggaaagtaacatcaacaataaaacaggtaacaatgtgagtcttaatcttgatcttgatggtcatctttaccttctcaatgccactgatcaaaatacacaaacgatttttggtgatgggaaaactttcaatgagcaagttttgtatcggttgaagctagatgtagatggaatactaagattgtattctcatagttcagttgatacaaacagtggttggggtgtcaagtgggcttcggttggaaacaagtgtgccccaattggactatgtggcttgaattcctattgtgttcttacagatcaagatggagaacaagattgtgcatgcccaccgggctttgattttgtcgataagcaaagtagaaacttaggctgccagagaaatacaagcatagattgcattgctcagagccaaaatgatcatcataatcatgatgaagattcccatttttcttttgttgagcttgatgggattgtgtggagcaatgatgactcgtattctgctaatacagcgatcaacaagtcagcttgcaaagatgaatgcttaaaggactgtaattgccaagctgttctgttccgaaaaaacaacaataggtgtgttaaactaacaacaccattgagatattcaagaatcaggagagaagacctccttacaaccattatcaaagtccgtacaacaagttttagtggcaaggatagagccaatgatcatcatcaacaagcagttaaaagtggaatctttattactggcatggtagtttcgagtttgggaatcattggcttagtgatttcgggtgttcttatctacagattccgtactttgtattaccaaaggattgggaatctagatcatgataagttttttgatgatgtctctcttagaccatacacgtttggtgagctagaaaaggccacaaatggtttcaaagatcaagtgggaagaggcgcattcggaacagttttcaaaggagtgattacatcaaacagttggaggactagtaaagttgtggctattaagagactagagagagtaatcgcggacggagaacgagagttcagaaatgaaatgacagtaataggaaaaacccatcacagaaacttggtcaaactccatggttactgtcatgaaggatcaaacaggctgctggtttatgagtacatgaaaaatggttctttagctgactttctctttaattccaagacaagaaagcctaattgggaagaaagaattggaatagcattagatatagctaaaggtatagtttacttacatgaagaatgtgaaactcagataatccactgtgatatcaaacccgaaaacatactaatggacgatcaaaactcggcgaagatagcagatttcgggctggctaaactacttatgcctgatcaaaccagaacttatactggtttgagaggaacaagagggtatctggcacctgaatggcatcgaaatatggcgataacagtgaaagcagatgtttatagctttggaatcatggttttggagattgtttgctgtagaaggagtatgcaaatggatgttcctgaagaaaaagttgttcttgccaattgggtttatgagtgtttcatgtatggtcaactagaaagactggtaaaagaagatgatgatgaagatgatcgtgtagagatgagtgaagtggagaaaatggttaagttgggactttggtgcattcaagagaattcaactttgagacctaccatgaagaaagtttgtcttatgttggaaggcattatagaaattcctgctcctcctaatccaatctcatattctggttagacaattttccatatacatgtactatagtgtttttgtgatgattaagagcagaatcagtaatttcaatcaacagaacaaagttgtaaaaattgttgtaattctttactaataacccaaaaaatattaaacatggatctttattgtcactacatcaatttgaatatgatacacgtagcattgttttgtaaagattacaagcaataacaaaattgcacagaataattaaattcagcatcaatgctctattctactttattttattttagttcatgttatttaagaaagaaaagaaatgaacacatttcaaatttgcacatacaaatcaacttcaagtatttccaaactgcttcttaatgtcatggaaagatacagtggcagaacccctccttttggcccttggttgagattcatgctccttccaccctgtcatgtaaatcacctgcaaaaccacaagaaagagagcataaattggagtttttctctgaaaaaagagaagaatcatcttgagagaaaatttgtcttgctctacctgataagtagccgggaccgagccatcttctgcaccaaacatcgactcgtaaatagctgcagttgcaagggctgtttctctcttcagaagctgcttaataagaatcccattaacttatttaaatcatgtttctacaatattagcttattcaaaagaaatatatgctgagtttaaccttgtttctttgtacaagagcattagtttctcccattgtacgcaaatgttctattagctcaagagctgtgacaatggcagaaaaggtaagtatctaatcaggtaatttcaagtaagagtatagtatagtatagtatattattcagcatgagctttaaaaaattagtagttataagaagtgttttcaaaatagcatttttatttaatcattttacacaatattcttttctttttaacaattcttagtaaaatttgctcaaaacaaaaataattctttgtagaatgattttcgagacacacttgacactacgtcacaaaattctcgacaacatatccggagccttagcttgcaaaataaaaaacagttatattttcctttttttgaaactaggctcctccagcataattctagaatatttgaggaccagaaaactatagctattgattgctatgtagatgccatagagaaactcgaatctcgaaccttgtgggagaaaaccacaccatttaagatacccatcttgttttttgtttttttttccttt

SEQ ID NO: 243702 - DNA, 1291 bp, Cannabis indica
tattgggagagggtgagagcaaagctttgtttgggcagatagcgacttcgtataaaaaaatttactttggaacaaatctctgcacaggacaaattactaaatgactaagttacggccgccagcattgtcaattaatcccactgaaataaataggtaaaaaatcatattatagcactctcggatacaccaaaaattttacttattttagacttgtaagttttgataggagaaattttagagctttgaaagcatatgaaactggaaggacctagcttcttcatctatcctctcctccaaagagaatttgaactcattgtttttacccactttcaaggtaaaatttgccagaacttttactgtcttgtctacctaacaatagaaaaaacaaccccccacccattaggtgcatagctactataataacgagaggaacaaccactaccacaaccaccacctctgaaaacaaccccccttgggggcctatatggttataagattggagacaaaagtaacccttaactggttttagtaaccacacaagttattcactattttttcaacggcagatatagatgctgatgctgaacgtgagtaaccttaccccaccaacgaaatgagggtcagagttagtacccttttgaactgaaaactccagactctcccaaagtgataattactcgtgaaagaatcttgtgagaagccacgttaagagaatgaaacaatttaatgcccggtagtatacaactattatttacttttcatctatcaaaaaagacactatggatatgaacacatcacttccaccatttccctcgattgttgtttcactcattattagtttatcgtttttgtttttcttgctactttataaacaactacatcacacatcaggaaattaatgttcaagctctgatacaacaataataatgtacctataacatttttctactatacattattgatcaaataaaattaaaccttactatttggctacaaaaatactagagaatggggcatgcattgcttgcgcaaacacggtggccattatctcaagaacatttgatatctttgcctgtttaaaaacaagttgggtcacaaactgaggagaaaacttgttgtggcttcttgttagacatggtcgattatcaaaacagtgtgaatgaagaatttctcatcctgctcagtttccataaagccatcgtcattgagctgaaactgggtttgttccacacaaaaaaggatctgaccaaaatcacataaaaggctgttcatttcccaatacactgatttt

SEQ ID NO: 243703 - DNA, 2260 bp, Cannabis indica
gtgaaagtatatcacgggacaaaatcgtgtccctatacaatgttaatattttgttgcaattaaaaataaataaggataaataatattttagactctatatttataacaattatcaattcgactgtgtcttttgttaaatgataaaataaatcacgtattttttaaaattatacaaataagatatttttgtcaaaataaaacttaataataacacgatttataacaaaattagttacattttttgtatatgttgttgttagaaattatcttaaagttagttatattaaaaaataaaattattaaaaattgagcttaaagtcctacttttactattttaaaaaaataataaaaattggttacaaagtctgatttagaaatgctataacaaaattagttacattttttgtatctgttttattaaaaattatcttaaagttagttatattaaaaaataaaattattgaaaattgagttcaaagtcctctttttactattttagaaaatatagagttcattttatgatttaataaaacagaatgtccaattaataacttttagaacaatttgcggcgaaacccccttatatttttatttttatacacttaacctctttttttttgtggcaaaatccctttaaatttatttttctttataaatttgacacgacagttatatattaccgtgtgactattgtatacacctgtatatgtgtaatagtaaaacctcgaagtcgatacgtaatatctaacggataaattttacaaagaaaaataaacttgccaaaaaaaaataagagaattaagggtataaaaattaaaacataaagggtttcgttgcaaattcttaacttttgcaaaacataaaatcaacctgggagatggtatgaagaaatagcatagaaacagaacagaaagaaccacaactctctcttttcgaaaattcaggtatcagctctttgttctttctagactttgtttgtacccaccaatggcagcttgctggaatctctcccttgttgcacgtagaatcactgatttgctggaaaaagaaaaaaggaagaaggggtccttaaaaatctttgtagcacttgtaaagacctccttccaaaacttgttgttgcggagaagaatcttcagtatgttgatgcggagaagaagcgaaagttgaatcctgctgtgaaacaatggatggaggatgttcaagatgtcctcaatgatgctgagaatttattaaataattatgagaagaaacgtcttaccaaaaaaatttatgagaagaaacttaacgatgtttcggagagattaaaaagctttaaagattatgaaaagtttttttcctttaggaaagtagacaatgaagaggaaataataaatcagagcagctcatccgaacaccaacaacaacaagctgaagaagtttttctatggaatgaccagagagatgaaatcattaagattttgttgggtaatgatgaggagaagttgaaggtcaaggttgttttcatagttggtggagaaggaataggaaaaaccacacttgccaaacatgtgtacgatgatgctcagataaaacaacgatttgtaaagagaatttggagaccagtattttctgaggtcttggagaaagatttagtattatctgatactccgttccttgttgttttagatggtgagcaattaagcggtggtgggaaatggaattctttgataaagagtttacaagtggccaatgcgagtggagctgttgttgtaattatgcaacttggaagtgtagcagaggaatgtatgcgtagtggtagtgaagggtacatcatcagactaagtgatctaaatgagaatcagtcgaatattttatttgaaaacattgctattccaaaagaagatgaagaaaatgttcgatcttacaagacaagtgtgggacatgagattgtaagaaagtgtgggggacatactcttgtgataacggcaatggcaagtatgttacgtgataaaaaaagtacagaagattggcgaagattcaaaaaggaatttgaagatgataatgttggaattggattgctgaagctgtgttttgacaatctacctttgtctttcaaacattgttttgcttattgtagcttatttccaataggtaaggacattgatgttggtagattgatacagatgtggctggcgcaaggattcattgctgatgttcaacaaggttatcagtgtgttaactatttaatacaaaggagatttttgttggtttctggagaaga

SEQ ID NO: 243704 - DNA, 2760 bp, Cannabis indica
tttcattcaattttactatttcagtgattgtttatgtactaaatcatgttccccagactttgatatctaccaaatcatacccctcaaattttgatatgtactaaatcatgccccttgaactttcatccgtgttagaatttttttactaaaattagacaaaaatccttaaatttaacaatctcaatagttcaaggggaatttttaatggccaaaaaatttcaggagcacgatttaattagtacatatcaaagttcagggagaaaaattactaattagccctaatatttttaggtctatctctattctatctaattatatattagacgttaaattttgtcaaccgattcaattaaattaattttagtcattcgaactaatccaacacccattgaatgtaattcatttatacttattggattagtttagatttgtctaatattttagacttaatcgtttttaaatcgaatcagtttcatctaatactttagatttaatatttttttagattgaatgtgattaaaaaataaaactgaaattctaatcttaagtttcatgcacatatatattttaagtttaataatataaaatttaattatttatctaaactaaatgaacatgctaattagttcaattagatgttagattgtattgaattttttgacaacaccacattcaacattcgatcttgttcaattggatatccaaaaataactatgatccaatccaatcataagtagggttggaatttcatattatcgcgtcgtgttcgtgtcgacacatttatgatacaacacaattaaggtaaacacgaacacgacacatttattatacgtgtcaaaacctcaatcaagaacacgacacgtttattaaacgtgttgaaacctcaaacacgaacacgacacgcttaattagtaggtcacatgacacaaacacgtcatgatacaataacacgattatgatgtgattaacattataaatacaaaaaaaaaaattgagcttttttataaaatatatgaagattaattcgtgttatcgtgtcaacataattatgacacgacacaattactaaatgtgtcgacacgacacgacacgattattaagcatgtcaaaaaatcaaacacgaacgtgtcacccaaattcatttatttcatgtcattttcgagttgtgtcgttgtgtcatgacccatattgccagccctaatcataagtggatatcaaatgtttgagggtcaggtgtgattggattagattaatttatgcacatgattagttgtatttactttttgtactaatatacatattaaaatgttattgtacattagatcacaatgttaaatattacaacaaatataatattttatcatgttataagattctttgattcacttgttaaagtctcaccgatatgatacttacgaattttgtgttagatgtagacatgatcgaatattggttcctttcggtgttaattctcaaactgaaaaaattgtgcacaaatttagattcaatctaaattactaaaaataattactaaaaaataattttataattactaaaaatgcaatttaatatttgtaatggagtaataataaaatcaataaataagataaattaattgatgagactcaataaattatctaatttattagagtttagtactatagtttcattgtccccaattaaagcaccattttataacacaaagggaatgaatgtcaaaaaataaagtgttagctcagtttttagttaacaacacaaagtcaaataaataataatatgattgattattataacaagaacaaatatatattaagcaaatgacatcaaagttttatagaggtttcggtctaatttttttagtaataacctactctccatttcgttgtattttatataaagtattcaaaattcaatggacctgagccaaatgagtttctcaaatactttctagaattcttacagtaatttttgcagcatatatgtttgaagacagagaatcgaatcttattttatgtgtaatgggttagtgtttattggtaaaaacataatatttcccataaattttaagtcaaatgggatcatttaaggcctaatcttcagaaatttgagagttgatctcgcatatcccattttgactacatcatttactcggcatggtcgagctatgatatatttgttaattgacaaatatataataaagattaaaatgtgatatattatagattaatatatattatatgttagagattgtattatataatatttaatataataatatacataaaagttataatatatgagaagttacaaatttgaaagtagattataacctaaagattataattgataatatgtaattaagtaagttattacatatgaaaattatgaagtcaatgagataagttactagctgttagaaactggtacaccactcatttatattatttatttaagagttggaacgttgggaattaatgtagctcggagaggagttacaaaactcaaaattgagttgtttggaaactgttgttttatggttgttttaatcacttggagctagttttggaataacgtccatgaatgtgcataaatttattaagcatatttctatctttctttcccttacttttttttattcttttagacacctattaaagtactagaaatagtcatgacgtgaaggaaattcgattttctaaagtgatcctcaaacactattgtaaagtccacttagttaatttggaaattagcagttgttta

SEQ ID NO: 243705 - DNA, 2169 bp, Cannabis indica
tatacatattaactatcatataaaaaaacaaaatgataattattcaaataccaaaaacatagtattaataatcctattagatttccgcagaagttcaataactatgatgatatattttgagattgataataaaaattacaaaatatgaagaaaagaaaaaatcaagaaaaacataaatattaatctgcatatttttctccatagttagtaatccaactattcttattcttatacaagaagacaaaagatgaaaattataatatatcggtttctacaattaaattaaggaaaaagatcaaagtcaaataaatacatgcatcgtgtttcaatgcttagaaaaataaccaaaaaagaaatactaagacaattttttgtgttaaaaattggtacatgagaggatggttgaaccttcttttagtgtaagtttcaacacatgtacaaaaataacatgagttccaaaaaatctatcatctttcactaaaaccaagtcatgttatatttgcttctaaaatactcaatcaagtcatgcatatacttgtccatatatataaatagagttctattataaattaattggctcaatagactagtagaccctcactaattatatatataagctataccaatgtaataaattatcattattttttttttttttgtataacctctaaagttaaacaaatatttataattagtatttttcaatatattattgtatattatgtatgaatatatatatatatatatatttgctcacattatattattgctctactaattttaatatatacagagcattcaaatggatgagttaagaagttttaatggatcatattgccaaaaagaagaagaaaacaaatgcatattaagtcaagcaaatatagaaattaaaggaacggctgatttgattgaaaatagatttcactaaatgaagaagtagtccaagtctttgatttgacgaaataattaaaaaaaaaaaaaaagaaaaaaaacaaattgattccaattccaaagtcacacctctaagaaactataatgaaagagacaattacatttgtaatattattttaaatatacgtacagatgtctctttttcagataattaataacaaactaattaatatataatatatggtcccatgcatgcatattcaatatatattatgtacgcaagatttttataaccccattttttcttgctcttatcttaatatgattaaatatataccatatatatttttgaaatttaatttcttgaatctatttttgtttttgtatactattgaatatgaataaacatttttttatatatagttttcaaataaatcatggaccgaacacattgtctgaccgaatttcctttgctaattagaaatataaaaatgtatatattaaaaataaaagtaaccaatatgaatcttcctttttcattgtctccaagtatctctcaagttttaaccaattattctaaatggacagttatggctatgggcatacagtcacatttattagaaacaattaatagtagttataatatttctgctaattaattatataaataaataagagttgtaaatatgtgcgcgtcgacttgttgtgttagcacggttcatatttttcggacttttttaaaatattaatcgtgtcgtactagatcattatgtgtcgtgtcgtataatgcaacaatttttttaggatatgcccgacacggctcacaaactaagtaattaatttcgtggcgtgctcagattcttgtcgtcctttattcagctcgacctttttttttgtctattcataagagttatttctcactacaagaatgtacatttttgccggcacaattaataaattgcgccagcaaaaggagtcaacaaaatggatccagctccctgttttgccgacaccttttctcgtcggtaatagtaagttttgctggcgaagtaccctaaattcgtcggcaaatgttggcaatccaactgccaaaaagtgagaacttttggcggttcgagtcaccttttgccggcaaacttatacatgtgccggaaaaaggtaataaatattttttttatttttgtcggcgcgtaaatgcgccagcaaaagtgttgaaaaaaaaggcggttaaattttctcgcagtgaaaaaacgtacgcgcaaaagtaggtgaaaactt

SEQ ID NO: 243706 - DNA, 3174 bp, Cannabis indica
atctatttttattaaagcgaaataataaataatgcacatttcaaacatatagttactcttatatatatttatatgaagtattgttatttagcatgtttaaaataatatttatttaaatatatgtgagatgtaatattaaattttattaataaatataaattcatggtttatatatgaccactagttgtttaccatactcattatattattattattattattattataataataataaataaaataatattatattggacaataaaattaaggaatataatatatctaaaaatttttagaaaaaatgaaaaaaaatattttaagtatattatgtaaattttctaaaattaatatatttttgatttcatctatacattagggagaattttttaagttgtatggggatgtctgtcgtacgtgttaggctagctcgacccgtattttaaattaaaagcctacgataagttaggtcgtgtcgtgtcaatattttaaagggtcagtctggcacgacatgtaagtctatattttcgtgtacgtgctcggacttgtgatgttctttattcgtgctggcttattttttataaatattgtgtcagccatttcttattaaggctcgaattcaagctcactttttttactatttttttttaaaatttaatcactaaattaattgtattttttttgttaatttctaacgatttttttaattactttttaattattacaaataactcatataggatgctacttttaatttttccttaatatttgtgctaatcacaagataaattaaattatacaaattttatataattttatagtattcataaaaaatgaaaaaatatattaggtttgaaatttcattagtaattaataaattattttttaatatatattataaaaagttattagggcggatctatgccctagtgaataaataattcaaaaataaggaaaaattaaaggacactttttctaaaggccccaatcagagagcaacttgtgcgtatatgcatattaatttatatttgtaattgcagacaaagaagaacgaaagaaattgtttattgatggtgtgaatctttataaagctgcattaagaggggactgggaaagtgctgaaggcatcctcaaacaaaatccaagccttttaacaacaagtatcacacacggaggccaaactgtgttgcatctcgctgcaggaacaaaacatgtccacttcatggaaaaattgctggccaagatcacagataataaagatttagaaatccgtgacgataatcaaaacacagccttctgcttcgctgtgtggggtgaaaaagctattgctgatcttatgtataagaaaaacgaaaatttggcaactattgttggtgctaaaggtatgacaccactcttcatggctgccttgtttggacgttccgaaatggcctggtttttgtacaatgaaacaaaatgttgtttagacaaggataacaaaattcacattttctttgcttgcatcaacactcgtctttatggtaagtattatatatattaataattaaataatttacactaatgatatattgtttgaactataatttcattttattagttaaattagcagtcaaataatatagtttatttatggcagaattatatacctatatatatgtattgagactttgagtatctatttattaacgttactttttagttttataagtttttacttttggtatatggagaacttataactcaagttttttaatatagtagcattttatttctcctcataaatttcagaataaataatttataatctcaaaaataaatttcacagttagttgcatggatgtttttttatatataaataatatttatattattttgaactttatttctaaaaccataattaattattaagaattttccaaaaattagtgaaatatatcaatattataattaattataaaatacaaagtcataaatgggaaagtcatttctctacgtactgtaaacaaaattcctccattataggagttacctaaaacaaattctaataaatataatctactcatgttttctgtttatgaattattgtaatttaattgcatgtttttctatagaataatacataatatcaatgcgaagaagagagagtgagaaaaagtagtcaacactacaaacaattggtggttattttgcagatatagcccttgaaatattaaaatcggatctttcgctggctacaaagcgagatataaatgaaaggacagctttgcatcttttggctcaaacaccttcagcatttgataacaaaagccctgaagggtggagtaaactcatcaaatctgcatgtaaattagatacaaacttaactaataagattaattaaattttctctttttctgatgttgtttaattaacaatgttttctaggtttcaagtttggatttagaagaaatacgaagcaatctacagcccttgagctagtcaattgtctctggaattatgttttggatcttgggaaggaaagtgcaatgaaactaatcaaacatccttcacaactccttttcgatgcaaccaaattaggaaacttcgagtttttagctgctcttctcaactcttaccctgaattaatcaatgaaactgatgaccaaaatcgaaccatgattcattatgctgtaatgtatcgtcatgccaatatctacaacttagtaggagagtttggctcaatcaaaacacttttttctacttttatagataaacaaggaaataatgtgttgcatttagctgctaagttaccccctccggaacgactcaacactgtctcaggagctgctctacaaatgcagcaagagttattatggtttgaggtacgtatatcaaactaaaatatatcatagtatatgtattttaaaatagtaacgacctcaacaaaaatttcattaataaaaacttttttattatattcaataattatttagtcacatataatttgagagtaatttggtcaaatgggttgaatttcattaatcaaatataatatataatacaagatagaaaataagtatattccaatattttctttttttttttttactatataattcatcttatcacaaaaaaagttttagaagtttatttgagtcaaattttacaaaattatatgtacctacatatatacag

SEQ ID NO: 243707 - DNA, 2578 bp, Cannabis indica
ccgatccaatctgcactattgcggatttaattggattttaaactgttatgcggattggatggatccaaaatttaggattcgcacttagtgcggattggatgtgttgaccaaaaaagtgcggattggatcggatgaagagtcctatcttcaagaggtgaatctcatttctagtaaattagtatgaccatcatcttttccttccacaagctgaagtgtctagtcctatcaaatctctcaagatcgaatctggttaatgatgaagccatcactgtctgtttcttgatgtcttgatcctttgatgttcttcaatatcgaattcctatccttataaaaccaaagctctgataccattgttgtaatactacaacagtgaattcaactaacatcaaacataataatcataagaaattatagagaaaatgattcaaagaattttatccaggatcgaccaaaagcaatgcctacttcttattacccccttaagttgatattcctcttattcagttgatgatcatcattataaccagttaagaacacttgaagagctttacaaagagaaccccaaaacactcaatccgagcactccaagaacataacttgggactagtctctcaaactctcactctcactctcacattctttgtttcttctctccccttcaatctaatctcaaagctttaatattttgtaaattaaaacatacatgtctttatatacacatgctacaagagaataaaacatagggaaaacgaatagcctaactacccgggctcgtgtgagtcctaactaacattaactgtcaatgatagtttgtaactaaaattaacaatcatagcagaaaggtcgatgttgatgttgattttctttggattaccaaccaattactaataaaatgtaaagatattgttatcataatattttaatcaatatcttattttatttttatattattttacgttaaagttataattttcttgatttatattctattgatatataaaattttatatatatgataatttcaaaacatcactcacgtataaacaatattttaaagaacaaaaaaaaaataaataaataaataaactttaacacatgacagtaattgttattctatattagggttatttttttggggagatttgcaattgctatatgaaaattttcaaatatatggacatttttcgaatgtaacccattaatgaaatttcatttacttaataaataagaaataaaaactaagcatgccctatattattgcaagatgccaaagtttgataagatgtcactatgatgttaccaaaatttactttttagaaaaaatctattaatcacatgtaaccaaaattcataaattgcaaactctaatatattatttcattattttttttatttgagtgattataattttatgaaaaggagatcacatttgattaaattcatgtaaattaaccgcaaaatcatctataatatcttctctgcttttgtcgacatcaaatgatttttattcatagcgtcatcattaattccatatagtgtcatattcatcaaaaagaagtccatttcatttgtcgtcttcatattttatatttctttatttttttcttaaaaaaaaatattatggttggtattaaactaagacaaccctcccccaaataaaaattattgtacttaaagaaaaaagatgtatgtacgaattttcttttcaagtgtcaaatataattatgtccctttctagctggtcttcttttgtttcttttctttaccttttaaaaaaagttacaaatttattttgttaaaaatggcaccactcaattggcatccatgcataatttgatcattctaaatttttattagtgttaacaaaaataaaataaaatatcttcatcgcgtatctgtggctatgtatcggaatttttgatttaatttttaatttaatgatacttttaatttttacgttaactttaacagaatattctattaattttttataatattgttatatatatttaaaaataaatattatgtacatattttatataaagaaatttaaatttaaatttaaaatatttaaaatattatagatatttttaatcttatttttaaattattagtttaactttgaattaaaataaaaaaaaattaatgtaaatattttatataaaaaaatttaaatttaaaaatattataaatatatttttaaccatattttaactttattattatttattgagtaatttgcggcataaatacctaagtttatcttccagttgcaatttaatacctaagttaaatagccacctagttgttatcttgcacactagacaccagatggcatgacacatcattttattaaatagccacctaatattaactattaaagtaaaaaatttaatttactttaaaaaaatatttacataaatattatttataataaaatctgaaataaaataattaatacaaattctgtaaacaaaaaccaaaatccctttcactcaaaaaaaaaaaaaaacaaaaaaaaccaaaactacctaaatctgtggaactagagtcaggggagagagaaatggtggcggct

SEQ ID NO: 243708 - DNA, 3032 bp, Cannabis indica
ttagcaatttgtgactctctaacctttgccaatgaatgcgtgctatgtgatgttctactttttttttttacatgagtttggaaaatacaaacaatatgaccttaagagcaatctcgttgatgcttccttgaaatctcattcacaatacaaattaattaagtttagtttaatagtttaacaatgttagaatagatagttaagtatatttttctttaaacttagttagttggttgttaatccctgcattgttagttaatttttttcctaatttctatcatggattgactttgtagctcagtcatgtatatagacctctattttcattgtaatgaataacaattcattcagttcaatctttcattctctttttgttctctttggtttcactttattcaatctgttatcatggctagacaattcaatatgatatcagagcagttcccttctcttgtggctgacatggcgaaccttggtaacaacattgttgatccatgaatgaatggacttcaagctacaaacagattgaccgcacacacaattcagatgactcaagatcctatcttaatcataaatattttgatccaattgaatgatcataatttcctcttgtgaaagcaataggtgctagttgctataaaaaaaaaaactgattactcaagtacatcaaagagcctcctctagctaagttcttggctgatgaagatcgaacaacaaacttggaaaatccagtctatactgaatgggaagttcaagatcagttactcgtgtcatggttattatcctctttgacagaaagcttactaacaagagtggttagttgtaacactgctcaacagatctgaacctccctagagaatcatttcaccttacaagtctcatccaaaattctcaaattttgcacgaagctacaaaatgtgaagaaaggatctcactctcaatgattatctcttgaagttgaaataaatagttgacctgctagttggagaagttctcagtgatcgagattatgttgcattaatctttaaaggtcttccaagtgagtatgactcctttgtcatctcctcaaatacccagataaaaaattatactgttagagaaaacgagactttgcttttggcttctgaatttgaaaaattgaggaaagaaattgatctcagtgccaatctcaccactcgagaaccaaatcttatcatggaatccaatcttgcctttagaagattcaggcaacagcagtttgcaggtcgatgcaactcacgatttttcaatggaccaggcgaattcaataatccaaactcaatgcacaacaatgatttttcctcaggctcaagtcaaaatttttgaggtagaggtactctcaaagttaatcgaggtggtaaatctagtttgaatctcaacgatagaattcaaagccaactctgtttaaggtttggtcatgttgtacaagattgcttttattgttttgacaagaatttctcaagacctctcataggatctagtagcaattaagcatcttcatcatcaacatttcaacctttggtcaaccttacaacttcaaacaatactagtgatgcaaactggtatccagattcaggagccacaaatcattacacaccttaggcatggaatcttgcaaatttctttgattatgatggacaatatcaaatgtatattggagatggtgtagatttgtctaaaacatattggtcaatcatttattcttcctaattgttcctcaccatctcttgttcttagtaattcacttcatgtgctagaaataaccaagaaccttattagtgtgccaaagtttgctcaagataataatgtgttctttgaatttcatgctaacatgtgttatgtaaatgacaatttaacttatattatcttgctgctggggatgcataagaatggcgtatatacttttgatccttcacatatcaactttgtatcaccaagtcctaagggaggagtcactttttatcataaaaagcctcacacttcacaaatctgtaacagtgtttgcagttctaaatccaagagcacattcactgttactctaaacaactcagtaatcacaattgtaagatgtaataagtgtaattatagtgttgaaaatgactttactctatgtcataataaattaggacatccctcaaataaaattttacaagttgtcatcaaatcttgtaatctgccaattagtaataaaatttctcaatattccatatgtttagcttgttgtcttggaaaaatccataagtttctttttctaaagcattcaccacatttatttctgaaccattacaattaattatatttgatctttggggaccatctcatacaattttatataatggttatgtgtattcaagatttacttggttgtatcttataaagaacaaatttgatactttcaagatcttcattaattttaaatttgaggcggagttacaacatacgaaatccctcaaaactcttcaaacttattgggggggggggggtgagtttaggtctttcaccaattaccttactaaaaatggcatccatcacagacactctttcccaactacacatcaacaaaatgatttggcttagcgcaagcacagacatattgtggagtatggtctggatttgttagctcaagcttccccacctctcaaattttgggatgagacttttaggactgttgtatacataaacaatagacttaccacccttatgcttcataacatgtcacctttagaagttttattctataagcagcctaactatacaccatcttcaaaacctttgggtgcaagtgtttcctaaatatcaagccatatagtaagcacaaattagaatttaggtctgcaccttgcactttctttgattatagcctcaaccataatagatacaagtgtcttgatgctaatggaagactttatatttcaagggatgtagtttttgatggattttcattccattgtgaaaaaatgtgtagaattctccacacgagtcaccacttgctacttaattttctcttttaattaatt

SEQ ID NO: 243709 - DNA, 1969 bp, Cannabis indica
ttttccaaatcaatgactttaattttttattttattagatttacttggacaattaatgtgtagaagccattaatgacttctagttttctctttttcttttttcaatcctaaagttttggggtatattcaaaagataccctttcggtacacaaagttggggtgtaattataaaaaaataatattttaattaaaaaatggggtaaatttagtaatggggtgtaattatagttctatggggtgtaaatataatttccctatttaatatcgaccgacgtatacctctttttctatttactaaataaccaattttttttttttttctctctattctttctttgtatttttcaatcccttctatattttctttcaatcgtgccctgttttcagattatccaattaataaagtaattttgatgttgtctatagaaaatagaatttctaacttataaagaaagaccttatcaaaaaaaattataaacaaaaggaaaaaattaagacaaacaggataaatttgtgttttttttttttaactatattaagtttttttagttagtacgttctaatccaattcaatctataaagtgtggatacctacaattgtgcggattgaattagattaaaaaatttaaaatctacatttgtacaaattgaatattaattgatatataaaaataactgatctaatctacacatatttattataaaatttaaaaaattatatatacaaattaaaaaaaaataattcaaaagtataatactaataatacaattataattcaaaacttaataaatcaaatgtagatgtcattctcatatataattttgaactattgtgcggattatatctaaaatatgaaatatgcatttagtgcgtgcggatcaaatgtactatgagcaaaacagtgcgaagacgcctatagttagttgggatgagctacctaactaggatttaaccatagttcattgaactccacttgtatgctgccaagccattaatccattatctacaatatatgttttttttcttcatcttgagaatatccgaattttgaattgaggttcagacaacattatcaatacccatgtggttatgtattaacatattactattatatcataacaataatatttaagtttttgttttttgataatgaataatattcaagtttatttatggctcctacaactttttttaggagtaaactaaactggtaaactgcaatgcatgcacactcaaaacaaaaatctgagtatgctttaaaagctttttgcttcactattacataaaaagaaagaaagatgtaaagagaaactgcttaagtttgcaaaatataaatacatagacaaaacaaaattagccatacaaatatagtggccaataatgtcctcatacaaatactgttgcatatacaagattacacaacaatcccaaccaacaaattaaagaacctaataacaacattaattcaagaggactgaaaaaatttgtataggctcatcacattctgtattttcatctgcacaagttgaaaggtacataacagatcttccaaatgtatgtactcatattatctatctatctatctatctttatatataatataataatgaagtttctcttagcttcttgttcttagtaccctgtttggatgcctggaatattggaattgtgatgagcctcgagaaaaatcatcatgaagatagagaattagtccaaatctctgcattcttgaccttggagacactctctagcacctcaaaaggaagaatgtctccaattacaactaccatcttggactctaaatcaactttatacgaggtcacccctgttttattaaaggcacaaaattagaaaaaattaaaataaagagatagattgatcacaaacattataaaggtacaacagttatttacatatatgtttatgtatctgtgtaccttcaatttttgagatatgtttctcaacttt

SEQ ID NO: 243710 - DNA, 3795 bp, Cannabis indica
aaagtgtaaaaatagaaaggctaaaaactactatatttgtttataaatttacttttatctttatgtaaaaaaaattacatccctccacattaaatcttggattccgctgcgatagatatgtaccaaatttcaatcctgccaaacatagtgtaaaggaagagaaagaaaatgatttctttttttaaatagaaaaatactagtggtatgttcttcggtctcagtctcttctcagacataattattcttacaaatattaaatacattttttccttataaaaaataaaagaattaatttttaagtcaaaaaaacaaagtgaattacaataagaaaaaccagacccactaccccacaaagattctcattttagggaagcacaggagtggactccaccagtttctacgaaatccttgcgaaacaagttttcgatttttgattttcaactccccaatttctattttttggctactctaaactaaaacgtcgtcgtttcaaagctagtccattcctattggtccaacaagaaaaaaaatactctacattgaccactttttcaaagctagtctaccgaatttacgtggaaacgaccatatgtgaatattgcccaaggagggagactggagtgaaggccattctgttttcctccatttctcactttcttaggagccaaacaaagaaaatcaactagagactgttactcgtttagttaccggtcaaggagaacgacgagagtgggcttaggttttcgacaatggcgtcgccgtcgtctccgagttcttcaacttgcagctcttcatactcttcgtcgtcctcgattccccaccatttctcgtctctccctgtaatggcttaccgagagaaaatcatcgagaaagttactgagaatcgtgttactttgattgtcggagacactggctgtggtactgataaacatgctttatttttgcttgtttgctatatttttttcctccgtttttgcgtttgtgggagtcactatggtgaactgtgcctttgactgctgtttggtttctgtaaaaaacggaagagaaaaaatggagtttctaacagtataggaactatgaaagaaaaatgcgtatacgaagcggttgctttttctgatgatttagtagtttcacttttaactatttcggtgtgagattatgggtttccggtttgcggtttgctgatatgttgctaatacattctccttgatcgttttagttgagttttgttttccaatggcttggaatttggattcgtgattattgttaacgttttggttgttctatgtcagagtattactgattatgggtttgtttcatgaaagcggaaataatggattattatatcacccctgaagaaagtattgcatgttagtctatctaagaatcctgtattttgagtgtaatgttgttggacatttttttcctatttagggaagagctctcaagttccacagtttctagtggatgcgaatatgaagcctgttttgtgcacacagcctcggagatttgctgttgttgctgttgctcaaacggttgcaaagtcacgtaattgtgaagttggaggagaggttggatatcacattggtcactcaaagaacttatcaccaaggtaccagtaattgatgttctaaaatatatgttagctaacattgttgcaggaaggttttgcttttttactttgtagagaattgggatactagttagtttagagattgctttttcgctatgtttctgtagcttccattcatgtggcattcaatctgataatgtctaacaaaataaatataatatttatgttgtctaattatgatctctcttttgtttttaattaatttttgacagctcggatattattttcaaaactgctggagtattgttggaggaaatccgagacaagggggtgattgcacttaactacaaggttattattctcgatgaagtgcatgaaagatctgttgagtctgatcttgttcttgtctgtgtgaagcagtttctgatgaagaacaaagacttgaggttgagataaatttctaacccttttagattttgagatatcaagtcatttttggtatatttacttttactgtatgtgacctaattgtcacattagaatttatgggacaatggttgctttgtatctaaaatattacaaaatttgcagggtagtgctgatgtcagcaactgctgatatcgcaagatatagagattacttcagggatcttggtaggggtgaacgggtagaagtgctagctatccctaactctcaccacaaaaccttttatgatcgaagggtcttttatcttgaacaggtttgtatcactctgactgttctaattttcctgcttgtgagaagcgggaaatataaggttactatggtgaaaagtataaaaagttagtgttgatcatcttttaacaacttaaaatttaagaaacactggcttctaacataccatcccagtagatgatctagagtgcaaactctgaataggaaattgaaattagtttttacaagcaggagctttaaagggtaaagtgagtataactgatataaatattagaaaaggaaccaggaattttatgatagaattggtaatatgagagtatcatttaattaaaagctcatcttttattaatacaaaatatgggtagttaaagtgttctgtaattttaattgtaattgcaactcttatattctatgtcacaggtagctaaattactaggacaaacttcagagtcatcctctttgagttggagatattgttctggtcaacttccttccatatcaaaagctgatatcaaacctgaagtgcatagacttattcatgatctggtgctgcacattcatgagaatgaaccagacattgaaaagagcattttggttttccttccaacatactattctctggagcagcaatggtttcttctgaagcaacttagctcatcttttaaagtacacattctacacagtagtgttgacactaaacaagctctcatggctatgaagatttggaaatcgcatcgtaaggtgtgcacttagataccttgctttgtcaaataaattttttatgcaattttattctaaagcttctcatatggaatataacattttagaagtgttgtttagttggtttgaaacttaagttgcatgtaatagtcttttcccttttaacatgctgatgttttatcaaatagtcccttttcttttcattgtggctgctatgaaaataataggtaatactggccacgaatattgctgaatcatctgtgacaatacctaaggtggcctttgtcattgattcatgccgatctttacaagtattttgggataataccaggaaaaatgaatctgcagagctaacctgggtttccaagtctcaggtattgcagaaaatatactggtttgataaatttaaatctatttattttttcttaaattcaaattattttgtaggctgaccagcgtagaggtagaactggaagaacttgtgatggccaggtttatcggttggtaactggatcatttttcagccagtttgaggactatgagcctccctctatactgaggctgtctttgaggcagcaagtgcttcaaatttgctgtgctacctctaaagcaatcaatgacccgaagggtatatgcactaaatctggatcattttatttttcactatgtcatgcatactgggaagtgcttgaattgaacattcacatggataaaactgcactaattcgctaaatatgtgtttgctcaaagtgtttcaatttctaattgtcaaactttgattccagttt

SEQ ID NO: 243711 - DNA, 6478 bp, Cannabis indica
aataatagaaatatatttttttaataaaagaataataatagaaatatattttttaaaatatatgcaataagtttaaatttaaattgtaatattaaaaaaaattatgtataaagacatatttaatataagataataaataagagatatatgtatagtgagtttaaatttaaattataatcactacaaaaaattttacttttcttcacaacaaaatttgtaactaaaagtaaaagaattatgactaattataataaaaattatttttatgttgtgactaaaaaatctgtggctaaaagtattagttataaaaattacaatttgttgtgactaaatgtgtgtttagtcacaatacttgttgtgactaaaactaaattaatgacaacttgtaactaaatgctttgttttagtcacaaataatattttgctgtgactaaaagttacatttagtgacaaaaaatttatgttgtaactaaaaacttattactaaaagtagttgctttttgtatttttaaaaaaaaaagaacaataattttattataaaactacatttaatatagcgtaatttgcagcataaatacttaagtttaacttccagttgtaaataaatacctaagtttaacttttgacggtaataatacctaagttataattctaaaatttttgtaggtacctaactgttaagtattaagtaaattgtcataaagttttatttttaaaaaaaaattaatttaaatataccaataagaaaatgatatgcggataatgacttaatatttaacggttaaataactacaacttggaattaaacttaaatttttatgccacaaattactctttaatatatatacgagttttatgttgttgtcattagttatgttaagttttatatatgatgttctagtcttttgtctctcgaaggcttatacaagcttttctcctatgatcatttatggtcgtagacctttgagtggattgaaattgtaattgaaatatttcttaaagaggacttactactttttgtatttctttggcaatggcaaccctcgttctcatctttgttaggtgatggtcatattagttttggattgatataccattatgtttagtttggttaatcattactcagttatatattgcctgtgatttcgaacaagacatgtgtcacattctcaaagggtgaatcgtaaaacagttagatagtatgctagttgaatcaagtctaactaacaacctgcctgtaaaaggtaggattagtttcagagaaagaaaatccatttgaaagaataaggtttctaccggaagcagatccacccctccagaagtcgattaaactcataaaaaggatgatatcttcgtctaaggaataaatctttcatgtgcaaggtatccccggccactaattcatccccaaagtaaagggttccataatttcactcctggagtggaacacatcccgacatctctagatatgttgtgtgtggggcgtatgcaatatccttaaccagggccgtcttaaatattttaaaaaccctgttctaatttttaaaattaggcccttataaaaaaatataatttataaaaaatatttttagatattatcatacggttatatattttacaaaactccaattattttattaaacttgttgttgattccaatacaacaaaaaattaatagaaaaaaggaatatgaaatgtttgaaaagagatgccgagaagagttgttggctttgatggttccccttctcaaatccaccacctgcaacaacaaaaaaatctcagattgtggtgagagaaagtgtgagataaagaaaagagagagcgagatagggagggacagagtgcaagagagagagagagagagagagacctcgttgttagttttggagattttgtcattgagggtcttgagctgtcatcgagagacctcgcgtgagagagagaaagaaggatgtaggtgagaaagagggaattttagggtcagctatcacttgtgttgtaaaccgatcgatgctaaatctacaaaatgttggtttataatcaacgcaaaaagcgtcagtgagccgatctagacctaactaatttggtttctgagagcactgacaaagctaaactcgtcaattaaggagagcattgaatcattcaaaaggactaatctttttcttagttccatttggaatttatgactcagagaagtgtgtgagctcgaactggaagagggtggtgaagttttcctcatgcttagctagtttgtcttggtcccaatctgacaaaaaaaatttaaattggtattttttcttagacgttgaccgatgctaaaagtctttttttatagtagtgattggccggtgatagattacacgatttgttggaatttggtccattaagcctttagttagggatttttttgcatgggaaatataaggattttattaaccatcgaacacagtaacaaatcagttggaacatgctccaaactaaaacaacaaccaggatacaataaagaagctctagcaaagttatgagccactttattagtagattacaagcataacaaaaacatttttcaaaataccaagtaaagtcttacaaccattaatcacttgaccaaataaagaaatcataatagtagagctcctaagagcttgcacaacagtcaaactatctgtttcaagaataacttgattctactaatgtcgctttttctaactcaaaacctcccgattgcccatgccttctggaagttctggcaaaaccattccctaatgcaaactaatacaactttcagttaacaaacccttgcatcacgagtcacgtagccaaaaccatacaaaccactctcctcaaacaaagcagcatcaatattgaccttaatactatctccatgtggtaaagtccattgctctacccatcgtccacctgtaaaataggccatgatgactcaatagttaagttatgagcaagtcttcattgattaaggtatccttcagctgatgccactatgctactcacccccatcaccttttgattctaaaaaaattcattacgagaattctaagtagcccaacaatagcaactaacaaggatttatgatcagcatcaattctttgaaaacaatccacacaccaatctaaaaaagtactaacaaattgtgaagtagtcctaatcccgaccctattccaacacaatacaacaactggacaaacaactaaagcatgcaggatggactcatcctcctcgttacaaacaagacaaggagaactaatctctatacatctggttcccagttgagtcacagttggcagacactccctcttcgcccgccacaccaaattctttatttttagaggaatttttaaactccaaaatttcttccaaaattatgtgaccgctgacccctctaaattctaattcccatgaagttctttgagaagatgataggcattttttactgtgtacagaccagaaagtttctttttccaaactaggtgatcagacccttggccaacatgaagaggaattctagtaataaggtctttatagcgctccacaatgagatcttaaagtatctcatagtcctaactatccctaacagtatttaattattactaaccttaacattggcaagacccaaaagagaagaaataaccaggggattatcattgtcagacagccaatgttcaccaaggacagtaatattagtgtcgtttcccacaaaccatcgcacacctttagatatgacatgctttgctttttaagcacttttcaacacaaaatttggattggagctcaattgtgctgaaaggaatgtaccattcaagtagtatccagctttaaaaatttgagccaccaaagattcaagtctaggaagcagccaccaacctagtttacccaaaagagcaagattaaaatcatacaagttgcaaaagcccataccaccttgagttttgtggttacaaagatgatcccaagagatccaatgaattcctttgcttaaattcttggaagattgcaaccaaaattttgtcattgaactctcaatgtctctagtaacctctagaggaagaatgaatacactcatagtataactaggaagggatggtgccacaactttgattaaaatctccttaccgacctaaaagagtagcttagattcccacccttgaagatgttaacttttcctttgaaaaacccaaaatgacagacttatttttgctcatggtactaggcaaactcaaataaaaactcccatctgtagcagtcagcatacaaaatagctgacaaatactatcccttataccactatctgaattggtgctattgaatatcgaagactttgaaagattcactttttaacttgatgtagcttcaattttttgaagaatttcttgcacctttcacgcctctgtctccgtagctttacaatacaagtagttatcgtgtgcaaaaattatatgaataactctaggcgcaccattagctagctaccttactcctatggatataaccttgttgttcatacttcctaatcaaagccaagaggccctcaacacacaagataaacatataggagaatgcaaatctccctgacagatgcctcgagtagggatcactggacccatttcatgactccgattaatcactttataacaagttgtctgaagatatttttggagcaactggacccatctttcattgaaacccaaccttctaggcatagcttccaaaaaattacattctacacagtcataagctttgctcatatctaattttagtgccatgtaaaaaaggaaaaaaaatgatgattttaacatatcggcccaatccatattttgaaaagtctgcaataatatgagtagtgttatgctgacttataaaagatatggatattgtcgtgttgtaccaatattttaaaagataagcccagcatggcacgcaagtctatactttcgtgtcgtactttactcgagctgacctattttttataaatgagtcagtctgttttcttatacaaatcgaactcgggcttcatattatttttcaataatactttacacataatcatataaaaaattaattagaatgatttatattttaatatttattattattattattattattattattattattaaattataaaaaaaacataacgtattgtaatttcaaattagtctattcatatttacgtatcgtgcatttgaacttgtcgtgttgtgcttaaacttacatttttgtatctttttattttgtgtcgtatcaaaaaacccaactcatacttaaagctctatacaaaataaaagtgtaagtatatgaaaatattgaaattttactatgacaatgtaattttttgtaattaattataatattggccgacagaccataattttccatgtttaaatcatgtcaattaagacaaatttgagaatgtacacaagaagtggaaggtgtaaccaacaaggtagtctttcaaattttttaactgtggtccccaaaagagtttaattagataaacccattttcattaatttttaatttgatcaattccttgtgttaacagttaaataatttaagcaccttaattaataactaatttaaaggatgaacaataatataatattaacattaaattaaaaaggaattaatgtaggaatatgtgtaaagagaaagaaagtcactaaacaatgtataattaatacattaaaatcacctaattattttgttttattgttttattttattattattttcgatcagtaccgttactgtaaactatatactatattattaataattaatgatatgatgagtgataaaaaaagattcaatatggatattattaatcccactaaaatagcatttactcaacgaaattaaaacaattatcaaaggcagtggtataatttaaatttaaccaaattattaattaattgcgctttattaatttatgagtactcttattttataggggtaatttcataaatataggaaaaataaagctagtttaaataaatatggtaaggaaatttaataaaaaaaaacatagtatttaaaataaaaacttaacatatatgagattgaattaccataatagatattaaactctcttcatagttttgtttttaaaaaaataaaacaaatgaaactacagtgatcgccgaagttgttaccggtacctaaaaagatcccggagtttgctgtcggtgccaaaaatgttgtcggagttgctgccagtgccaggaaagtcgttggagttactgtcggcgctgtaaaagtcatcggaattggcattatcgtcaaaaaaatcaccgaatttttttttcagcgtcgatagcaactccgacgacttttccgataccgacagctactccggtgattctttcgacaccgacagcaaactccgacgacttttccggcatcaatgacaaaaaaaaactcctaaaaaaataaaaacattaaatatgagatttgaaaa

SEQ ID NO: 243712 - DNA, 2712 bp, Cannabis indica
cctgctttagagagtaaaagtattctttcttggtctgcctcgtgaatttttcgataagctggaagaaggcgaacttggtcatcctctagaagctcatgattatgaacattactaaattgcacaacaaaccattgtgaatccccatcaacaatctcctttgacaagtacatcttagcatcacatccacaccgcatcgatttcctatccctatgatgttctccagtaggttttttcttaacaggagcaaatccagaacgataacaaacaaaatcacgtttataaatacccaattgagggcttagtcttgatctttctttcctaattgagaacccattttttctagcaaaatttccgtagtactcgaaagcatcatcatcactcttaaaaaccattccaacataaggggaaatcatagcctctgaaggtgaagtatcattctttaccaattgggatgctatggatgtttcttcggcatccccttcatatgttacataacacttccaatctccacatgggcattgttgcctctgaatccatatattcttcgaaggtcttgaagtcataacacttagtattaagtatcaagtttatacaccaagtatttgaagttacccaggaaagctagttgactgtataaatgcttaaattgaaggggaaaaaaaaaggaaaggaaaattaatgagaaacacgaaatggttctttcacgctgacacttaacacaatattttgcactacatgcaaagaaatgtcatagtatacaaatacaagtaatgcatccctattaggcaggtttaaacattaaaaaaatagagtaattggggttgaaattgagaaagagattgggttaagagacaaaaaatcacaataccagtggcagaaagaaagatgagcctaagccccttttgtatcttcaggaactcatccaatcgtttttccttaactccacactacagaacagtagagatttcatgaatgcaagacacttgaacgaccacacataccacacagctgacggctgagccttctatagaggctttgactcaagccccaacatttctatctgacttgtactgaagaatgtacaatacagatgactcatttgataatcgatctgtgcatgagatcatctacaccataaatgatatcaggatttgttgggacccaactttcagtatgtatgtactttaaatctacaaagtgcaaattaaaataaaattgaatcaaacatcaaatgaaaaaagacaatcaaatatcaactcaattaccccgaaataaagaattgaagtttttcatgaacataaattccaaagaactaaagtatttccgcttacctcaaaagcaaaaagcaaaatctggtcaagaattccttcccaactctatgatcgacgacaaaagcactaaatatctccccaaagtacagtaaaatagtttaatccttatcaaagttccaagaattaaaattcaaagaaggcgcgcaagaacgaagactgtaaaactaagcttaaagagtgaaaccctacaaatcttcggatggttaagatgagcaatttagttgaagagagtttatgacaatggttgttatgaaagagagctcaatcaatttaagtttacacagaaaacaaatatcactcacttattttctttccatattccaaactagttcaaattaatttacaaacggcatcgaattttaaaaaccatagttcaaaatgctaagaagaatatcatccctacctttttttcttaaatttaaaatttgaaattccttcctcactcttttcctaacttagacaatccaagggagcatttactagctcttagacaatccaagggagcatttacaagctataaaagccttaatactaaggtcggcaaaacgggtcagaaacgataacacgacttgaaacctgcacgagagttagcgggtttggatttgccttaaatagattagggtcgtgttcgagttaactcatctaaccttttaataaatgggtcgtgttcgagttaacacgactaacacgaaattgacctgttaatgacctatttaaaattattttagtactttaacatgtcattaatgagttataaacgtattattggttgatatgtttaaacaaaatatacttataaatgggttacacgagtcatgtcgtgtcaacccgtttataaacggatcttgtttgggttttatattttgatacaattattaaactgatcatatctgagtcgagcatatacttgttatacataaatttcgacacgacacgacacgacacgaacaagaccacgaacaagaattaccaccctacttaatacctatccttacttaatttggtaaataagtaatgacacctagtcttccaaaaagttaaacataaattttctcatgagaagctttagtggattcaaacctaccactacactatacaacaaagtggttatactaaaaatgcaattgtataatagaaagaaaattgagtaagaaaaaaaaattaaataaaattcaaaacacctaattttctattatgtattgaacatgttagtatcttgtattgaatgcttatgacttgttttttgaacatgcataatgatattgaagtcaattctaattattgttgtcatgcatacatgtgttgtttactgaagtgacaggtacaaaaggagatgaatgcgcatagtctcaattttgttgtacctcatgcatgtttggtt

SEQ ID NO: 243713 - DNA, 1426 bp, Cannabis indica
aagttaaataaaattttacccttactctcagaaaaaaaaataatcatagtgttaatttactctctattagaacttttggaaatttcataataaacaaaacaatagtaacaataacaataacaataacaattagaacaaaagtgtactccaaagttacccacacacaatttccaagcaacccacttcatcaaaaaataaaaaaacaattccaagcaacccatacccctctttctttttgatttcccataatacccctcaaattcaaattgcaaaacattatagtattactctcacacgacctcgtcccaacttgcaaaaatggctaactcatcaaccaaacaagacccacaaccagaagtaccagaatcccaaaactacgtcgtattgccactctatttcccttgccgtcgaagacccatccgcacaatctgcaccgtcggtctcgccttatttttcgcaaccgcgtacgtattctggccgtccgatccagacatcaagctcgtacggatgaggcttaagagcgtgcacgtgcacagaaccccgcacgtgtcagtcgacgtgtccgtgtccgtgacggttagagttagaaacgcggacgtttatttcttggactataggcagttggaggtggcggtgggttacagggggaagaagctggggcacgtgagatcagagggggggtcacgtgagggcgaggggatcgtcctacgtggatgctgagctggatttagctggggtggagatattttccgatgtggtatttttgttggaggacttggctaggggtaccgttccttttgatactcttacggaggttcgtggccagttaggccttttattctttcaattccctctacaggtattaatattattattattattattgggaaatttgcacctcctcaaaatggatatattaatgcacccttatctgttttagcactcaaaataattttttagtcaaattttttctcatggtcatgtacgttatggttatttaagacatcctgtaaaattttaaaaaatttgaaaaagtttaacacgctgaaaactacgttcaaatattgcacgcgtgactattttattttatacgcgtgtaaaatagactgtttgaacattattttctatattataaattattcgaaatttctcaaaattttgtaggttatcttaaataactataacgtacatgaatatgaaaaaaaattagagtgagatttttttctggatgcgaaacaagtgaagggtgtatcaatacatcccttttaagaaggtacattgtaaaattacctattattatttattgatattttattattttattttatttttttgctgaaattttattagttaatgttatttaaagaatatatatatactagttgattgttacgtgccaagccacgtagtgttagttttatttaat

SEQ ID NO: 243714 - DNA, 1420 bp, Cannabis indica
ttttagtattataaattatttgaaattttttaataatttataaattgttctaagtaattacaacatgtcaacatacaatcataattagaaaaaagaaacttttgtgaatgtttaaccaaaatatgcaagtgaattctatagacttgtataaattgtgaatgtaaagactttgagtactccttcctactaaataggttcttgagtcttgatattcttgaaccaaattatatgtgagagatcgatgttataaattatttacgtgtacgatttaatgaaataggaaagaggttctactacaagtgtattataaataataatagttatatttttggtgtgtgtagagtagagtagataggtgatggcctaacattttattattgaatatatatatatagtaaagtgaaaatggtacttaatcaatggtgggagttgggtataggaagcataagtatgaaattaagagcctagaacatggacaagtgtatataattaaaacatggaatttctcaacaatttcacttttttatatatatattttatattaagataagaaatgggttataggtagttttagaacacgagggcgtgagaaccaactctcacctagtggcttcatcttgagaacagtgtgtttctgttttaccaatattagtcggttcaaccctttcacttattattattattattaattaataattgcccttatttaattaatatactaccagaaaaaggtattataatcccatatttatataatctaaccgacaaaacttaaaaaaaaactctttagttaccagcatagaaatttttgtgactattatcacttttagtggccacaaaaaagtacttgtaactacaaaattatatttaattactataatatagttttagtgaacttattatatacttttagtgatacagtacacaactgttcacatcaacttattattttagttgttggtcataccatatatttcttttttaatcatataaaatatatcattttacaaaaaaaaaaaaaaacatataaaatatatatatatatacatattcattattctacgttatttcaacttattagaaaaaattacacactacttaatttcatgagagaaacactatattttaaccaaattataaatacaaaaatgaaaatctttaaatttcaatatatatgtggtgtaaaaacttcaaatatatatggaaaattttcataaatcgattacaaacaagtaacacgcaataattcaaatcgattacaattaaaaaaacaaagaggaaatcagttcctaaaacactaaaatataaattaaaaacaaaattagttccacaacaaaattccttataacacataatacctcataaaaccgattacaatttttttttaaaagaaaatagggatcaatttcaaaaaatattg

SEQ ID NO: 243715 - DNA, 4787 bp, Cannabis indica
ttttctttccacccttgaagcttgtaacttaggttatcctgaacaaaattaaaattagcatctttctacttagaccggaaaagagggagccccaaatatttaatgttaccttctggcccactaattcccaaagcttctctaatctcctttttcacattgttcggagtgttattactgaagaaaatagatattttaagtttattgacatgttgacccaaccaagcacaaaacttttcaagacaatgccagaagcttctagcttctcccagagagactctacgaactaaaatcaaatcatttgcaaagaaaatatgggagagagtaggaccactccgggacagacagattcttttaatactaccacttcccatagcttcttctagtagtcttgacaaaacttcgaccgcccatataaaaaggtaagaagaaagaggatccccttgccaaagaccacaagacggaatgatcctcccgacgtgacctccattaaggcatatattcaaggatgtggtagcgatacattagtaatctaatttttgaacaaaattggcgcactaaagcaacaaagcacatggtcaataaatttcaaacttattttatcataagctttcaccagatcaatcataatagaaaaaaagccttcctttccttttttccttttaaacgaatgaagaatttcttgaacaatgacattattgtcttggatattccttctcgacataaaagcagactgggttggacatataagtctcgatagaataggtttgatcctgttggcaataatcttggatatcaccttgtatgacacattacaaagagaaattggtctaaaatgatgagcactcctaggattttatattttaggaatgagcactaagttagtagcattcacgcccttatgcatgattcctgaggtaaagaaatctgagattacctcacaaaagtctaccccaaccgcatcccagtagtgcttaaagaaatgaaccgacatcccattcagccaggagcgttattggtgcccatgacaaatcgagttctacagattttgtcatgattaggggccttgactagatcctcttgctcaagtgaggaaagtctctcttgaataagattagagcaattagggtccaacccaaatctagtgtctgtgaaaatttccctcaagaactcattgaattctttagcaatagtgcttcgcctagtaagccaaatgtcattcttatccaagatactctcaatggcattgcgcctaccattaatagtggcaaaaagaaagaagaactttgagcacttatccccctccttaagccaagagatctgggctcgcagtttctagtaaacttctctcctttataaggcctcattgagggctctacggacttcacactccacttttcagcctcttgaaccatcaggcagcctatgcaaatgattaagcttacattccaactcttttatagtagcatcaactttttgaaaccgagatttatgacatcgtaataaggccacccgagtggcactaatctttttgaacatccaaattagggcccaatggtgcaccactgaattctttgggcaaccactaacttacttctttcatctcatgtcagcccttcatcaaatttaaagctccttctaaatttttcttcctctcccccagataataggcacagggtcctatgattagaattataggtcttgcaaaagcacaacatagatttcgggaataacttaatccaaccaccattcactaaccccttctctaaagtagatttaacatgtccctctaccaaacagtggttatctcaaggtaattggtacccttgaataggaaaacttatgagacccaacgagttcactaaatttgagataactaagataaattgatcttttcctcttgaacctttcctttcggactccttcagcccaaagttagtatcacccacaatcaaccaagactctccaaacttatcaccttacctcataatctcaaaccaaaaggacttttttgtatggaaatatggggggccatacacacaagagagaatccagggatgcaaaggatgatcctagtacaccaacccataaatatggttatgagagctataaatatactaaaaattaaacctgaatttccaagccagaataataccccttgaaacattgatagcaggcatagtaaatatgaaaaaagacatgaagtttatttaaaagaagtaccagtggcataacatccacttttatctcaaacatgaaaatgaaatcaggatcgtaagactgagccagggacttttgtttaggaactatagagatctggcccaaccctctatagttccaagctaccgttctcatggctcttgtggaggaggtacttcatcctcctccacaagtgtacccgtctaatccaacacgcaagaaccggtatcttcaaccaaaatcgaaccaacatcattcttcatgacaaagtgactacccaatggcaacccgagaccagtacataaatcattactcttgttagctggttgactggccacctcttccccttggttcagcccaacaacatcccaaggaaagtctcgcacaataccaaggtgttgttgaagaattttcaacggtctagagcacatggaggaggagccttcaataagctttcttttcttgattgaggttgttctttcattttgctctgaggccggctgggtccctttatcctttcctatctttcaaattttgtaaaaatccaactcaccaatttttttagttcttgaataaatgtctcgtgagattgaaaaaagttcgccaaggcggggccctcatctgcttgataactgacctcatttcccataatagatatgtctttagacctaatggcatggcccaaaaggaagagaacaaaaccatcattactaccgaaagcacatagcccattaaaagcttttccatcaacaatcttcggcccattagcaatttttaaataacccacatgttcaggcccaccattttttgaattaactccaaccttgggccccacatgcatctcacaacaaagtacattaatttttaaatgttaaccacacaaaggctccaaaacaagtatgacgttagagcactttccatgtttagcatccttagtgttcaaattattaacagaaatggcaatttcctcaccaggcgtggctgctgcacttttgggaacccaaattgccttactactaatttttttcactgcttgaggtcctcttgtcaccatcttcttcctccttaaacaataaggcaccatgctagccttctcattagcaatagctccatcgtgacatatctccatttctaccagagcctaggctggagaagaagatagtcgcctaagctgaggcaaaccacgttcagtagaattcaccttacgagataagtaatcaacattcttggacatagtcatcatccaaggcccatagataggaaagggatccccactaatgttcaagacagtgtcaggagaagaaagactacaccccctctgttgatgtcccaaacagccacaataaaagcagaaaatgtcaagtttctcatacttgtattggaccatctcttagtaccattcgacaggttgataaaacacacttaaaattgaggcttctccacatcatgatctatcagcattcttagccattaagatcaactagcaaatttctcttcatcaaaatccaccttcacaagtgaacttgctagagcgcccaattcattaccattagcaacaagaaatattcatcggcaactgatggatttgaacccaaaaactaatcactcgataagccatggtacctataaaactctattcccattcatggaggatcatattataatatttcagacaccacgagcaattgtccaacacccatcgcctatcctcctctttctcaaaaccaaacttatacagtgttggttttgtggtgtcatcaaggaaaatagttacagaggaaggtcttttctagatagagcacattaactccttgaccgtagcttcctccacaagtctgggagccacaattttccctagaaggcaaagggtagttatgtttggatagtagacgcacaaggggccaaagttaaaatagcatcaagaaatgagatacatctccccattttggcagctttaacaacctccatacctaaaaatagacacaaaccaacaccaactaactgccacgacttgaccaggaaaaaaaaacataggaaaggagccagacaccaaaaggaccaaaacacttgggaccagcaatactaaagaagatgatacaccataacaaggggagacacttacaaaaaggaagaaaaataacaaacgccaaaaaaccaacaaaggaacacgaaggacaacatcacaaaaacaaaatagaaagaggtatagtgaacgaaaaagacaaagagaagacagattggtagaagaccatcctattgataattttctataaaaatgatttactttctttataacttcaaactaaaccttctaataaagaaaataaaatttatataggctacgtgtatatattggcgtctcataaattttctggatctatgtatacaaatatattattatatcacatattatagaattgagtaggggtggataggatccaattgttaatagcaagacaaagtcatcttataaggcatggcaactatcaatggttcagaagcaatcaagcaaaaccttcaagcaataagcgaaaggagttaagcaggttgtaaagacactagccaacaatatctagccaaccaaagggtgc

SEQ ID NO: 243716 - DNA, 1986 bp, Cannabis indica
attaatacttaattgtatgttaccaatgaggatgagatgagaatggccatatactaatgcattggttattcataagctggagtcgatcaaattacataaatttaacgtaattaaatatacctttacaaccaataaaaactaccctttgtagagtcgattgttatgtgtatttttcctttatttttaggagaagaagaagataagcaataatgggagataaagaaaacgaatttcataacttggggaattgagctttttgcattcttgtggtctgggccagtggcctttgccacgtcttcatcagtgttattaccaattctgtcatagcctgttttttttatcaaagcattaataattaataataataaataaaaaagaaaaataagttgcaggcttgacgacaagatagaatgaatcaaaaagtgtaagaaactccaagtcaaaaacacaaatcgaggaatttacatataagagagaatgtttaataacaagtatatcatctatcattatcataaacaatacaaacaccaatttagagatgggaatttcgggaaaagaagaaaaaaataaataaatgaaagatacaagaatagaataacttgaaaatattagaaaagtttagtcaataagtgcatcaatgcccttttgaatttttgtttgattaaaaggtaagagaaatcttaaaagcaattaaagataaggttaggtttattgtgagtttggtagaaagcagccagccatggacccttgattttgtgcccaaggtaaagtgatccttttttcttctactagctagcacggtcaccaaaaagttacttcttttcattttcacacatatgtatgagacctccaacctccaactttttcaaaatcatgattgttatagttttttctaacaatttaccactacaaatgctacagggaatccaaacttattaagtctccaatattttaaattttgagcattgtcatactattaactacttgtggtgtattattataataaattatatgactcgatacttaattatactaatagcgatattataccttgtaaaatactataaagatcatgagtattttttagtatatttttttatgaatttaataattattataaaaaattatcaatctttattaaagtctcatgcatatatatttgatctacttaataaagtaagaacaatcttttcctaacaagttaattttattgtattttaggtataataactttcacatcggttcaattttgtaatattgggtgcccttaatattgatttattcacaattatttagcatgtgcgggtgagcatcccacattatatagctagtaatatatacttattaattacagaataaaaagaatataatcatctcttaataataagtctttttgttaacactataaaatataatttttttgggattaagatgttatttttattcatacatataattttagttacatttagttacagacttttcagtcataacataaattattatttataattagtcacaattttttaattttaatttcaaactttgttgaattaaaagtgaaactttttgtagtaaaatttgtataactttcttaataacctctcataaaaacaaaaatatttgatagtattattggacactagttagtgaaaatattcatttactatgacccacaaatttcatcaccatataattatgtatagtgtgcggttgttaatgggggaccatatcactccggccggttctttagatagttgagattccaaaacattcaatatattattattacaaatttctttcaattattgagttggacataaaattaaatttaaatttcttaacaaaattttagtaatagagacaaaatccaaaactcattattgattatacactctttattagtggagctcaatttaaattgagaagatgagaataatgaatgagtaccggcaattatttattttgaaaccgtacggcaaagtt

SEQ ID NO: 243717 - DNA, 1605 bp, Cannabis indica
aaactaactgacacctaactaatattaacaccgtttgacgtcttgggacaccaaagaacctcacattctattccatctaaggtctcataaaacttagtgaaaggagaaccaatagaccgattaggaactagttttgcagaaatggcgcgagtgagaacttgacaatctgagaggagaaagcattgccctacacaaaaatttttaatgactttcactccgtgaatcaagacttgaagtttcccagaaagagggtttgtgacaaatatcttactagcatacaatgctataatttaattacatgcatccttcacacaactcccacatcagccaacgactcctaaacaacatcattgacaaagaaacagtacccctctaggccaaaaggcagctctagcacagaagaaagaattgcaccgcgcattatcacctttgtctcacactttccattcctagagaaatttttctttagcttagccaaattgtcctactcaagttgaatctactataattaaattaagtataattttgaattaactatttttctatgccatcttaatatatattacttaattaggtaaacgtaattagtacacatatgcataatataatatgggcatccaaattaaaccaatggcctgaaaatcaatgtttaacttattgatcatactcatggaacccgtccttgagtaactttcaatataacttgtgcttgtactctctcgattagtactgtgatgagttctgtcccctccttgcatttattgactacaggttattgtgcgtcccgagctagaactcgtcttgtcacgtaccagccttgtcctttgggtacgtgttgttgcatgccccctgctagggttcgtatgtgcccctcctgttggttgaaggacgttgaatgtctcggtggcaacccacctgtgctaggttgagtcccaagatttccttcattatcacgagggatttcctgttccctagtcccgggtcgccttctattctcgtttctgcgagacggccctagttggtcatttggttgtcattttcagggggatcctcagtttcccaaggttgttcttcctggcgttcttatggtcctcctaagccgtctcctgcctcatagtttgtgagctgcgaggtcggcctcgtggtttcctcattctaggatcaggttggttttgtgtgtggttttcctgtgtcgcccttgctgcggctccctcccgttccagcacaccgtctcgccggtttgcctactccaaacattgccttagttaacgattttcaaactcaacaatcggtacatatctcgtggaatcataggcaccatcatccatgggttgagcaccatcaacacttatgttgggtactttattccctgtttctgggttttggccaccttcacgtagggtccatcttgaacgtgtggactttgtagatcgtgttgtccatgaattgagaggcctccatgagcccattagctcttttccaggacggtgagtagtctcttcaagatgagtatcatcatttttcccattatcaaccatggagaaagatttttcttttggttaggagggttttttctgagcttttttcatgtaggctctcaatgaa

SEQ ID NO: 243718 - DNA, 1115 bp, Cannabis indica
tattattattattattagtggtgacttgaagacattatatagtaacacttaaggaaagaattcctaacccatcagttacgcaatcccccaatatgacatagcctggacgtgcaataggacgccatattgagactggccggcggacatcgctacccttgtcccaccagattctttcaaagttgggagttgacatgtagcaagtagttgcttttgagatggatctgacaatatcccatccggatgaatttgcactctgattacttgtttcatgacctctactatcttggttagcagtaaaagctgatgcagactctttagaagaatggtgtctgtttgaattccaggtaagaaggtgattaagatcaaaactactatcaacaggacattccatagaagaatgagcagaaaatgatccaatcacattgtctaggcgccagatgctaaaaccagacaagaaatgggaatttgaagaggcactaaacatacactcagaatatttagttattgttacaagatcagagcgtatacaatatacaatgtgattaggtggtgcctcattccctatgtttactacacatcccaatgccgtgtatcctggtggtgcaacaggttcccaaacagagcaatcagagttgacatcggcttggccttcaccttcactaagccctagaatacctgagaacaagccaatgagattgaacccaataggttttcgcacacgcccatatgtgttactcaccgccattactgcttgtgatggagggattggcctggatacaaattataaaagtaaaccaaaaaatgaaaattcaaaatatcttataactaaagaagcatgtaaatcagtacacattcctcatatgatcaaggtaggaacataagtaatttcattattccatgctagctagataaatcattactctgttttgtttacatggtgaaagcaaaatcattaaatagacacaatgtattgtcacaattaaatataagttggtctacaacatgcacaatatgctatcatctcctgcaattttttttttctctttccgaaaatttaggggagtcttgtattgcaatctattgaatgaatgttatggtaccttgacgtcacacaa

SEQ ID NO: 243719 - DNA, 982 bp, Cannabis indica
tgttaaaccaagaaatgccgttagataggcacttttaatatataaagatatatatcggttttctattttaccatattttatacaattgtgtacttttggtatatgttttaagttttttagaaaatatatttaaaaactttatctttggggggaaaacagcaaaaattaataaaaatatatacattagttatttttgtaaaaattattaaagtgcttattgggccaatacaagagacggccttttgggctaacaacgtcgaagtctttgctttccaattgggcaattcaaagaccaaattttagatggaagaggaagttcaagaatcaatatacacattttgtcttgttttactaaatttgaggacaattctcaattgtggaacacaaaaatttcacatgagttttttttaggaaaaattaagactgatttttgtaagaaaaaaataaattaacataaattgtggatcaagggacgggcatggttgaatgttgtgcttgagacagactgtgtactcgcagttcaggttattcggaatgaatttttatgccttctttatttggtttagttgttgatgattgtcgaaagcttatttatgagttaagcaatgtcttcttattgtttatttagagcatcatgtttctttctagattgttgtttcagtaggaggaatattcttactgagtttatgtctattattaaagtgattgttcttctaaataaagttattttccattaaaaaaaaacataaattggaaggagaattttgttaataataataatactaataaaaacttgtctttaacgagtatgatctagagtttcataagagaaatttgatttttttatgcatgatttaagcgttaattggctagaaaaatttaaactataggtaattgttagaataggcccacttgacctaaatcccaaaactaccactctcaaaatcccacactcattatctctccttccttctattctctc

SEQ ID NO: 243720 - DNA, 3066 bp, Cannabis indica
tgaagttatacattatcgatcgatgatcaattacattttttatatatgtatattcatatttatacattttctaaataacattccattttaatgatataaattgatgaagttgctaacttgaaaaaccaataaatggttcaattagtggttcaatgattgcagagaagatattaaacaatgttgctctaatgccttggataagcttgtgcatcactatggttggaaggtatactatagacgctatatacataagcatttgacaacaaagtatagtatatatgtgtgtgtagatatttcttaaagtgattactgatgaggtatttgctaattatttaatttattatatatgtgacagattataggggtgaccattccggagatagagaatatgcgccttgcacactataccaccataggatctgagtgtagcacctctcttagttcctatcttgaaaagttgtatggaattctctctctccctctcttcaatttcttcttaattttttggttgtatgtatacatctataaatatactgtatactatgttttttatatttaaattgatttactaataatcttacaacatttctaattagggattatgcaaaaataggatgggatgcaagatttgcactcgctatatatggttccttcagtagcaaggagtacattaaggcccaaaaaatcaggcataatacatacttattaactattaccttttttaatacatatatatattacatgcatgaactagttgaatgtgaatatagattctttgttcattcgaaataattattaaggtttttatttgatttcgatggaccagctagcatgatttagatctatgaaaaatattgaaaccttaacaagataataataatatattatcgtatgtactttcctttaattttatagtatttttgctgttacaaacatagcagtagataaattaatgtgttaatagaaatatttctacgcatatggaaaacctttaaacctagaaattaatgatctaataatatgttccatgtgatatatgtgtttgtttgttactatatttattatacgatatatgatcaccttaattaaattcacctttcacaggaaccgtcagatccaaattcacgacaacatattttcccaggcagacgtcatagttactccaactacagggtatatatattaacttgaattattgtggacattgtcttacaaataaatggtagagaattaagtcataaataagaacatgggctactccacagttttgagccctatgattctcaacaaaaactgaaagaaaaatagacaaaactgagctacaactattaacttcttaccaaatttctaaataattataagagtcactaatttgagctatatatataatcacagagtaacagcttatccaattttcaatgatgctctaaagactggtgaactcgactatgtaaatggaggtagtcattttttatttgtaaattacataaaatacgataaacatgtgatcttatttgcttataattaaatttatgtgttctttctaataattaatcatatataaattcatgtcagctgccctggttcgatattcgatagcaggaaactttttggggtatccggcagtcactattccagtatgatatatcttatcacagccactatataatatatataattctactaatgatccatagatatagcaaactatatatgagtattcaaaactatattattgcaatttaagtcaaattataatttcttaattattattatttatctattaatttttttaatataatcgcaggttggatatgatgagtcaggcatgccgattggtcttcagtttattggtaggccatggtgtgaagcaacactaattcacatagcatttgcaatgcaggtaattatgaaataatctctttcatttgaacaaaatttatttaaatgattaaaattactatatacgcttagagcaaacataattttatcaagcctacttctcacatttcaaggggggaaaaatgtagaatatgattgaatataaactgacatatattgatgtctattttattttcaggccctttgcattcaaagctacagaaagcctgaggttttctatgatctactcaactaaaattaagtactcaagagcacggcatgtaacgaagcgttccaagttattaattaaaaccctaattatacaagtttgttacccatgataattgaaagaaaaattgatgaagaagaaatattggaaaggaggatgtggatgggggcatgggtatgataattagtttttattttcttcataataaacaaacaaaagtgtagcaattgtcatttgctaatacattttcaacactagcatcttttcatttttcactatttgtgaccatagattttctaaatgactttttatgatttcattaattttatcatagtgtttatataagagtgagaactcttacataccaactgatgtaaaacacatatatttatgaaaagccaagtaagaatgtgaaataagagtaattaacaccaaaattttattgtagttgatcaccaccctttcagcagtaatagggttcactttgatcttttattaatatttacttaagatcacaagaatgtgtgagttaagtgagtttcctaagtacttatagtaaaccgttacaaagaaaagacttaggatgcgtttcgttggcataaataaaaatataagaataaaaatagaaatagaagtgaaaatgtaaatgcaatataataaatttcaaatgcaataaaaatttaataaaataattcttttttttatattgcattggaatgatatttccttttatttcaaaataataatcattctaccaaaatggtagaaaaattgttccattagaaagatattataatatattaaaatgtgacgtaacaaagaataaaatttgattcctttccatttcattaccttcaatcaaagacaactttaaaataattagtttaaagtcaataaaattgagagcacttgttctctcaaaaaaaacaataaaaatattgaattgtaaaagcctc

SEQ ID NO: 243721 - DNA, 1817 bp, Cannabis indica
atttttatttcacaaataactcatattatatccacgcatttcatataaatcactgtaattaacaaattacgcttatatatccacttatcgagtcttcagggtcgccgaacctgaaaatatttttattccacgtatagctcatattacattcacacatgctaaatcttcgcaattaataaattacgtttatttactcacttatagtaaaatttaaattttattctgaaataaattagtaggatcataatcccacttattacctaattaaaccattatataaatataaaccttaattatttaccattaggcttatcgagatattacactttatatttttatgtaattttttttaaaaaaataatcatcatttttttaacatgttattttcattaaacacaagaacaaaattataaaatgacaaagttcataaacaagataaagaactattccaaattaacttgttatctaatctaaggctagcctagcacatttgtgagctattttattttgagaccaaggaacatatcaaattacaagtcctagactgaaagatgataagtttttaatacgacttaaaatattacctaaaacaaatctaacattattagaaccacacaacttgtctactactactttcctattagtttcaataacagcaataggcactctaatgtgctgaatccattaaagagcaagtagaatagcttttgctttagctaagttcggaaaaatattaccactcataggcttgatgatacttgccttaatgttattctcaccatcccgagccacaacactcaaactgtatttttttattttacaatcaattgtagtattagtattgatcctcatacttcattgtggtagacttttggatgcaaacctgagtagcttccatcaaaatcttcttgctatattcatcgtgttaagcattactataactttgcaaataggaattacaccaatcaaacaaagcataatgagaaactgaaggtttcttgagaaataagttgttctttttattccataaaggctagataaaacataagaaagttcattcttatcaaatgtatcaatatctttatttgtaaaatcagtaacattatattatttgttatagcaacatagtaatcattaaagttagagtattttcaaacttttttcactctaaagcatttcaaaagagcctgtgttgtaaattcagtgaaaatgtcacaaataggatatatgggagaagaaatgatgtgtctataatataaagaattagcaggcacaacattagaaagaactctccaaataaaatatttaactttaggaagaattgaagaagtccagagcatagtccaaaacagcttagtacttttaattgaggaagaagaggggatatctatagaggagagggcaagatataggtagttttgacacaaaaactccatgaattatccttaccacaaattaaactattgttataatttcccccaatgggaactgttatccgtatttctggcaagggacacgtagattctaaatattagcttaaggcccatcagtaggcccaaatgacataaactgggccaaacccaagatccattctaccttataggagaataataacacaactctcacagtggagttttcgtcaagcctagtcaatatctggaacgtccgtctccgtgtatttggaagagatcctcaacgtgtatccagaagcctgtcatagtttcccatttactatatcacacaagatcaagaattactttcctaaaatcttggacagagagtaatatcttactaatgtcattaattacctacgaagg

SEQ ID NO: 243722 - DNA, 1251 bp, Cannabis indica
ctaataactaataatgttttttctttaatttttattgtatcactttcaaataacatagaaaaaaattagcataaaatttagtatacgtgcctcgcacgtaatttttgctaatttatatatatatatatatctttaataataaactgtatataaataagttttattttcaattcctttttatatctacttttctccattacgtatattaattccaaagataggatccttctaggaagctggtgaaagtgctcttttatacgaaagataaagtttttcccattatttatttgctgcctcacacctcataatcatatccaatttttttccttcatttttcactttcctttacatattattattattgaaaagattataaattaaagtaaatatataacgattgataacacaaacataccaatagatatagaatcaatgaattgatcagttcaattaacaaaaaaaaaaaaaattgatcactgatcaacaaatttacttttgttatataattgttgttttctctaaccacaaagctagatctcatgttgtaaaatgcatacattatatatttgatgagttcctatatataattatttgagcaaacgaatctatataagctatataggtaaatactttaaagtacttttttgggagtttgttcgtgtgggttagtcactttaataattaagtgccccattggttcaggttttatatatgtgatacacacacacctatatataaatataaattaatacatacataggatcttcatgcaactagctagctagctagactttcataatatatatatgacccatgatgtttttattcgtcaaaagtatcagtcaatattgccatataatatatttcgttatggtatatataaatatatattggtcatgagaacgtaaaattaactaccgaactttttcctcctcaaatatatgaccatataatatatgaccatatatgacccatgatgttttgtattatacatattatatatgtatatctgttacatgcattaataactataccatatgtcatgtatataaattataataaatatatgtataaatatatttgttaatttgatgtgttttctggttcattttctgaagaaagtatagcctagctagttagcttggtcatgaatttacctcccttttaagtttctattttatatatattctccatatgtatgagtatgatgaaaaaagttctacccataatattttaccttattatcgtatt

SEQ ID NO: 243723 - DNA, 2464 bp, Cannabis indica
gctaattgccttttactaattcaatttactaaagcggtcattacattgagggtaaatgtttccacgtttctcaacaactgacacatggcataaaagggaagagatcatctcataatctcaccaattaaaacccctcagtcaattttagtcacagagatgctctactgatctggcacaggttaagaccaaaaatcatgtaaaggtccatcttgccttattatagcttcccaaacacggaagacttactaccgttctaggacctagagtggtcccagtactaaatctacccaagtgatacctatatgggtactcgaagagcctatcacggacactgactgaccaaaaggttcgtggacatctaccttcaatacaaacccagagctcccaacaacagttatgctttttttgacacaaaatcatatcttgtcccctgtgtccagacatggtagtgtgtgtactaattacacctttttaccagacagtattccaggcctctacttttaaatgttaaaccttttggcaatacgtgtcaattaagtacaatgtcccccaattgtccacatgccgcatgcacgagcacaattatttctaaggggcccaatagtcagctctatttgcatgttatttaccctattagtgagttttttgcagaaactctaagcgggtcatgggcatgtccataccctcccttagcctataaatacccttctattcccatacgaagggggatcacaacctagatagttgaaactctacaaaaattgctctaagctttcctcttcctcaagagaaacatagagcattgagttagggtttcctgcaaaatattgtaaacaaatcagatacgcccttacaggttaacagactgactcgtggactggggttaattaacacctaaaccacataaaaacttccatcttatttatttatgcatttgactatctctttagctcttaaatatttagtttcttataatctcggtaaacaagacccattcactcaacataaatgtacaaagaaagaaagcagagtttacagaacctaacatcttccataaactatatagaaacaacttaacattttatttcagaccacacttaaacttctccaatggggcttaatcctaaatattgtttatcacgaaaaataagcgaatgcaaaaagaagactgaattcaaccaggcacaccaacatgcaatttagccatattacacaaaatgtaatcacactacaaaaaagcaaaaatcctagaaatgcaagagagtaattacgtgctgaaggaaaaagccttggggaaggaatttggatgtcgtatacttgtcgaattgaaggtacgacaataggggtttgatcgagacgcccaactcttgactgaagggtacaaacatgatctataagctcatcaatgttcgctaggaaaactattgatctcgattgctttgaggaatcaattgtaaggtttggggtggcacttttgtgtttaatcgtgaacttcaatgaagaagacaaaggcacttgtaaatgtaaaagggcattcaccaaaaacgattttgggtttttctctctcctttgaacaagaagattaaaattcagagggaaaatgagcaaaagtggtagacggttgattttcaccgtatttataggggaaataacaatcaacgtgcttccggttcaatggcttagattgcctctcagaaaacacaattatatccaacggtctgggaaattgaagcgttagcatttaatgatttctgcaagatccaggtaattcaaatgattatacgccctaggatgcccacggacaagatcaattgtcaccttgcaaacctaggtctcacgcactttcccaatatgtgtaacatgtacagattaagataataaagccatgtgtaatccattagtagaaggcaaagaattcattgtcatccacaacctattgatttggaaattaaaaaggtccatgttggaatatatttgaccaagatctagatttactaacaagtatgtttttaacatcctaatatgaatttcttgaacgatgaatctaaacacataaaaggtatgagaaaccttacagtggttgcagcagaattaaatgacccctcccactcagatctctaacccttgtatcctttctgtagcagagtatcacgaagatctgagcccgattctccttcttgttggttggattcttcacagtcttacatactatgattgaggagtcacttgatatgtgtcggcatgcactcaatcactaatggatgaatttggtttgtgaagaatggctattgtatttcgaaaattcaagaggaagaagaaaaaggaataggtctcatcaaacctagagtgaaagctaggtttgtagctttggaggcattagttggatgatcagaccttagctatccttttatactaatttccatagggttagggttgatttattttggaataaaaaattgataaa

SEQ ID NO: 243724 - DNA, 1349 bp, Cannabis indica
tcgctaggcgataacttttgtagttatagtattttgaaaacgcttataaatttataacgggatcccgaattatgtaatgtatttatatattaaagtttatttataaaatttaattattcacattttttagtaaatcttttgattagcaaataagtgcacagtaatttaaaattactataacgtgcctaatttagtagggtgttatagtattataaattaaacttatttataatttaatatgctaattaatttttatgtatttatatattgaatttatttttaaaagaggtaatataattttaatctcctataatttaactcaagatcgtttggacctatttttcataaacactttaaatgaccttctaattattaaaatagtgcagaaaaaaattctcctaattataattttagtcaaatgtaattttgacaaggcttaaataccttattattattcatttattcatttctcaattttaatttatttattcagttttattttttaaaactattaaataaataattaagtatataacaaaattatttaaaaatttgaatttttgggatttaactaaaattcatggatagaagtaagagtgcatgaacatgaaatacacttaggccaacagacctaccgaaatccttagtttgggtttatcagaaccatcatgctattatttttgataagttgtattgatataactaattaattatttaacaatttgaaaaagtgaataaacaaattaaaaaataagaataataaatgaggtattttaatcttttcaaaattatacaattcgtaaaaaaatgactaaaattataattaggggtcatttttcacaatatcaataactagaggacctttttaagaatttatgagtacatagaatctaaattaacatttatctaaattacattggaccataaaatgttattatgtatttcaagaatttattttgcaaattatgaattacattaaatattttacttattataatatttgttatcaacatcaaattttgtatttgtatattggagtataatattaaaaattgatgcaaatatatcataagttattttttgtgtcaaatatagcataatttttatatctcccattagaaatagtttaacactcatttagtacaaaagattaataatctaaaaagattacaacttttgttcaacagattagttatctagtggaaatatattccaaattaacattataaggtaaatttttggtgataagattgttaccataagtatatacctcctgattagagatgaaaatttatatcaggggatgagtaatcgtggggacctgcccctaatgggacggggattccccg

SEQ ID NO: 243725 - DNA, 1090 bp, Cannabis indica
caatatgggcagtttagtgggtttaatagtagtagtttctatggatcatcatcagctggagttgttcctcatgatcatcaatattcatctcaacaacaagaacataataataatgagcttttgagattgaccatgcaatttggatcttctaattcatcatccactatctcagatcctttcaacagtactagtactagaagcagagactttgatgactcatccactgatcatcagtactggaaatgatggttttatatatatctatacatatatacatacgaaattatatgtatcctggtcaattataagaagggtccgggaagaaactacatctcaaatatctttaattatctgtgattggatagtacgtttggttttgtttgtgtgtttgtgtgttttttaattggacaatttgtatcttatatatgttttgtatgatcatttaccgtatcaaggtggaagcctttgtttttgcatttattgtttgaattgtgtgtgtcaattaaaacttcaagctagaaagttattaatatatatatgcatgtgcaaaagtttgttgccctatctacttttttatatgaataataaagaaatacttttattgggatttaaactattgatctattatagcttaacattaatacactaaaattaatattattatatttataaatattatttttattataaatatatgtcataagtatatattttggagcattgatattagacaccagtaagttttagtacttttgcgacatgttgcgttgctattagctagcgatactccctaaaaactattatattaaattatatgagacccgatacttagtttgaccaatagcgatattgacacattggaaggtgctaggcaccactggtgtcctctagtatttctctatattttgaggggaagtgactatcacctcgccgactacaaaagtgaagattaatatattaagtaataataactgatgtaagatatattatacattttcatattgatctgatcatgtatatatttatatggtataatacatattatgtgtctccatattttcatatatagtactataatatttatatatat

SEQ ID NO: 243726 - DNA, 3217 bp, Cannabis indica
tgtttcttagaactccatgaaatcgaattggcaccaagaaaaatgcagaaactagaggttgacctgcgatcatcttgatttgatgcccaatctgttaggagcatggttgtaggtgcaagccaatgtcaagtgtcccttttaggtattttagaatcttcttaaccactttgaggtgagactcaagtggattgtgcataaactgagataccttgttcactgcataggaaattttaggtcgagtgattacagcatattgtaatgcacctactaaacttctgtagtgtttaggatcaacaatagagtcactattatatgtagaaagtttcttaccacctgtcatgggggtaggtaatgagttagcaaattccattttaactttggaaagaagatccatcatgttcttcttttcacataagtgtaggctagaatcaaggtgttgcacttgaattcctaggaagtaatcgatttcacctagatccttaaatgcaaaagagtcattgagagctgtaatcagtgatgttattgcagtagtggaactccctatgacaaatatatcatcgacataaacaaggacatatgtggtgtgatatttggtgattctaatgaataaggattgatcagctttggtaaaggtagaattgaaaacttttagagctgatttaagcttatcaaaccaggccctaggtgcctgtcttataccatatatttccttagttaatttgcatacaagtttaggagagtttgggtcaataaaacctggacgttgagtcaaataaacctcttcatttaactctcaatttaagaatgtattattgacatcaagttgccttatttgccagccattggatagggcaattgtcaatatgactcgaatggttgtttgtttgacaacatggttgaaagtttttgtgaattcatatccatattgttgcgtttgtttgacaacatggttgaaagtttttgtgaattcatatccatattgttgcaagaaatcatttgcccctagtcttgctttgtattgtacaatagtgcttatagggagaggaacaagaacccaagttttgttctttttgagagcaaatatcttcatttacatagatttgttccatttacgatctttaagatttgctgctactattagaggttctttggaggctataagaacctttggtttatatgttccaactttagctcttattatcattggatggctattaacaagagtttggggaccagttggaggaattaaaggagcatgaaacacaatgggggtcaacagaggaaccttatgcagagttggatgtgcttgttgaagcagatgtagtggttgttggagacatagaagttgtgacaactggtgtaaccgctgttgaatctagtgtaggcatggatgataatgatgaggcagtagcatgtggggtacctagtgcttgaacatggccaacaaaagttagtatgcaggcagaacgaccaacaaaatcatggttatagggtacatgaggagattcagattgcactgcaaaaggataatgaaactcacatctcttgaaatctaaattctacaagaggttgcaagtcatttgtaccctttatgtttgagaccgtagccaagaaagttacatttctcaaacctaaattcaagtttatgtctattataatgtcttatattgggaaaacatgcacatctaaagacttttagtgttgaatagtaaggatttgtgtcgaccagtttatgaagaggggtgtcattttgaatgacatgagaagggagtctattaatgatgtaataagttgtttgaacagcttcgtcctaatatgttaagggcatatgagcccaagctaagagagttaaagctatttcaatcaagtgtctgtgtttcttttagcaacaccatttcttttagcaggaatagagttcccaaattattttttcacttgactttaataagtaaaacctaggtgtaccttgagtaggcatatatgaaatgaacataatatctatatctacatcaggacaacatgggtgagggtccgcatatatcagtgttgacaagctataaaagtttgttgtaaactgtttgagaaaaaggaaaaggaaacttattagcgtgtagtttattgctttcaagaacattacaatgtttcataatagattgtacaatcttagcagaaggatgggcaagtgttttgtgctacaaagagaaattattacaagcagatacagaggagagtacacattattatttgaaacattgcacaaaacatgtggactgaatgaagtgatgctcttagatatgtggagtagggaaggctctatgacattaagacattgcttcaattgccttatcattaagatttcctttgaaacctgatctttgacattgcagtagttagggtagaactcaaagaaagcattatcgtcatgagaaaattgagaaactaagatgagattttttgtgatgtgagaaacatgaagcatacaattgagaatcaaaggtttggatgagagagcctttattatagttttgtagttgtgtggtgtacattcaatattggtttaagtttgggtgatgaagtatacctccaaagttttctaaatttaagcaagagttttagctccaacaattcgagtaaggattctatcagacattgaagaaagcaaccaagaatagaggagctcatcttgaacctcccattcctgaatcatggatttaaatgacctccaacttcatcttcttggttgagatatttgacaggaggaataaaggtgtcaaagatgatgttctaaggtcgatgtccacaaaattgtagagtaaacttgaggatgctagaggagaaaatttttatcatcaagcttgatagaaactttgtgcaaggaaacaactggattgaatgctggagttgccatgaacgatgatcaacgaagaatagagaccttaaaatagcagaatgctttttactctgatacaatgttgaagatgagagagataaaggaagaactgagaaaatgatttatatatattgaatctaaataaagttgaagagcccttaaatacaagttgttaagttagttagcttgagttgaaactaaccgtaattatttaggaaagcaaaagcttgtaatagaaaaagaactaacttgggagtatataaacttgtaactactttatctaacagaattgggacccagactcgtgttggaattattttaccaaga

SEQ ID NO: 243727 - DNA, 1897 bp, Cannabis indica
ttcttaatgctaagtattgccacagtctaaacttcgggagggttgaaaaacataatagtgattcttttgtttggaagggaattctgaaggctcgaaaaatttgtgcggatggtgtggggtgtctgattgggatgggggactgtgatatatgaattgttccttgggtcccagggtactgcccagaagaagtgcaacacagcttctcctataatactgttcatgctttctccactgttgcggatttattcacaagcggtacccgtacctggaatgaagaactgatcaataaatgttttgatcctggtgtggctaaagcaattctatcgataaagcctttggatgatgaaggtgatactctgttttggaaatttggttcaaacatgagtttttttggttaaaaatgcttacttggtatcccaacaatctcggttccattgtgaaaaacctgtgtggaaagttctctggaagctcaaactacatcctaggcaatcagttttcatttggaggattctaagtgcttgccttcctcttaaattgagactgggatttctaggacatgacgataagaagtgtgctctgtgtggtaatgaggctgaaactgagatacatgtgtttttccaatgcccatttgtgagaggcatctggtttttcagtccgtggggtctcagaactgatactctttctgtggatagctttgaagagttttttctgtggctttgtagttctgatgacgactggcttgtacaagtcagtgcgtgtgtgcttgaagccatatggagatgtagaaacgaattagtttttcaggggaagaatccttctacggcattaattttaaagaatattgcctcatgagctgttgaattctcgtaaatccttagttcttttggggatgcagcccagttgggtggtgaaaatcggttatctgaacaggtgcaggactttcaggacaacctcttcgatgcttggatctatgtcgatgcttcagttgtggataatgcagcagggattggggtggttctttatcgatctgggactcaggaagcaattgctctgcagtctctttgtactgtttctagtgtcctcgaagccgaattgtctgcaatccttactgctttggagcgagcgtgggcagacaattaccagactgtcttgattaagtccgactctaaagttgttgttgaggccttacgcttgggggaacttcctcttgcttggggttcgtttccggtttttaaggcttgtttgaagtttgtttctatgttttctgtttcttttcagtttattaagcgtgatttaaactctttggcggattacctagcttctcaggctagagtgaaccatgttagccaaatgagttacctgttagggagtcaacccccttttgtggttgatatgtgattttctttgtttgcaatgaaggtttttccaaatcaaaaaaaaaaaatcttgacattgtttgtgtaagtaaatgacagcaaataaagttgtacacatggccttttaacattaacttttttttttttgtaagttaatgagattaactaaagtgggacacgtgatccctcaacattaatttctttttttaaaacacaagtaagtgagaaggatgacattgaaacttatctatatagagagagagatatgctaggcatgtggacaacatgcccaagacacataactcttgttaaaacatgtaagttataatcatacattttatttttattaattattattaaacaattgttgaaaaaacttatatttaaacaagaagatatcattgctaaaaattaatgcaaatatattacaagtcaatttttaataatatagtacaatttttacatatctcatcaaagatgttcttgcaaacttatatataataataacaaaaaataaaaat

SEQ ID NO: 243728 - DNA, 2761 bp, Cannabis indica
ttaaaaatttgagacaaaaaaattgatcccgtaaagcagtcaaggtaaaaacttacatgtaaaaacaagttaaataaaataaataaataaaaattagttccttaaattaactaaatcaaaaattgtttcccaaaatatctaaattaaaaactagttccttaaatgttctaagtgtttatgtgcttgtataaggttggttttggtttttatgttataaattgcagctgattgcgtagcaccaaacaatgtttcaaaacaattgaagtgatctgtaggaataaataatgttaagttgcaataacatgcaatagtacatgcacagaggagaaaccagttttactctcgtgacattataaatgtcataaacctgagtttgaaattctacttcaatcaagtttctaatgctaataatatgagaacatgacatatataataaaagtttttacatgaagatcagatttgaattcagaaataagaagagaaagaagataatgttacctcttacagattatctattggtagcaccataacccccgatataaccagaatttttattcatgatatctgaagatccatttccaagtccaaatccaaatgagacagatccttctagctctaattgtgaggatctccatgtggcattcccataaattgaaccaccatcatatatgtttgtataagtgccatcataacaaccatttgtggtatatgatgatgttgctgctatatttacatttttcccaaagcctaaatttccagacccaacaaaaccgatattcctcccaccataactgagattgctaatactataggttgaaccagcacctccactttagttttcattaggtgaggagccccaaagtcttcatttatgtgagccttgaatcgttgagttagccaggcagatgggtattgaacgacaatatgtgaaggtattttgttgtgaaaaaatcagtgtggaagtagccatcttgatgttcttcgagtgagttagccaggcacagagcttcattaagcttggcctgcaatgcaacatgctattggggcacatacgaggctgaaccatgaagagcttgtgagggccttccagatccgtattgagaagagaaatgagatcctatatacatcttcccttttgctagtagtcctcagagtatggtttcgacgaacccaaatcaacagcgcctaacagaaatttcacgacaacttgaagagagacgtacaagaaatatgagaggggaatcaagagccctgagctgaaaacttacaaaaaaaaaaaaaaaaaaactaaaatatgagaaaataaaatatatggcataaataaaaccacaaaaatgtaaacattgttaaaattctttatgccaaatacataagaaaaatatgccataaaaaaataaagggttaaatttttgtataatgggaaaaccaatttacttgtcatgtttcaaatgagtgttaatgttattgtccacattttagaggaataaaatatcttgatgagaaaaatatagatgataattcagggctttgattttaattgtagagaatgaaaaagtacgaaaaatgtatgttagtgattggattcagctattacaaaggggagagtatttgtagagcttatttagctcaagaaattgttcagtaacttacggattactaaatcagctcactccgtaactactgattgctaaatcagctcactcggcaactaactaacaaaaccaactacacacttaacaaattgacaaaattctaactcaattctgttacactatgaaatagtgtaggggtttattagtaatttgctaagcgtgtgaatcactataaatatgtaattgtatagctattatgggatatgaattgagtaaatagaactttggttcaattggagtttggcactgactcgaagagtgcattttaggagatttgtcctgtctcgaagaggactattatctaacaattggtgctttcattgagagcaattacagtgaaagattcactgtaagaactctcagccatgaagaaaacagagcttgcgaagatgttgatggagttggatcgtcgtattgatcgattcttcgatgctcaattgaaggcatttaaagtgcatctcatggaggaattagatgttagagttgagcaatattgctcatcaacagagacatctatggctccctcggctcaggcaccatcggagaaggctctcgatcttgtcggcagtgacatttcagctggatccgatctaagtagatcgcaatcaatgtcggttcgatctatgacgaagatggcagctcgaagaacaccgaaggagaagatcggcgtggcttcatcggatgttgtggattctcgatctacatcaacgaaggcagctcgaagaactccaacgccgaagaagacggagatggcactgaataccgctgcaacaggggtacaccgaccacgacaccttcgattggtggaggaaattgggcgtgttctagatcagagcacagatgggagatgagaatcgtggtcgcgccggatagcagaagttcatcggaggagtgtggtcactgccggacgaagggacgcgtgggcacgccggatcgcagaaaataagttggaagagagtccatgacgtctatatgtttactgattttttgaaatatatacatacatgtatatatatatatcaacctagttattactaagaagaatcgtggtcaaagattgaagactatggaagaagaactgaggagatcttactagctgttcatggctt

SEQ ID NO: 243729 - DNA, 3527 bp, Cannabis indica
tttttttcgttgttctatgtattcgtttgtcttttaaatagatttaaggattgtgaacgtgacatataaccttaaataaaaaattactacaagtgttgtatcgggtggaagcaagcattcaccaagatctgaagggagttcatgttatttgtgtttaatcaagattgaattagaaaattagagttcaacaaagttgtggcaaagtatggagggagcttaaatttatttaagttaattgcttttatagtgattttactgattaatctcttctctagttgtgatctcctggattattattgacacctcataaaaaatctcgtgatcttgtgtctgattttatcatctgtaagtttttagtccatgcactattgtttgatccgtcaagtatagttcctcataaatgaaaattctatcatgttctatcaacttattcacatcaatcctttgaataaattttttgtataataagttggtaattataataagcggattttcatatataaatgtatgttctcaataaaaagtaaaaagagaaacaacacacttctatgctatctttatctttgctattattattattattattattattattattattattattattattattatttgcagaatttatttttgttatttgataaaacacaaattctgttatatctaaaaggtgtccccttttatttttgtattctcctttctgttggaaaattgtatgaggcgtccccttctagaatttgctcagtaacctatactctttgagctgatttttcaaaacacatttctatgtaaaatctgactgtattaacaaattatggaccgttatcatcttctaattactcaaactaaattaacataactaattgattgaaattcgtatgcataaatagtatatactaaaatacattacatacttatccagagaagagaaaaatatagatacatggtggataaaagtggtggtcctaaattagatgggtctaaagttgatatagaaggttctagtggtacacacactacaagaccccatggatatgtacttcttttccccatccaactaccaacaaatttatacattgtctacattaatgattttcattggggaacactaatctacttcttctgcttaaaaatgattagtgttcttgtaatgtcccccctaagaaaattaccccaaaacaaaacaaatgaactcaatcagtatgagaagaaatggttgaccaaatccctcttgatttggacagagtggtgacacaaagagtaagtataatttgtagaaattatatattttatgggattttatactatatgtgcaaaaatataatttttttttttaaaaaaagttattttaaaaaaaatattgaaaaatataaaaaaaccaaataaaggtaattaacaggggcgggtatacaatataatatggcccctaagatatattatatgtgcttaagtttatatatgtagtttagtttttgttgataattagtatatggtgacctcgtgtgacaaactaaaattataaaggagaatttttaaaacaaatacccttttttatattttatttacaatttaacaacctaaatattttatttaaaaagataggtttgtgaagttttaaaattataaaaatacacatttctcatcaaaaagtaagaaaacaactaaaaattaacgagaaattaacttcacgacaactataaataaattagaaaaataacatcttgacaactataatacaactataaataaactataaaacaattaaaaaaacagtctattatttttactgaagagtattttgtttaataaaaaagttcaaaacgtaaaagtaaaaaatttctacattaacgtatttttgtaattttgttttttcaaattaggtctatttatgtaaaattttcaattataaatatgatatgttctataaagatctacttttatttatttattttaataaaattctatttgtttcctttttttatttgaagatatttgttttcttctttaacaatattaattttctttgcaagatataatattttagattttttctaattgtgtataaagagataatttttatcttacgtcccttcaatttttatagttatcacaaagaaatctttctcaactaagaatatggtgaagactacactctgcagcaagatggaacgaatttttaagtaattgtttgctagtgtatattaaaagagaaatcaccaaaattttttatataaaatcacttattgatgacttttgttatatacaagaaagacgttctgtattttaatcttaattacgattttaataaggtatatttagagcgaaatctccttaatatttgcactgtttacacattgaccttaataaaaaaaagtggcagcaaaactaccttacattacaattttgttgcagtcgtactcttaagtgtcaactcaaaaatacatagcgtcatattattagatcacgtattaaataaatattatttatcttactttttaattaagaatatacaattttgcataaaaaaaaaggagatcaatttttcaataattaaataaataaaagttttttttagagaacaatataattttttttttaatttaatacaaggtccaataatatgttgccacatatttttgagtttgtacttaacgagcttaatttaccattaaagctacggctacatcaaaataagataaagtagttttactgctattttttttattaggatcatatgtgtcacaactacaaatgttaaagaaattttactgcaaatatcccatttaggatcatatggataattttttaatgggtattacccatgaatggttactaaacaaatttaactataaagattaattttaaaaatattaaatcatcaaattttaatctaataacgaataattttttatatttttacatttcaaaacaaatacatatataaaataaaatataatttaaataatcattttttaaatattaagataaaaaaattaaaataagaaaatatataaaatcttagattaaaataaaagagtatataatattttaaaaaagataaaaaaagtattgaagttaatataaaaagtgttttttttaaggtgttatgagaacaagtgaggcagttgcagatcacctattcactaggatgaagtaggtgaaagaaagttcctaggtcccgaagctgttcagagaacaagtgaggcaattgataaaatctgagcacgaatgctcgcggttcagagcagaccaaagagttatgcagatccaaagcatcgagatattaatttttagatcgaaggtatggtatttcacttagtatcacctacgaagggcattaaacgctttggtaagaaagggaaacttagcccaaggttcattggacctttcaagatccttgagaggataggacaagtagcgtacaggttggctatggccccaacactggcagctgtacatgatgtgttccacatttcgatgcttcggaagtatgtctcatacccgtcccatattctgagttatga

SEQ ID NO: 243730 - DNA, 4348 bp, Cannabis indica
aaaccttaaaacttgccttcacaagtgagcgcatgaatgcagtcaaatgctttctcccattttctgttgaagcactcaaaataccaactcgtgaatagccatattggtcaggtgtccagcctgcatcccctgtaaaattcaccaaaattttccattgcgtaatctaaatcttcataactttgcctttctcatccgtataacccctagagataatttctatttattctatccaattcatcacaaactttttgagggagtcaggagggttagttgacaaagtcattgccattggcatgaagaccatagtaattaatgataccgagaacttgattgcaacagcatatcacaccccactaaattatattgcaattaactagacgtgggtagattcacaaccccctcaacatatacttaagatatctaaaattttcctttgtaattatatcatcaacaatcattcaactaaagagaatgttggaagaaaattccataactacattggtctcattttgcatctgacataggatgaaccccactgcaggcttctaagaacattttcgaagtacaggaaaagtttcctgcttaatttcttactatgcaatgttattagcgctattcaatgggccttctcaaaaaaagatacagcagtagcttttaattgattatacagagaaatgttatttacgaattagaaggatatcaaacttagcggaaattgaatatttcaggggtaaaataacggtttaccccacaaacaaccagaatagaagctaaagtgaaaagaaaaatgaaaaacttacgtaaaccaggaatgtcctcagctttgacaggtttcttaggaattccagcttctttctgaataaaatgaggttgtgattagaaccatgtttcatgatttgtttcatcaagcaattcaagagcaaataaaatagcatgatgctataattcctaagctccttaacatttgtggtgtttgaaaatacctactaagaatactaataatcttttacctttataaagtcaattcctggatacacaatgtgacagttggagagctctcttatcttttcatcaatcgcctgcggaaaggaaaaataaaccaggtcaaccactactgcatgaagtgcatagaaattgaaaagccatcaattgacttttacctgtctctggcggcgaatcatagttgacaagtcaatgtatggaagcttcggatcaattttgcattccataaggattcctccatcataatcttttatgtacctaacatcacaaatatatgcttacatagtgtcatgagacatgacaaaataagaacatatccatgagacgagatgcaagtttagaaagaaaaaaaagaaaggtgagaaacctataaataagaaaattgtggttaactgttttcatgcaacaggagtagtacagaaacatacccatgccaccgatctttctccaagtgaatctccttggtaaaaccctacatttggaaaagggccttgaatacaatactaaacaaaatgtgctatagaaggaaaagttaaaaatgagatgaaccaagaaaaaataatgacgagtgattatagaagaaaacctgcttaataaaatagccaacagcattattgtcagcatatgtcagaaaatgagttagcccatcaacatctcgcgcatgttgttttaaatgattcatcagcctagtaccatagcctttaacttgttcatcagccgtgattgcacagaaagcaatttccccaaacctttggctgtagttttacagaaaaaagagtgcaaccaaaccaatcacgtcagctatgcatacacattgaaaattaagctataaaaagaaagaaattggtagtaaaacctaaggagaagcaaaccattacctgacatatggtcgataggtgatgccaccaacaacatgattgcgtctaataaccataacagatttgtggcttctgtaaagaaaatcttactccaatgaataatctaacctattgatccttcaattcaatatctttattttatggtctttcttacttacttacttacctatccataacaagacgaacaatgtactctttgggcatgtttggtagttgcctcccaaaaatatttttcaaaccaattaacctatacactccataatcaatacataaacatttttaaagactatacaataaaatacagaccataatattattattaagcattgatgagtttggaaaagagagaatcaaataccagaccatgtgctcatcaataccatcgtttgaatagcaagcaaacttgagttttccagcttcctccttcaaatacaaatacaaagattcaagcttttcatacacacaaataccaaaattgagaaaattaatcaaattactaaataattaatcaagttacctctcttttcaaactttcctctctagcactataagcaccactggtctgcaaattttccgtaaatattttggtggcgtcttctttgaccacaattccctgagctgtggtggcgttggcgcctggaccaccggcagcggtgccaggagcagcaccagcgtctttagaattgtcggaattctcaattttgacagtcgcagcctcagtcttcatcttggtattgcgtgtggtgctgtcgaggcgtgcagcagtgaaattgcgcatggaatcgttatcgaagtcgtcatcgtcgtcaacggcgacatcgtcggagtcatcgtcggagtcggaatctgcggcgccgcctcgggcagagatactgtcgagatcgtcgttggaggtgagggcgccgtctcttgcatcggtggagaagggaggagcgtggtcgtcggggggaagcttgcgcttgttgtggatggaggaggtggctgaggcggaggcggagtgggaaggtgagggagattgggagctccgagaacggttgggggcggtgacgtgggaggagtggttctccattaatgtttaggttaaccaaacccaacacttttgagtttgtcaatcgatattcactcaattcttttgctttctccttaggtttgttttggtttaagtttatgtttagttattttagtcaacaacactcccaaactaaaaacacactccaaaaatacggtgtggtgcagtttatcataattatcaaatattaaagttttaagtcattatattgaattgtctctataaaataaaataatatacatatatattatatacatttgtttttatataaaaaaatcatattgtaaaaattactaactttgtaataaatagtgtggtgcggttcgaaccgtaattattagattcaaaaccgcaaaccgcaccgtgtggtttggcaaaaatacaaattgcaatcgtaccgcaaaagatttcaaaccttattttttatgtcatatggtacagtgcggtgcgggcgatttatacaatttaaacgatttgatgaacacctctacccaaaactactgaattgtctgttaaatgacaaaatacacattcaaatttaagtatcaaattttttgtgacaaaaatgctagcaaataaaataaaatattaattttgagcttatctggtgaagtctgatttttagagtattgacctggagaccacattgcgttactagttgtcaaaactttgccttgtcttcgtggagaattaattgtcaattacattgttttcttattaagtgagatatgatcttgcatccgaggttataggaatgtaattcatgattttgtacgatttggtagaacatagaaaactatattggggcttttagaccacgctaaacgcttctttaagttacacggttatatgcctttcgaatattaaccatgttggatggactcagaaggagtgatgactcttagatcttgccacttatgtcaattgggcatgttgttgggacatagatatataagttgtatttattgttggaatgtcactagtttctattcgtactagttctcgagagtatttgagttttgatttggtgtggagagttctaagatttaaaaaatatacattatgatttttcgcagaaaaaagaagtgtaatattcattttatttatcccactcagccctcactcatctaatcaaaaaaatagaaaataaaaaactagatctaatatgatgtttagttgaatgtaatgaaattaaatgggtgcaaaaagaagaagatttgaagagggacagtagatgaggaggcgccttacaatgagaaagaagaagaaagaagtctggcaattgtgtagtttaggttattatagataaggataattaccataaaagtctttaatctcaaaaaataacaataatatctgttcatacccaatttaatagcaccttttaatgctaacaaaa

SEQ ID NO: 243731 - DNA, 1308 bp, Cannabis indica
aagatttaaccaaattatttattgattatgatatggtaaattttagggcaaattagttgtccgagggtgcttatcagaactgaattaatctctattctgcattacaactaacttaacaaccttgtaagattgcttgtatgatacaatttttggcaatgccaatgccaattagaactatttttaattgatatgtgcctaagcatgccaattgaaaatttactcttgctttgtggtaggcttgttatgctgttcttcagagttgggtctcagagaagtttatgactggatggtaatatagtttggacctgtgttgattgtttcttgtactaccatattttggatttatcatcttaacgaaattagagttggtgtgtgaaattgcagtgtggttctttttcctgttgctgttactttcttcatcacttggtggtttattcagtttgtggatggcttcttcagtccaatatatgccaggcttggggttgaaatatttggtgagactcctatgtacataacgttaatagttttctaaattaccagtagagaacttagagttgacatcagtgttttgaaatcttgaactaattttatatctgataatacaagtaatttgcttggcaagaagccaagaatactgagtagtttcaacaaacaagtaataacttaaatttaccctggtactactcttacttttattgaactgtagacccattttaaactaatttatttctcgcaacataaatgtgaaaacatccctttaactggagataatatgtatatatcattgtcctcaccatcatcatctacgctgttagactaaggttgctcttgttaatgactatggttctgatctagttgtgtcttccagcttctggtgaactcatatggatttgctgaaaaaaatagttctgtttctttatatagctatttacttaatctgttgacaaatatattcttgtgtatgacatcatccaattgtttcttcttttgcaggccttggatttcttacgtctctatttttcattttcctgattggtatatttgcatcatcatggatgggtgccacagttttttgggtaggagaatggtttattaaagaatgccctttatgaagcatatttactcagcatccaaacaaattagtgctgcaatttcccctggtactatttttttttcctctgaacccctagaatcattttgaactaattttatttctcctaatatagttgttgaaacatccctatagaattcacaggtcttgtcatcatttgctaaatattttggctggcggattacttgtgaattgca

SEQ ID NO: 243732 - DNA, 3501 bp, Cannabis indica
aagagaaataaaataaaatattttatttttaagtgatgtgaagatttttaatacttttaagaattacactattagagatgctctaagcatgaaattaaatgccccttaggtaggtttgtttcataatgccctccattctagaaatttttaatataaaagtattgttatttgacactttagtcctcaatacgcacagtagctataatcttaatataaccaataagaatatgggtaaaatgtgataaacaagtttgtgtctctcttctccagcagaaaaaaaaaaaagtttgtgtctctcttctctttgcattgaaaagtaatggatttaagttctacccaacaggaagtgcgtcgaattaggccagagaacaatttcttttacttattcatcatgatcattgtttactgattattaaaatcgtcatattatatatatatatatatacatatatattcttcctgctatagcttcgtacgtagggtatataaattgttgttgtcttttgatagcataatatttaatataattaattaacactaaaattgattacctttacaatgaagatattacatgcagcaacctcctctacatattttccatgcacagaatccaggaatagtacgtctgtaaatcctttagcctttgcttccttttgtgctcggaaaacctaataaacaaatgtatttatatgtatatttatatatttatattcacacaactatatataatcaataactgatgatgaaatcgaataaatccttactcaatctgctttatcactgtctttaattctaatgttctttgcttcaatatttatgaaaaaatatccaatttcgtgtgacatagagtcatagagtagtaaatatatattaatatgtttataatatatgaaggaaagtgtgtttaattacaggggagtagttggtgatggacttaacacctcctgttcctccaggaatggctcggtgaagcttgtcctccacatatatgttcatggctgttctaccctatacaatatataattcattaaaacacttataataacaacctattaattaatttattatttaatatattattggaaaaaatttaggtggagtggagtcatataatcatacaaaggttggtcaaattacttagaacaatgtaggatacaaaacatacattttagtttatatatagatatagatattacttgatttgatatttaaatgggaattgaggtagagtgaccgaccttgtgataattcccaacaggagaagcatatattaagaaagtatattcgggtgctggtgctaggcctagtacagctccacttcccattagcataggccttagatagagcgctcctttccctggaggtggaacctatttataaaaattaaaaaaataaataattaaattataaattctttatatttatactatacttgtttaattaaaccattaatttataatctaatatcatttacacattaacttattgcataattaataactcatttatttattataatatagttttttttttgggggtattctatagttttttttggtatttactaaacaaaagtatacatgaaatgatatgtgcgcacaatagttatgcatcaaaccatctatttttaaattgaacgagtaatattttggtggttaatttgatgtatatgaaaaaattaatttgccatggagataattctacttaaatttttaaaatggatcaaaatatttatattttgagttcaattttaaataatatatattaaaacaataaatttttaaaaaataatatttaatttaaagtaattaaaaattaaaaactttaatccatacttgttagaatttgaaataaggtgcatgaagttctattttaaaaccaattaacagtgagaggagtagctaatttattttatatatgacaatttatttctagacatattaacaatgtaagagtagctctaatagtactctaaagttaattaataactaaatagaattaaaacaaaagcatgtgcatcataattaatttactttctcacattctaccctctattggtgtccatcatacccctatcactaatagtgaataataaataaagaaattagagagttacatataagatcaagatatatataggtcccatatatatatacacactagactttgttaaaaccaaaatcccataaaataccacaataatatcatcaaaatttgtttgatccatttttgaactcatgttctagcaaaaataaataaataaaatagggaagtaaaaatgttattagtatgtatatatgtaatgtacccaacggttgttggcgaggacagtgagtttgagtgcgtgaaggaattggtgaatggatggagaaggcatgcagagtctttctgcgcccaacttcatgcgcaaggcattctgctctgccctaaatagctgaataccaccatcttctcttctgtatgccttcaaaccttcaaataatccctacacaccgcccaactacttaattaattatcattaactaaatcgcccggaatttttcaatttatgtatttgttttaagaattatattatgatacatgtcaaaaaaaaattaataattaataattatgaaataaaaataagtggaatttgtatcataactacacaaattatattcaatttgtttctaataagtacctaaatttaaaaaataaagtcaataatacttaaatctcttaaataaacatttttgttaccacctagcactattacaaaatgtatttttagtctcggttttgtgagttcatagaacgacacctattccataataacaaaaagttatattcttaatattagtgtcaattttaaactgaaacttttgggtattagagttttaaactaatatttacgggtgtgcaattcatttttacactatatgtcttagtttagaagcaacaccaaaaaaaaatactttcagacatggccacgaattagtctgagccaattttgagatccaaacaataaaatttacattatcaaactttaaaataacaatttttcaaaaagaaaaaaaaacccaaaaataacaatttgcattttaaaatacaaataatcaaactatatattaccaaaaataataaaaaaaactaaaaattacatttgtatgaacacattagaagaagctagtaaaattagtttttaaaattcattatgcatgaattagaacgaatggtatagtattgattctcatatagttatatactaaattttggaaagagagaaagtatagggcccacacaaattagtaaaagaaaaaaataaaaaggttactctcccatttttataggaaatattttttgctttgctaaattattttatttcattaattaaaatacaaatatgccctttaaaaatctataaacaaaaataattacatatttaaattctaataatgacaattttgtgaaattaaagcatcctgattaactttcttaattatataaacaaaataatataat

SEQ ID NO: 243733 - DNA, 1819 bp, Cannabis indica
caaacgcatttttttttgcggtgcggtgcggtgtgggcggtttgagcggtttgatgtacacccctactttgcattatgcccatatacgactttattgtgttctgtgcaaattgaccaaagtttacaaaattggagtaagtagaggatagatggaacaagtgattatctttacgcatagtagatgacaattgcaaatcaaaagtcatgctcgagtgatgccaaacagctcgagcatatttacagctaaagagagtatggtcaattgtttctcaagtttgacagcaaacagagcaagttgaatctctgattacctttctgtcacgtgttcaaattagtatttttactataactaattaataatcactatataaatttcataattatctcataaatccactaaggattagctagaataaacttgggtggaaaaagtctaaaatactacttcactactaagtattcttttcaacttaggtgtaaaatgaccataattaaatattctgtataatttaaatattttaactgtctataaatcttgccccacttaattttagatactaaaaaatatgaaagtgactattggccaaaacgtcaaatttctactgttatagaggttaaaacttaaaaatatcaaaatttctactgttatatatatatataacatgtacgtcacacttagaagttaataaatctccataattaaaaaattatatcactaatacttatttctaacaataggatttattctaataccaatgcacacataatcattctaagttgttgaagtagaagaaaaaaacccatcaggaaacggaggtaggacaggactaacactaagtagctcatctctaaaattggagactttgttcaaggttcaaaataataagtcaaaaagattaaaaaaaaatgtaaaaaggtataaaaaaaaacttaaattatgagaatacaaaaatatattataagaatgtagcagaaataaaatcacaaagatataaatattgttaaaagtttatagcccaaatggattaaaaaaatatattataaatttataaacattgaaaattttcaaatgtgtgtaatttcaactataattattgtcactaattaaatacatgtgtacacactcatataagtcgtgcgaaccactctttgtagtggtggtcaaggctcgaaggaataaatcacaaattatgggtcacaacacaaacttgggctaacgttattggatttgcagtattgtttctcaacacatctaattattgtgccattcgaaaaagtctttcacctgagacttgagaccaaaattgtgctctttcacattataatacgatggatttatcaaatttaatcaataaattatgccccaattatgtatagtagttggaatcaaaacactgatttcggttgtcatttttctagagctaatacagcaaatatgactcgtatattctcattgtcatgagtccgcagagtatcgatttctatcaacaaagtagattttcccttcaaaaatacaaacgacattttcatatacccaatacatatacctatacccaatagggctgagaatttattttggtcctgctttctcttaagctaaaattaaaggaaattatactctatattcattttttatttaattactctttaatataatattccaatgctgattttaattttgataaattatgtgagattatatttgatatttaattataaaaaagagcattttactacaattttttttacttttagttacaacaaaacttgtgattaaaaataaaaaaattgtgactaattattatttctatgttatgac

SEQ ID NO: 243734 - DNA, 2069 bp, Cannabis indica
ttgtcagcatatttttgtgctgataaaagtttagtattagtattagaacttttactagcacaaaatgaaaagcattaacaaaaatgacttttctcaacccgtaaatgtgcttgtaaagttagattttagccacagtaaatgtgacttggtaaaactttgatttttttgccagcgaaatttgcgcaatgcgctggtaaaagcacaataacaaactgtgttgataaaaataatatttttatagtgtatatatattgaattaaaatcttcattataaatctatttcaatactttttggtttctaactaaaaggaaatcattactatattctattaatttattgctttcaatcagagttatagggttttgataaagaatgaaattgatctatacattaatgatattgtgcataattagattttattagttctatctctgtataaacttagactatctaactttttgacttattgattgtgatctattcatagtagcttttgcaaactaagcaaaagatgaaaaaaatataaggtttcacattgttaatttaatttgtattttgcatgattaagattcaaaatttattgatgtggtagctactctcacatatccatttcacatatttttgtattccataggaaacctatttgattggccaaaaaagcttttagttcttaaccaaccctttgctcaataggatttcattatctgaattcttatctataaagcatatataaaagtcagacatatggatgtatatatgaaaataatggttgccctgttctttattttctagctatttggtagttattaggttagcaattagtggcataattaatcacatgtcatgtttgtttgttgttcattttagataattggtagtatataatatactaatgacaaagactacttgtgtatatctaaccctatctatcaataacctcttttgtaggtctatatttggttataagccagttttagcagcttctattaacttaattagggtcctccacattgataactctaaccaataatatgtcttttgattgatcgtgaaagagtattgctatacacaacaatatgatacccaatactttagaatacataaattaagaacattcataccagcatttataatttattttttaaaatactttattaaattttattttatttttatttttatttctaaattttttacattacatcgcttcatttaaatttttattttttcgctacattcaattaattattattttattaatgcatataaaatacataataattaagtatgaatacaatataaattaaatatattattaaaatattgtttgaaaataaagaaacacgataactttctttaaaatttgagttaaaatagttcatatacgatgaagccacttttttgatattttttcatctttctcttctcaattgtgaaaaaaagagtagtatagctcacttaatgtaagggctactagtaatgtgaatttcacattatttaaattaaattaatttaaatatataaatatgtaagatccgatattattataataattaatgtaaaataactacaaagataaaaatatagttaagaataaaaaaaatgtgtttaaaaaagtcatccaatgaataagttttagttcatgagtagtgtttagctaaatatttttagatttgagtaatgatatgtgcacatataaattaaaataaaaataattagttaaagtgacttaccacataggtatgtgtcatatttatgtgtaaatatgtaaaatacaaaatacaaaattttagtaaaatattttaaaattaaagtaagaagcttatgagattgccctatgcaacctctagtattgcaatctaaaactttcatttgcattagtcattatgaaaaaaaaaaaaaaaagacaaagagagagagtacacactataataaatgtacgtaaaactggttacattttaaataaaataataataagacataactaataaaattaagggatcattagttttcaattcaagtataataattaattgccgagagcctatttacctttttatatatataa

SEQ ID NO: 243735 - DNA, 2773 bp, Cannabis indica
aatattattttatttattttttcattctattgaatattcaagatttttaagaaaaacaaaaattgaaaagagtacagatagtaattaaagcacaaccacaatagcttcaagacgtattcacgttttcaaattagtatagttttcttgcactgcaaatagaatctattgaatccagtagacatttcttttaacgttaacttagaagaaatctatttaaacaatattaggatttggtttgggtgcaatgcaacaaacaaagtacgatgaaaagaaataaaacaaaaatacgtggggtctttgttacaaagaaaagacatgcccgttatttcgaagctatgagtgagtgtttttattgaattattgattttttttttttgtaaaggattgaataattattgatttttgattgatgaaaagatgcattaatatatgatcataaggatgaaaaagttaatcataattccaccaactgcaattattgcagaaccaaagcacaacaccataaatttgtaataactaacagttgtaccatgcatttattttatagacactttaattaaatagctcctaaatatttaatactactaattactcaattattgggcatctctttcttatatacttgacttaatagttatagcttgcttttaaagagacagcttcattaaaccaaaaacaactcaaagttaaaccatagttacagcttacttgaaaaaccaataaaaaattaatagagcaagtaaattaccaatagaaaattggttagaattgaatgcttagtagtaaattaccaatagaaagtttttcttttactttttaaagtggatacatattagttgatgagttgatataactgttagtaataaataaataggatccatccactgtccacgttacccaaccaattaaagagggttccctcttctctcacaaagtatttatttatttatttattaaatcacactaaactaaacatagtatttatttaattattaaaaccttattatcaaattattggcttggtagctacccataaagaagttttatacttaactattcagtctatttgttaattaaaaccaaaatccgtaaaaacaataataaaatgaagatcccaccccacaaatcattcggacataaacaacacacaaaataataaaatataattggattttaataaattgataaatgctatggtatgattaaatttataaataataataataataataaaatgaaaattccatataaaaaaaatattgaaatgataggaatttaatccttatttttcttaacaaacagtattccatggcataattaaaaagaattaataaatgtatggcataaaataaaataaataaataaataaaagaaagagaagaagtcaaggactactcattcttcttaacaaagaataatatctctactaatgaatataaataaccaactatacattataatattaaagcagaataaatagtgagtatataattatgctctttagaaaattattgtaggtccgacatataaattttggcaaattaatttctaattatataaatttttacaagttcatcggtaaatattattctttgataaatttatctataaatttttagtttttcggcaattttaagttcctactattaaataatggtttttttgcttttatattctacattctttaatttatgttttacgataattttaaatatatattttttttattttaatttttatacttttctaagaatatattttttttttgcaagtatttatgtatatttaattattttaatcatatatgtatatttttaaatatgtgaaaaaaaaaataaaaaattgagcataaattaaaaaaatcttaaaacaaaatttactaaggtaaaaaaaaaaactcttctatttatatgtattcttttttaatttatactcttttttcaattttttttagaatattttaataactacatataaatagattattttttaatattagacaatttatatttatatgaatttttgttaaagtgaaagagtaaataaaaattatacattattttattaaaaaatttagaagaaattttggaaattaacacaaaacaagaaaattaaaaagataacaaaactatatattattatttagagtatagattttataaggttaccaaaaattcaaagtttgggactaatttatcaaaaaaataaaatgcaaggaccaatttaacaaaaattattttatttagggacctaataataataaggacgaggaacgaagtaaaggtggtgacagctaccttcctggtgtttatgaatatgaatgaatcatcatattgtgacaaattcacaaacaacagctaataatttatactttccacacatatgcctatatagaatggtgggtcccgtgatatgtttcaaacaataataataattacatatattctcagataaaaaaattatataaaaaatagtcctcttttcagttttaacaacaaaaaaaaaataacaatattacaaagatatttttagttggccaaataaccatcgggcaagccaacgcaaccaaaataaaaattcaatcagaatgagaatcgccattaattctggtgacttcacctaaaaagacaaccagaaaatcaaaacatgggctgtttctaattcatgaaaaaaaaatttgtagaaaaactattacgaaactataattcaaccaaaaatctagtttaatttgcataaaactaatgtcatggcttcaatttttagatccatgaaa

SEQ ID NO: 243736 - DNA, 1699 bp, Cannabis indica
ttcgtgatgaacgaggtgcttagtgcatgtactttacccgagcacctgacggccaacagtataaatacttcccacgggtgcatggagacgtgctgaacttgagcaatcattccaactccctccacacatgtcactctaaggaactattttgacggaaatagtcagtatagtactttgagcagctcctcgcgaagaaaatgctcgagagacgactctatcgtcatataggataaatccccagagtttccatcaaggccacacgaccaggaaacaaccacaaggcctaggtcgatcaatgcctttgatcaacttagaagataaaagagcctgcataacaacgtcaacaagaagcgcccagctgatatacacatcaccacagtgtgtagggccaaatttaacacctttaccgctctggttaagggtatcactactccaaaaccaatagagtatgggttagatcgagagcagtgttctactctctcaaatcgaattaaggctttggagatcacattagagtagtgtttttcctttggataacctctataattccttagagatgaacattctcttgacgaattaaagtgttcttagcttctaactcattcaatcgttcatttgcaactttaaactaattaagcaaagcatcatactgcgcctgtagatcttgggtactggtaccatgggaagtctccattgatgactcttcgtatggtgttaagcaacgaaaatatgttaattactgtcgggccttatggtgagcaccaaatagttgagggtgaaaaagtgacgggactgacagagccatggataacctttttatgttggctgtagagacaatagatggtggtttgagcggtgaatgagtgagatttttaggtgtatttttagtagtgtttcagatcccctcttaagttgcctctgtagccttatataaggaatcaaattccatcgtagttgagccggagggtagtatcatcattccactatatgattcaaatatggcatcctatcattgtgggttgtacacccactttgccaaagatattgatccacgatcaagaaaaagtgggagtagttttaaccgtttagagcggtataggccatgggtcacatacatgaccgttgtggggttatacttggtcttagtggactacccaacttacttttgtgggctaaccacgtgcgtcaatataggttcaaataatcccttatttatttgggcttaccacctttcggactatatgctaagtctaaatatgtctaaagaattgttgtgggttgcacaatccataattaagcaggcttatttggttggttatagacagggtcggccttgagttgaaatgggtcataggcaaaaaaaaaaattttagggcccttatgataaagataaatagtatttttaaatgttatttaaaaaaaatattttttttaaaatgtatttttttttattttgagctcctaaaatgagtgagctctaggcgcgcgctggtctagcccgcctatgtttagggccgaccctggttgtagagaccacaattattgcaatttaattagaaaattttacatagtatactaacttttgctattttttttacaaaaatactgtttacttttttactgtgtattagtttcatactacagtatactgtgtttattttttagttttttttgtgttgttttagtgttgttttacggt

SEQ ID NO: 243737 - DNA, 1432 bp, Cannabis indica
atttatatagttttaaaattaaattgtatatatttttgatgtattcatgtatcatatatttatgtttataatgtaaatattcttatattttgaattcaaaatcagaagataagaaatcttgtggttaatcttagctgctgaaataatttgattacgatcttaaccgttgcaatgtgttgtcacatcacattctatcttctgaatctaaaatcagaagataaaaaatcttgtaggttaatcttcaccactgaaataatttgatcataatctcaaccgttaccgtgtgttgtcacatcacatcctatcttttaaatttaaagtcagaagataaaaaatcttatctcaactgttacagtgtcacatcacatcctatcttcaatttgttttactgaaattgaaatgattttttcttacaaatattgcttttggaattcttttcttttcaatagtatataaaaaaaattgtatgaaaattaaagtcatatcttgttcttgttttattgaaaaatcttatcttattttaattttccttccttatataatctcacactactcattcaatttgatcacgtgtcttcaacatatttttaaatagctacatttttgaaaaaaaatgtcttccatttgcagtttttcttactcagtagaggaagatgtgcattgtgtcttgtatatatagacatttcttaagatccaatcataggaagaacccaatcaggtataatttgggcaatagttaatcagagtactacaaggatgaaaagtttagtgataaatctcaacaagtaagatctttgcaaactcaaatatctactattaatagtgcaattgcaaaactaagagaatgtaatcaaccaaattaaaaataaaaattcaagtaacacttcaccagaaaacattataagtatgttactataatttatttattgttactatcttattttcaatttttattgacgctattaattaatgcaccaaatagattccaacacgaatatcttattttcacttcatccaactcatcgtctcacaattgtgagtctctaacatcggcagctacctgtatgagttcattttatctaaacatgaacaataaagaaatcaatgcttatccaacataaagaccatgtggtgtgaaaaaaaaaacaaacaaaagcaaaacacctgtatggtattcacatttaaatttatacacaattaaaatgtgcttttacaatgtacccctccaaataaaaatgtcacaatgcatcagacaatttgaatttctttttcggcatgttaaatttttttgaacttttcgaaattgtgcaagatacattaaataattataatgtacaagaccatgaaaaaaaaatagactaaaaaaatctcacaaataacaaaacaatgtaagagtacatcagtacacaacttttaaagaagtacattattt

SEQ ID NO: 243738 - DNA, 1357 bp, Cannabis indica
aattaattaaaatataacaatgaataataaaaataaaaaaaatattagtggtcggtttggacccgaccaaactgaccaatttcattggacggattactattttcttttttcttaattggaagggttgcacttagatttttgtaacccgctctttacattgggttaaacaaaatgtagcataaccgaccaaactgaccgacgtacacccctagtaatactactacaccaccagtctttcctctctttcgtttttacaatttgcatgtattgcgtaattttagcttaaaagggaacgttttctttcgctttcattctttttaatggaaatagaatttcattaagaaaacaaatcgtttaataacataaacataaattcaataagaacagtactctcatcgaagaatcgtttttgaaaaaagaactacaggctctaaaaaattatggatcactctattagcaggaggataaataaacaaaaaaaaaagattgctcaaataattaaccaaatatctattgtcattaacaattaaactaaaatgagagttcatcattaattgactacaaacggtctcaactgccactgagcaatcaatgtcaataaccactgtcgatcattctttgtccttgatccaactgagagtctcccggatgcctaaaattttagccaacttaggtttcacatcactagaacaacaaatggtacgggcttcaacaatactgcccagatgatcacgagctgccaaattgatgagttgcattgaacaatgcaatatcaacatttatcttcatttgattctcttaagctttgcccaaaccttggcacctgtaaagttatctttcatttagaaattcttccattcttcaagataaactttgctgaggtaaccacatcattcgagcacattatttggaatttttatattgtcattgatttgataccgtagatatgagtaaaattttaaatgttctaataagtaatgagaatcaatggtaaagtagtcattcttattatttcaaattttatccacctgatgtggcatggccacatagtcaagactaaggatacgtgggatacaacccatcaacaacgggacaaagttaccttacacgacatgtcaactgttaagggttctgaagcaataaagcaaaactgtcaagcaataagcaaaaggagttatgcaggctgtaaaggccatggccaaccatgtttggtcggccaaagggagcaggtctgactgaccaaagaaaggttataggccggccaggtcttgagcataggttggctggccaaagaagtgacttacagatcaaaagtgatctgttcgaccaagaaagcctgaactttgcaaggaaagct

SEQ ID NO: 243739 - DNA, 1910 bp, Cannabis indica
aaaataataaaaaaaataaaaatttagaacaaaaacaaaaaaccctcccaatagaaagaaagaaaaaaacctcgttttgttcattcctttagctttagctctaatcttatcttcttcagagctaaacccactcaacaatgccgaccgaagactcgccggaaaatccagaaaccgactcgaaacctaccgaggaataccaagacaacaaggaagctgaagaagatgaagacttgttgctatcctccgatgacgacgactctgactcggacgattcttcctccgagtcaggacaaccaaaacaaggagctgctggtggaggtgaagacgaagcggatgagaagccagaagaccttattgagtatgtcaggcgaggtgaagatattactaacttggataattcgcctgagacgaatgtgaagctgtttaaagatgtgttggatagtaggagattgaggaggaagagagctgaggaggatcgacagtacgagtattatgaagacttgtttgattttcctgaggatccggagaattggaaggaggaagatgttagagagtattggggtgatgctccgttggagatgactaagcctggttgggaccctgattgggctgatgaagaggattgggagattgttagacaggagattgctgctgggagagaccctccgattgctcctttttatgttccttatagaaagccttatcctgttatacctgataatcattatgatattaagaatcctaaagctgtgattgaagagttggataggattgaggagtttctcacttgggttagctacattttccctgatggaagctcgtaagtctttcttttttgaatttgaattatcagtatttggtttttcaatggagtgtagtgatagctctatgttaaaaaaattgacctttattagagaattgtgagatggttttgatatcatcttttgaattttgaattagtggttttgtctgtttggagtttgaatggattttgttcagttgttattcttgtttgaatttgaattttatcactatatttggtttgagtggaggtcagtgatagctctatgttaaaaaaaaaattgatctttattagcaaagaaatgctaaaaggcaccaatggttgcttagcacgaccctacataattaaatttaataactattatgaaatatcggcaaccatttacaaattgctacctctaagtggtgccttatagcaatgctcaataagctcgtattagcagcattgaagttcagttagttttgactccctgagatttttctttgttgtaatttttctatgctttcttaaattttctgcttatgctttgttttctccaatgatgggttaaacttttgtactcttgttaattttggctttaatgaatcctccttagggaggcaatttccataaaaaagaaaaaagagaatgtgagataagtagagtggtcaagactcaagtctatgattggaacttggaaggaaaccataattagtagtttggtatcactatttgaattttgaattagtggttttgtctgtttggagtttgaatgggttttgttcagttgtgattcttgtttgtttgattggtcatggtttttgtttaaggtttggcccttacattaggttaaacattttttttaatgctaattttatgaaaatggataggtttattcatatgttcttgctaaattggacttattgctctttgtgcaaggtatgagggcactgtttgggatgatttggctcatggcaaaggtgtttatcttgctgaacagggattggtcaggtttgttcattatctcagttttcatacacataatgtcctatctcgataccttttcgctctaatatctctatggaggaatcgtaatcaagaaagttgatgcattaatttcctacccatg

SEQ ID NO: 243740 - DNA, 627 bp, Cannabis indica
ttcttcttcttttcctttcatcatagttaatccttcaactcatcaaagctatataatatttggtgatgaggaggattgaagttactaacctataattctttcttaaggatcttgagttcgaattcatgtcctccttttatttccactcttctctaactagcctatagaatttatttaaatttaattgaacgaacaattcatataaaaaccttaagtgataattcatttattttatagttacttaacgtatcaatttttaaattttggtcattaaaattcatgagtaatatcgattaaaatttaagaataaatattacatttcctttttctctttcatagaaattgaataattgaagttttgttatttagaattgtctttaagtctaatttttgttactttagctgtattattttgtaatgaaaggaacataaaagtttgtcgttaagtattagactaaataagatcgtttaatttctatagaacttaccactaggatagggttaaaagaaacaaaaaagattttccatttattaagaaaaaaaaataacgattctattacgaaatccaaaccagtgttggcttaggcattgggggctcatatactaatgtaaaataaaaaaaaaaaa

SEQ ID NO: 243741 - DNA, 1168 bp, Cannabis indica
aaaaatatttttactttttcacttttaaaaacagaaaactgattaaaaaagtgttaccaaaatgtaattgtctttttgaaatattctttctacaacctcagtcacatcttcttacaactgattcctctttccaaagctcattcatttttcatacaacaagtttcgaatcagctaccatgagttcttgcataaagacaaatgtatgtagcatcttaatacattaattaataatccaatataatttaatacatcatattatgacatatttttgtcaatatttaggtgcatgaataactccatatatttccttccttatcatctgcatgagctccaaaacctgcaagaaaatttatgatcaaagaagaaaaagatgttgcaaaactaaattcaaaatgaatataaaaaattttaattttctatttaatgtttgaatgttatataagactatgaaaagatcaaactgaacattccctaaaaattaataattattaagctgaacacttcatattaatgtgtaaaaccaaagaagaacaatgttgaaaatttcttacctcgggatagcactgcaaacagatgaataatgattcaatgtcttgtatgtcttttgaagtagacctaaaagcatgtctacttgatctcctaaaagatctacctataaaaatagcaagatatgttaaattgaattcatgtggagactgcagtaataaatataactaaagccaaataaaattgaagattttcatctataaaagagttagtaacctcaatttcagccttatggagattttgacatcttgtagtgaaagccttcttgtaaagtgattctttctctcttagggatgaaactgtatcaacaagtggatccagatgatgattaatctgttccaatctgtgtagagttcttaatcaataaactattcttatttgttcatagttagtaaatcttattttatttaactgaaatttgatagcaaagcattagaaaacatatacaagtacccaccttaaaatgttcacctcaaacttttcccttattctgttttgaaactcctccatcatgtcttggaagaatccaaggataggtaagactgcaaatttctcaaatgggtcttcttcttcttgatcaatagaggattcatcgtctcgtagatgattagagccttctaaa

SEQ ID NO: 243742 - DNA, 1472 bp, Cannabis indica
ttgtctaataacctttaggatttttttttcatttgctagacatgggagtctgttcatttttttgggtaaaataatatttcaagagtaacactaatacttccgggacactggactggactacaactgtactgttataacatctgtaattcaaagtttatttgcagttatagtggtcatggcacataatttggaaacttatacttattgatatatacctctctaagtgtgtgtgtttgtccatcttatgctctagttctcgtagcttgtgagtttcccttctatagaaatgtatctgcttctcattttctgttatgattctcttgtcatccctgagttttctagattttggatgtagttatttccttctgcagtaaggctcacatgtccaattaatattgcaggttttgagcaagcaattcaagactatgcaattcatgtcctttccttgacttatcagaaggttcctagatctgtgcttgctgaggtagcttttactcatactttagattatttgtatatgaagtgcactttttgagtctatgcgtaaagattctttgatttgcatatgaagtcccgtttttgagtctttggcaaaagttttaatgcggtattgatgtgtttgttgcaggctctcaacattgaaggtctgagtcttgacaaatttcttgagcagcacgtagccaataatggttggatactagagaagggtcatgctaagggccagttaattgtccttcctcgtaatgaattcaaccatcctgaacttaagaaaaacagtgccgatgccattcctttggaccatgttacccgcatcttacctattcttggttgagctattttcacctgggatctatcttttcttttatctctcattttcttgtgatttcagctgtcttttttggattctatagatcaatcatggtgctatcttaacaattatttttcgtaatgcatcaattttcccggttctgttatagtctttagaagcccgaaactttaggcactacattatatctccaatggattaacggttcttcatttttgagtgtgattggtacctatcagaatcagaatagagtaatgattctaatgatgaatgatatctgcacctaaccagtctcactttttctaatcaaatacatatacgtctcttgttttataatgtattgttcatatagaatctccaatggtgtactatcttggtgtatctttttaccaatttggtatagaatcttatttttagtgtaatacctctaataattcaacaataaatatcacatcaaacaagagggaaaagatatcacattttgtataatttatattaataactaatattaactaatatatgatataatacacaaggaaattctataatgcacaatgcactgcttaaaaagagatacactaatacaacttttatttattttagtatctaaaataattttagtcaatttttttttcatggtcatgta

SEQ ID NO: 243743 - DNA, 1852 bp, Cannabis indica
ccttggtcttcatcttctttaaatgtgtaggagcttttaatttctgtcctttggtgtgctctccatgcggggaactttccctcagggctgattgggggtgttgctagaggagtgtcgagatacccctccgtcttgtagggtacggtcatctcgacattctagatctctattcttgggtggaaccatgggcgtcagagtgtcctttgagcaaaaaattcaacacctcttgcatatttgtcattgtctcttccatcctttgatttttcaactgtaggtcgttcatctcctctaggtaaggatgggctcgggagcttgggctcactgagtacacctgcttttccttcccaggtcacctggaggtggagaataccccactggagatggccttcttgacacatgagaattatctctgtcaggggatgtgatggaggcggtggctctatcttgctgctctttgttttgacctcctccaccatggttgtctctgaccatcgttgggggtactcagtttccctcgttgtcatgacaactttgagggtcttcttcgttaccttctccgacgacggtcactggtagttctctctaagaggcaaccaaatggttattgtccaaacgtatctcaacctcttagaagcgatgagactgccttggcattttatgctggcaatgaataactttagaaacaacctagctatgacttgtctttttcacaaactgcaccaaattgtttatggtgaaaactcgtcaaccaaaaagtgataaaaaaactcaagatgtcacgaaataagatgagatgaatgctaagaacttgtaagtaaaactcaaaacttaaaagagaaagtttgtgttggtttaataaatgttcagttacaaaaattttccagtctctttcaaatctaagaaagggagtatttataggtgagctctattggatcccatttacatgatgaatcctctagtggttcccaagtgtcaagagaaggatgtcctgcttctgcaggttgtagttgcaagacgtggtcttgcaccatttatcgttgttgggtgtgaggtggtcttggggggcaagagttgtggctacaacgtactctttatcgggtcatcggaggttgcaggtaagacgcctccactacctttcctttccccatgctcaggtattgcactgaagcatggttgtacccgcatgcaatatccttttgattcttcttctcacgaccagttaagtgttggccacctcgacgagagatgtgatgatttgttgcaatatcctaatgggtatgcgaggttgagaggcatgcatgtgtgtagtcgaggggcacacatgccttaagaagctgagagtggcgagtgtccatcatgtgagtggtcgtgaggctacgagcagcatgaggctcgcggtaggccttgtgagaggcctttggcgtgcgagtggcctgtgagaggcctttggcgtgcgagtggcatgttgtctgcgaacgacatgtagcctgcgagtggcttggtgcctacgagcgacatgtggcatgtggtggcctgggcctgcgagaagcctgatgcctacgagtggcacagcctggaagaggcctgatgcctacaagtggcatggcccgtgtgtggcatggtctgtgagaggcctcaacaagtgagtatgtcgttgaaccatctcgtcatggttaatctccgaaagcgagctttatcatcctctcgaattggcctgggcaaatcctaaaagttagaggtgctaattttggaagttaagagacaccagcttgacatacattatacataaattgagttataattttttcaagtacaaaaaataaggaccttcctactaataagtgaatttttc

SEQ ID NO: 243744 - DNA, 2488 bp, Cannabis indica
tttttttttttttactaaaacccgacaaccctagttgggactagatagattttagctatgaagttttcgacctcgtcatggagagtggtctttcattgttctccattctctgagattagtcttatactaatcttttgttgcctctttttcttactctctctgtgtgatccttttgtgtgttagcgtgctcccatttgtaagttcctagtctctgctcatttttgtttttgtgcttaacctctgtgtggtgtcttttttccttcatgtgtttttgtttctctcttctctcctaaccctttaagccttgtgtattgattgcgggtggggtccttgtgctttttttcttggttggaacttttctttgttctgtgtcgtatagtgtgtctgttttattgttggggtgggtagttggtctcatagttattgttcttgtctcttcttgtcttgtgtttttgtttttgagtgttatggagttagttaatgcccctgctgccacacttaaaggtaaatgctttacctgtgtggaagcttcgatttctctggctccttgtgccacctccctgaaggtcctatcgtctctatgcttatttggaaaggtggtggcgcctatgttggtggatgcagatgacatcatagaatttgtaacaaaaaactggcagaaaaaaataactgtttgctcgctcgctaagggtccagtgtcgaagaattgtttcaagcttgggttcgaaagtggtgaagatagagattgggccctggaaaatgccccttggtctttcaaaggatacacctttgctcttcattcttggttttctggtatagaaaattctaagtcggtggatatcctaagagtgtgggtgcaatttcataatctgcctcatgagtacttttcgattgagaatggcacccttttaggtggtaaggttggagatgttgtgaaggttgagttagatgaggagaagccgctggaatggggttcttttctccgtgtgttaatcgatttaaacattcaaatccccttgaacgctggatgtttctttgacttattttcaggggggcaaaaagtggattcaatgcaaatatgagaaaattggtatattttgttactcttgcggtcgtctgggccaccagaggaggggctgctctctctcttctccagtcatggtggaggcggttgatggtgcgacgtaccccatgtttggctcgtggttgtcaacggcttcgaggttccatgatgtcttctcaggtgttgcgtctcaggcgggggtggtcatccatggtaggccattgcccggtcttgctatgggggggacggtggtccgtccagtctccatctcgtctcgaggttcaaaacgtgggaagaaaaggacagggcgtgcgctgtctgagcaacatcggggtacggttcaggcttgggtgcccaaggttatgcctgcagggagtgtttcaaggtttgctaaaaatggtaatagagttggtgtgattttgaatgaaggaggaaagtcttttgtgccatttcccaatctactacctccgtctcaggccgatcaggtgaataacccgttggttaatgcagataagtgtactggtggggcccctttggtctttgaggcaagtaaaggaaattttgatttgggccaggggtctcgtgggcctgggggtttaaagaaacagagttttgggcttggtttaattgatgttgaaaatgctggagtgagaggtgggccgattgattctcgtgggccggtttactttaattccactgggccgaacaattctcttgagccgcttatgaataatgggttgaaatttaatgaggtctctatggataagcatgggccgagagtagttattggaccgggccatttggaagttgggggaattaatttgagcccactccgtggcaatcttcaggaaaacatggggggctttctcgaatttgatggtccctctctggacaatggcacattgttggttggcaaaggacttcatcttgtcaattctaaaggaaaagaggcagagaatgatgttgaagagaaaaaggccttgtctcaattttttaaagcccaagaagaattactttatgacttgaaacactttggtaaattggacttgtatgagatcaaacaattgggtggtgatattggagtgccaccttcttcggaaactaatgagcgtactacaccttttaaaaagaggaaatttgagggctccgcttctctatgctcgagacctcacaaattagtgagaacttatcatggtgtagttagagactttccctgggacactaagaaaaggattcatgaggcacgtgcggatggtgatgatctttctgaggaaccttcggaggagccctctggtgagagctctagttgcaacaatggagttagaagaaatcacctgattggctcatttgtgattgaagaatcttgatctagcttatctattcactcgattaaccctgtggaggagaatgtcaaatctcctccac

SEQ ID NO: 243745 - DNA, 1347 bp, Cannabis indica
ccaccagaatttcgacatcagaccttcaagatcagtgcagatttctttagtaagcaagaacacactcatagcataactaggcaatgcttgagcaacagacgaatcaacacttctttgccggctttggatagaaccgcatctcccaaagaatatcatgtaattcaactattcacctgagaaatccagccatgttttctttactaacagaaggaccagggattttggtgaagtgaatggggatccctgcttatttttcagtcaggttctgccaaaccgtgaataccttctaattgtacagtgttttatgggaaaattttgatgtagaagcagcagtaattaggtgcctggaagttttgttgtttgtaagttaaaatctcttgagttttaagtaaggtctttactgcccaggttggctaaccaaatgagccttcacttgtggcagtttctgatcttgtttgttttgttttgctttgcttctgtttttatcctctcctttttgttggccggacttgggaatttatgaattatgatggctttgtatgaaacaagaatttcaaggttgtttgtttttgttcttttttaattaaagatgaggtaattgatattgtatctgacatctgttgtcctgtgagtttggttagcaaaataagaaacaaggttttatttcttaggatggtaaatacttgtttttttgttttttgtttttttttttcttatataattatatttatccaattaccataattaaggctgtaaatactcggttgttactatttattatattgtaatttaaaatcatacatgattcaagtactctactcatataaaacgttgcattttattcttttatagggaaaattactctcaaaatataaattatacctagacttttaatagtgtgtcaaattgtaatgtaaatatatatccaaatttaaattgtaataatataatatagcatgacaatgtttttatatttacccaaattttaatattttattgtaaattttagttaatatgttattttttgttaaataacttgtattgttattattaaattttatatttacctttacattattattattgtatattttttataaagtattaagtgagtattgaataatatgttaaattttgtattaaaatttataattatacaatgaattacaataataaaagttgatgtaaaaatattacaaaattattttttgtgtcgaatatagctcaatttttatatcttccatagaaaatagtcttacactttgtattttgattctttatttgattgttagctttagaaagctttaacaagttttaacatgtataattattgtctaatttttcagt

SEQ ID NO: 243746 - DNA, 3367 bp, Cannabis indica
tcatttaacaaaacagaggatccaattggtaacttttgtaaaacatagggttcaaaatggtatttacccttaaatctaacaattatagagaaagacaaacctggaggcagcctaagaccaaaatgaaaatgccaaggcctttgtgagtagagacattaacatcaagacgagaatctaagaggaaaccacaaatgacaccaataagacccaaagtgaaagccaaaacttgacaagtggcatgggcatagaaccaagcaggatcccattttctaccataacgagcaatcatggatccaatcatcatcaagattccccaacctatcatgttcaatattccatggcttcttcttagctttagatgtggagccttttctgttgctgattcacctgtttccattccaacaccaatattgttaagactttataattagtactgtttaataatcgattgggttatccaactacttgagttagattagctcaagtgaccatataaaaggtattaaagtgtgtatgtatgtgagtcatgagatcgaatcctaacaatgtacgtaactcaaaaatataatttaagaacgcttctattattaaaaaataaaaagaaaaaaacaaccttattaatatccctacttattacgaccgaggtcattgatcaatgaatgatcattgtccctcttctttttctctagagttatttgctctagttggaggctttttaggatctttttctcaaaatataaataaacttaaaaatattataaatttaattgggggataaaatcatggatcaagtttgaggtaaccaaaataaagaaaaaaaaagtatggtggccatatatattttaagtgaagattacatcaattttaatttaattgtgtaattgagattaattacatattattatattattgtgtgtaatttggtgtttatcaatctcttatgtaaaaatcttgattccaaattaatattaagaaaagcatataatggccaaagttgagtgaaactaccatattaatattgtatcaaagttggtcttaacataattttgtatgatatagtcttgttttgatttaataaagattaaaattgttgctacatattctttcaaaacaaagaaagtaaatcttgacaaaaaaaaaatacaaaaacaaaaacaataatgtcaataaagcaaatgataattatataaaatataatgtttagtattttgcttgaccaacaattttgttgactttttcaagcaaaaagcaattttattgacttattttgtttgtaaaatattatataagaatataatagacctaaacaaatgtaacttgtctagcaaatactctcattatatagaattgaccaagtttatagtagatcttacttaacccatttgagtaataataatgtttttcttaaaataataataataataattacttactattttaattaaccccattgtcaattaattatcagatttagctactatgtttttttatcttcttgtcatttcttaaaagtaaatttcaccaaaaatttttgtcaaaaaaaaaattcaccaaaattttaaaagtttctttctacatttggtaacagtcattgatttacattttttattattcaacaactttataataaaatttaaaaaataattttttctaatagatttaaatcacacatatactgaactcataccaaagtttaataatgtatcatacaccttgtgaatatttattatttataatatatttaattttacttaaataaaaatttaacaagacattttatttttattgtttttcattttgacctctagaaaatgtgggtcctaaatcttaaatatgtagaatcataactattaatagaatctttaaaaaagaaaaaactatctatagaatctgtattaaaaaaataattatgttaattttacattaaaatgttgtatttaattaaaaatatatagtttaaagatgtatgatgattaacaaaaataataacaacaagaagaattgactaaactgaatcaaaaaaatcataatggtggaagcaggtaaactcgagctgtcatgactcatgtgccactttttaattaattctttttattattattattattattattttcataaaaagaacaaaatgacatctattcaagttgcccatataatattcataatctttgctttgttcattgcacgttacacatacatatattttaagaaaataaaatactaatagtaaatttaataatttattctcttaaaaaagaatatacttatgtatttttatttattttagtatttagaagaattttttaatttaattttgttcttagtcgtgtacgttgtaattatgatattttacaaaattttaagtcattcagagaaatttaacacgccaaaaataaaattcaaaactaaaaaatttgttcgaatgccaaaacaaataagaggtacattggtgcaccccttttaagagtgtggattatagaagcacataatactaaatactttgctttttattttcttaaattgtaaaataatgtttagaaacacaatcgaaacccaccttaaacatattctcagtatatttgacacattagagacttattatttttttatttttttaatataaattataagtacattttaatatttaaaaaataaaattaaattcattttaaaaaattacttctaatattattttttaaaaaaaaaaacacattattttgtgttgtttttatttttatatttttaaaatcatatataattattatatttttaataaaatttaatatttttaattttttttacaaattaaatatacattgtatataaaataaaatttattaaaagtgatactttccaaataaaattcttcattgcattataattttgggtatgtatggatgcacctcatatctgtttcagcatttaatagaatttttagtctaattttttacaatcgtgcattttatagttatttaagatatcctgtaaaattttaattaattatagtgttcaaacaatctatttcacacgcatataaaataaatgaaatatgtttaaactgtatttttggctgttaaatttttctaaaaatctcaaattttgcaaaatatcttagaaaaattccacaatacacattttaagagtggtgcactaatgcacctctatctatttcggcattcgagagacttttaagtctaattttttttcacagtagtttacattttactatattcttgttattttgctattatctgtatattattttttatattattttaatattattttattgttttttttattactatatataatttttttttatatgtttataaaaaaaaaaaagtaatttgcggcataaata

SEQ ID NO: 243747 - DNA, 1386 bp, Cannabis indica
aatggtctttgccaatcgatctcaagaacgttaacttatatacttggtaatagaagcattcatatagtttggcagaagatttctttttattcgactcgtagcttagctttccaaaactgtatgaatttgtgaagtcaccttccatatatcaagctagtttttgttaacatatgcactttgaaagtagataattttggacctgaagctaatctcacatcttgaaatgcatcagtatttgaattcacatgcctgcattgtttaatcatagggaattcgctgaaactgcttaataagcatgaagtttatgcatctagattaaaataagtttataacataactgcagattaatggcttaatctggagttcattttctcgtgttttgctgacctttaatcttccattggattttaggaaaaaatggcaaaatgagaattttcatacggatgcaatttattatgatctagtcctactcatgagataattggaaattgtctatgccaaatgtcaaaatgaattgaatatatgaatgcaggatggtgctggtcgtgttgggaaaatgctttttgcccggcagggaaagaaatttgattatgatctaaaacaggtagaattagtttaagttgctatcctatcaagtttatggtaaattgttactaagcatattcttattagtcaagcaatcttttgcccgtcattttgtgattcagatgcgatttgctggtgatcttctcatggagttgggtgctggtgtggagttggcaactgccactgtgcctcacctttttcttcctttggcgtgtgcagctaatgtggcgaaggtttttaatagttttgttgtagcatcttttcttcatgattgagtctctctgttttatatctaagtatattttttcctgatagaacattgctgctgtgacatcgacatcaactcgtacacccatttacaaagcctttgctaaaggagaaaatattggagatgtcactgctaaaggagaatgtgttggaaatattgcagacctggtaagctagtaacactttatattcgtctgtggatgagttttatgcaaaaaagaaggctaagataaactagaaacacaggttaaagatgtgaaagaaaaaaagacaatatgatgatgaaccttggttttttacttttaaaaccctaacataaaattcattcatttcgatctttgagcttgagaagacaaaaatgtcaaaaaaggtgtacagtctgataagatttacaggccactatgggatcaatacttaacacctttattcagccattataagaatcttatagtctatcttttagattatgttgtcaacagaatcaaaacatatgattcttgaaaaagtacaacacaagtgttcaatttccatgtg

SEQ ID NO: 243748 - DNA, 1446 bp, Cannabis indica
ttattataatatattatactaagataatttagtaaagatttgttataaacatcatatataattttttcctcgtttttctaagtaaattatgtatgtcaatataatttatacatgactaatgaaatggatgactctagctcgtctttttctttagaaagcgatttcgatgaattcatagatatcttaatgttatactttttaaatgattacaataagacatttaatgaaaaagaacctcaaagaacatctgtgttaagtggtaaagattttgtgaaagagctattagacggtcacgagaaaacatgttatgaattattgcggacagataaaaatgagtttattgagttgtgtacatttctaaaatagaaacagtacattaaggacacgcgagagagattgaagttgaagaggcaatgactatatcattcttgtaatttttgggtaaaatatgaacatgagatttataattgcctgattttaacattcacttgaaagtattgataggcacttaaattcaacattaaaggaactatgtaaattaagaaaggatatcatttgcccaactcaaactcctcttcctttacatattattaattcttcagaatattatccatagttctaggtaattaactaaattcatcataatatatcttcacattatcttatataatttgggtataaacatttatcagtagtaaatgattttgtgttgtgagaattgtattagtgcaattaatggaacacatgtgaatgcatgtgtccctaaggataagcaagtcatgctacagtgatcggaatggtgtagtaacacaaaatgtcttgtgtgcttgtaatttttacatattttttatttttgtatctgccagttgggaaggtactgcaaatgattccatggtatttatatataaaattacaaaaactgaatataagttttcattgtccaaagaaggttttgaaagcttaatattatttttttttatattatgtgatgatgcatatactaattattatttttggcatattaagtgaatattatgttatggattttagattctcatgtacaaaacgttttcttcaatcatatcgtggcaaaatatatcacttgaaagaatataataatagaggtaatcgaccatgtggtatgaatgaactgttcaactataggcattctagaaatgtaattgagcgacgttttagtgagttgacagtacgttttcctataatgaagaagatgccacattacaaattgagtcgacaaactatgatagttattgcttgttgtgcttttcataattttattcgttaacaaacacatcatgattgtatgtttagagaatgggaagaaaagaatttgaggagaggacaacacagaaggagttagcaccagtgtatcaagatctgaagtgaatttatctaattaatttgctgtagtaatggcacgttgtc

SEQ ID NO: 243749 - DNA, 1438 bp, Cannabis indica
ctggataaacatcctggatcttttggagaccagggaaagaaaagatattggagctttcgtactactcataaggtgtttatgctcaccttaacaaaggatggggggttggtcgggatatgcaaaagaactcgtctcttgagtaatgaatcaatcgtttcgcagctacgaggttagttgaagtattaaaagatctgcagataagggaagagaagcagaggatgaactacaagagatcttttcgaaacaactcgaacaattgctttatggagaagttccaaaataggaggggtgagttcattaagctatttgtccttaaaaacaataggataaccatggtgagaaaaggtaggggatggagtgaatttgcaaggtgcctcaatagaatcctaaaaagaaacagcaaacagaagatggagaaccagtcatcgacaatggaggcaatggaagttggcagggtagagggcccaaaaaaatcttgggcgaacgtggtgaaacaggcaactaaaacaacgagaaacaaaaccagtagcagaatcaatagttcagattacgttagaggaacgaagtcgatcagcggaaaacttcccttttggtcttccatttataaaaatagaataagaggctgaagataaacaaccttttatccatttcctccacttctggccaaaaccttttcttgctaatgccatgtctaaaaattcccactcaacatagtcataaacgttctcaaagtctattttgaaaactaaaccactttgtcctttgcttctatattcctccaccgactcataagccactaatattgagtctaagatctgcctattttccatgaaagcagactaagtttcagaaacaataacagtcaacaacccccgaagcttgataaacaatactttggaaataatcttgtacaagcttgtaattaaactaataggcctataatccttcaccttacaactatttaggggataagacaaatgtacgtctcattcatggggataggggatctccctagcccttagtaccatttccctcagtctgccatgaataaaaatagaataggagagaggataaatatcctctcattcaattcctccacttcggtctgaagccctttcttgctagaaccaactctagaaagtcccactcgacatagtcatatgctatctcaaagtctaattttaaaaacaaattcactccttcccttacttctacattcctccacagtttcgttagccaccaagtccgagtctaaaatttgtctttcttccaaaaaagcgacctaggtttcaaaaatagtatcatcaagaaccccccaggggaagcctgagagacaagaccttatgtacgagtcatatgtatgtcccattcatgcttccttgaatgcttctatcttctgagaaccttttgaacaccctcatcaaaccatccttcaata

SEQ ID NO: 243750 - DNA, 2043 bp, Cannabis indica
attatacttagtttccctttttccttctaatggggagtttacatgaaaatacataagttaggctgttcttgtaaggctcgacccatgaggagactgatctactgactaggaaaatagacacaattgagttgtcaattttgtgtcctataattatgggtaattagttatgaattaattgcttgatctccattttaggtagttttcctttttatattgatatgatcatttgtcgagatttgaggaacatttaattccttattctgtgtgcttgaataaaaagggacgtcagaattatcttctaggaatacgctatctggccctccgacatcgctataatggaagtgcttctggatatggactatcagtagaggaagctcatctggtcgtagagctaaggtactttgttggaaggccttgtatgatttgggcttagcccaaattatcttctttggacccacaggtggacctttgctgctgacctagaatccacgtgtctcttgcctaaaacacggataagaaactcattcagttacctttttgtgcatttctggggcatccgacaatatgtgggcttccaggtgggtatggatttccaggtttaggagcaacaataggtcttgctactggagcattctataccctctacggggtatgtatagctggagcttgtattctaggagcttgttggagacctactccctgaggagaatttatggctccaggctatccatatgctactgcttattcgggatagataactagtatcctcacccaattggataaatggatgttcgtgactaatccttcaattttatcccttaattagtcacattcattcattatatgcccaatatgactgtggtattcacaccttttgttttggttccttttttgtttaccaccttcgtacataggtggaggtcttttgtaatgaaccataaaacaagtggccttgcaaacattctcacaagtatcaattaggctagtatactcggaaacctagattctagtgtttttcctttatttgcagattaattttagcttagagctttggaatttttttttttttgctctgtgaatgactcacatttgactctagaatttctgtttgctagtttatttgtctgagaactacactgtatcctatttgtgccgctctaaagctggagaaacttgtctgtgtagctggctacacagaagtacttggtctgtaaactgtgggcattgcaaacattgtttctagaggaaagatagtcagagcaatcatatgcaaagtttgagcagttgttgtattagttgtaggtgttggaagtactccataagctttagcataagcatcttctaggtttatgaatccttgggatttggataataagtcagataaagaattagcctttttcctttgaagttatccccatagatccaattgttattcttgatgttaaagctataatttttatatctttattaacctttgtctttgcagttgtatccatcatgcaatggatgtacttctttagactttctcttggttgttgtttaatgtttgtcaaagaactaactgttgggaatattttatcaggatctagatttactaacaagtatgttgattaacatcctacatatgaatatctctaaaataatgaaattaaatacataagagtttagaaaatcttacattagttgcagcagaataatatgactctttttgctctgatctctaatccttgttcctttctgtcgcagagtattattaagatctgagcctggatctctttctctccttcgggtttggttaccatcgtcttactcactatgattgagtacttgactttgctatgtgttggcatggcactctatcactataggctcaagtatgaagaacaatgaaggaggcttgaaaactgtatagaaggtgtgtctcatctactagttgtcgaacagagttagaaactagattttgggaggttgaaaagtgttagatgagatgagagcatcacgttccttttatagtgttttaactagggcttaaggttgaattat

SEQ ID NO: 243751 - DNA, 1194 bp, Cannabis indica
taatatagtatcttgttctttttaatagaatacatgatataatgtataaaaatataatttctttttctttgtgtatatatatggtgggtgtattataatacctactccagagtagttcaattaattatttactattgtttttattttatttttcttcctatatttgttttaaaaatatgatgatatatatatctatatatattagttaaaatttggaattcatatttgagatagacacttgttatcattatataatttttcaataataatattgatatttgtctttttgtataatgatatatattatatatatttatatggttctgatttaagtctacctaagaatggtaaatgatgaagtttgaaaaccttcaaaattttataagtaattactgtttgaactataaataattcaaataaaaaaatatagagatacaaatttggctatgcatgataaatcaagttgaaatgtaaatttatattatcctcataatttttttttattgaaacagctttggatctaataaaaacgttaaagtccaggcaattataggcccagaaacatcaatgcaggcccatttcataatcgaactgggaaacaaagcctaaattccaatcataacattctcagcaaaaagcccatctctgacgtcactccgaagcccatattttttccgaatagccgcaaacgactcatctcaggtggaagccattgccgccattgtcaaagctttcggatggaaacaagtagtccccatctacgtcgacaacgagtacggcgaaggaatcatcccttacttaaccgatgctttacaaaacgtcgatgcccaagtaccttaccggagtgtaattcctccgaccgccaccgatgaccacatttacggcgagctttacaagctcatgacaatgcagactagaattttcgtccttcatatgttggctgatcttgggcaccgagttttcgccatagcagagaagattagtatgatgggtaatgattacgtttggatagtgactgatgggattgctgattttcttgggtcggctaattctacggttcttgattcgatgcaaggagttttgggttaaaaatccatgtacccaaaacgaaagagcttcagaattttacagctcgatggagaccctaatttgaacgtgaaaatcccaccaatgttaactatcctttggtgactt

SEQ ID NO: 243752 - DNA, 6060 bp, Cannabis indica
gtccaataaaaaatataagtatagcagatgtgctagttataataactgggatattgattgatatattttgtgaggcactaatgaataaaattatggattacattctaagattatcccaagaagataagtcacaatattttgatggaagaacaaaaccaggttatttattatgtggaaaagaatatatatattgaaactaacatattcaataatggtaccaaagggatttggaaattcatttggcacctctcttaggagaaccctgtttgcagagaggcttaatttaacaacaaacttggttcttattgcaggtggagtgtgtgtattatgtgtagtggagattatacaaattctttactcaagggaatgatatatcatatgaatattaagggatataatgccccccaatcacataatctgatatacatatatattataatgtggtgttagagttactaaaaaatgccaaataacaatagtatatagatatatagatttataagtatgatatacactacacatggtaggcgtatatgtatatttcaaagctttgattcataatttgggtatggccttatattatatgggtttatctatttgtctatctagatcgtaatccaaaagtatcaatcccaatgaagaaggcatcacactcgaaatgtcaagccacacctaacattcacagtgcgcctactttgttgattaaaggattgtctttttagttggagattcttttcagttttccagacagcaattattggtaggattgcgttgggtttaaaatgcatgtaggaatactagttgaaagaatctttttaaattctttatttttggtctcaggctctcagctttggagagttagaaagagtatttgaaccaaatggaaattatctttctcatactaaaattttattgtctaatttttctgaaatacctctctcatacacattcacctcaataatgggtaagtgttgttcaaagaatgtagtttatttttaatagatctatgtaattgttatttgcattgatgttattttgctaatttttttctttgaaatgacgacatttgattttctcgccaaactggattttttaacaaattattgatgttttttcgattatatattaatattttctcgataatttaagtaagaaggcaaggaatgacaattttcgacacttttttttatagtatatcaatactatttcgatgattgttgtactaaagttaagtatgacgattttcgataatttttcgatggtatattgatataattttatttcaagataaaatatagcaaacaatagcaaattttttttttttgattaaaggctcttggagagcaaccaaacaaacgaacaatgaaacccaatagggcaaaacacccaaagggcaaaacacccaaaccagggagactaacaaacaaacaaactaaggaaataaacactaactgaactagccgaagtctaaaacaacagaaataaaacaaagcaaaccaccatccactagacaagtgaaagggggtcatggccatctacaataggggactgtagggaaccaaaaacagagggagaaatgaaatggccaaacgccatactccggttcactccatgagccgcaagatgggccacactattgcaggatttagggatccaacaagcttcccaaaggttaagatgagccacggtaaggtgaaacttgctaacaattccttgaatgttatgatgcagcagctttatatcttgaggattgaggagcagggcatcaatagcattggaggagtcgctttggaagataacatttttatagccatgtttaaccgcctcaacagccccctcatacagtgccgcaacctcacccgccagcggatcacaatggttgcatttaaaagtatatattcctttgtattggctattgtgatctcggaagatagctgctcctactgaccgattaatgccaattgctatgtctgtgttacaggtgatccaaccaaccggaggagaaagccattcactcagttggttagtcgaaccggattgtgcttttagaagttccagcagtctagtattgatgttgatcacggtgacgggcaagggagtagttttcttttcatggatgagagcatttcttgctctccagatacactgaaaaatgatcgccacccctccaaggaataagtggtaactgacattaggaggcctatgtgcctcagtggcgagccaattcaattaattttcccaatcatggatattgaggtcaccggttctaacctgccagttgcacccgaaccagaccgcacgagcaaaggggcagtcccaaaaaagatgaaaggagaattccaccgccgaacagcacaacggacaactggtgtccgaaagcgagagcataggccctaattttcctctagttagcaggccatcggagaggattttccaccagaacattctgggcctattgtgtatcttgggcctattaatcacacaagacgaaatcgttgataaactatcgatatataatcgacaaactatcgataattaattaaaatacaaagtaaaaaaatatatatcagcccgccatcgataaacaattaataatcaattaaaataccatgcaaaaagaaaaaaaagaaatcaacctgtttatcgatagtatatcgatggtttatcattttcggcatttgagataattttttagagtaattttttttatagttgtttacgtagtagttattttagatatcttacaaaattttaagaaatttagaaaaatttaatacgccgaaaaatagggttcaaacaatctacttcagccgcgtataaaataaaagtctctcgcatgccacagactttttgaaccctattttcaacgtgttaaagtttttcgaatctcttaaaattttataagatattttaaataattacaacgtaaacgaccataaaaaaaaattaaactaaattcccaaatcttataaagagtgtattagtagacccctttaggtacattttagaagtatccacaatatattctcacctaaacatttttcacattagactaacaatatctcatctatttcaaaaataccacttcttaattaatttggttacttttactttgactttacagacctatattggtacaaacaagtatcccattcccatgtctctattattacggacgtataacgcaatttacacgttgattaagagatatgcctaattactactagttcatgtgatcacataccaaacctaattaaattaattattaaatattaatattaaatttgttttatcattacatgtctttatggtatttttcacgtgtcactaaaatatcatatttcactcgataagatttcttgctgtttcaactgcttcagcgtttaatttatagtttaattattataatttatgaatgatgacaagtcaaataaaataaataaataactaaagaaaaagtacataagatgaggccagtgcttacgtaatgaaggaaacaaattttttgttttgtattttttgctcaaaattggaaactgcaatgatttattgttttgtatatatattatatattatatcacacatccacaaatcgatatcataataatgtgtgcgttcatcaaggcatggacaatttggaatggatggatcattgacccaaaaaaggatataggttccacatccagaaatgcctcactcaaagctaacattgcccatggagagctttggacttggcaattggtctgcaactagaatataaaatagccccatcacaccagtatgtggttggctgctactataactggactcatgtgtaagagtctcaccatcaacaatcttcacagaccctggtttaggataacaagtggacatgcccacaatgtaacccgtctcattccctacctcctttccggttccataaattggaattgaagagcatataacccttccatcctgaaaatcaaagattacaataaataccccatcaaactatggaagttttattttatgacaaatagttatcttgttgttgagcaaagcaaaatctcacctctccatataatgttgaaccaactccaccagtatgctgatgagcaacaccgtaaactacatatccggtggtcggagctctaatcccttttcttctggtgtcaatgcaactctgctttgtccctctaatgcccttgcatgattttgcaacattatgctcaacctgccacacatggtcagagagagagttcaatatagtttgagcacttaatagtcaattccaagagaacaagataaataataaattatggggtcaagtggaaaacaaggggaaatgaattttatcaggaagatttttcaaggagtttagtaagcttctgatatatagcatcagtaagccatatgtttttccaaaaattcaccaaaataagggtatcacagattcaataagccaactataatttatgtaagacattagtatgtttcagtataacatctctcaaagcttcactaaattaagtacaaattaaccccaccagtcaacagcttccataacttttgtccaatcctatcagattccaatccactagtctatgtttaattcagtaatgccaagtgtataattcaatagtgacaataaaagactagcagccaattaaattacaatgttagaaagggaataagagtcacttactaggcaattatgttgagagttcaaaccactccaagtatcagtgatatcaaaaatataaatcttaacaggcaagatagaatcagtccaatcaacccacttcacagtatatctaaggtagaggcttctcttaacaccttgaaagccctttctcactctgcaatgtgtttgatcatagcaacaatgtagtcctccaatgtaatctggtttcagtggtttgccatatttgtccttggtaacattatacagatcacacctacactcagtgcatcccaacccatcttccgcgcctcgagtatcgatcgcgtgcacattgagcaaccatttctcctcaaacccatcaggaatttcagcagggttaccaacttcaattccataaggatcaggaataaatgttggtgttttccttgtttctgagccaagcccaaaatactgcccaagttgattttcttggcacactccctggttccttgcgcccttaaagttggattgatttcgttgatttaccccatcttgctctacaatttcaacacctttgcgctgataatatctgaaaaccacccaatggtgcagataagtttcatgaagaggtattgggtttgccctgcctcatcaactacttcagcattaaagctcttaatagcaatatgacctcttggaaagtccatatcgaagtagactttgtccgccactgatcccggttccagctcaaactttggggattgataaaccatagatttcatcttatttaatcgtagagaatttgaacatggtgtgctcaatgtcaatactagtatccctatgagaattgctgttaggcataaggaactgcctccataaaggtgtcccatttctgttctgccaataatgaaaccaaaaaaacttctcagtgggtaaccgaatcaaaaaacaaacgaagacccgtcaaggaaaatttaaaatttatgagaaaaaataataggaattttttagaccaaaaaaaaaaaataataatcttaatttaatgatttaatcccaacaaacatgataaaatgaaaacgcttttgttttcgtcgtaaattcaaaatccaaacaagatcttacaatatgaatatcaaactttaactttgtcagaccaaacaattttgcactatactttgttgtttttcttttttgtgagtggtctctttgaactgagctttaaaagtgaaaaagtttgaagaacttagctacacactagatgacacaaatcccagataataaaagaagaagctaatcaccaaacaataatttaatagaaaatgagctatagtttaaagaaaatgacttttagagaagaagaggaggaacataccaaaggtaaagtggtaaactgggccaaatgttttgaagcggtggaa

SEQ ID NO: 243753 - DNA, 2611 bp, Cannabis indica
ttagccagctataaaatgcagttcaataagccttccgtacagttgtacatcacatgatgaaatgaaacaaaaagagtaaacagtgaggtgcagatttccaggtaccaacccaatatccccgaggaacgtcttttccacaaatctggaaactactcaatggaccctttccatcaatttcttcctgtttgtcagctaacagtagatctgatgggaacaaatcatcaaagttcacaagaatctcagcacttcccttacgacacctgatacagatagtcttagagtaccatacaaagtagtattcttggttaagcgacaaataaagatgaaatagtcattacctcttagaagggtggtgagcaactaaaatttgaagaaatttaatgagtgaagctctagtatttgatttgatcatctgtagacatacagacagaggataggttatatcagcaaacaatataaccaacagccaaagagaagcaagagggaggaaacaatttctaccttgtgttctaagataatttcaaaggcagtggttgttgcctcttcaacatcatagaccgctcgagcaatctttgacaaatcattcattgaaaaattcattacatcgaattgatcaaatatttctaaaaatgtggaaattcaaacatgtgctctcttttgtacctgtccagggtctgagacatttgatggaagatggtcatttacaaatttctcatcatccaagctgaatgagctgtaaatttatagagcattagaaatcataatgatgacactttaagttggctgttgtaggtaaattcatttcctgtggtactaaactctgattctgctagtttaatgaatgtgtatgaagaaataataattcaaaccgtatatagtttacacattgacattttaaatgcctattaccatgtctaagatgcccaactaaatatttaaaataatagtcaaagatgcaagaagaaaccaaggagatgaaaaaaataatcaaaggggaagaattaaatacttgtgcctgtacacccatccaatcattgattttaatatattgttctcagttacatgagtaagcataacatttcaagaaaatcaagacttttgcagcaaaaaaggaaaatcaagacttctcttctatcacattttaaagaagataactaacaaaaaagacaaaggtcaaccaccaattctgaatacacagtatatcaataatgaaagcaaggggaaatgtctaaaagcttaatttaaaaaagtgaaaaatatagatacctcttacctgcctaattgcttgttaatccaactaagtaaacgatcagcagtacgcccatcatcaattataagtatttcacttttctctttcttaggttcccaaccaccaccaacaaatttagaaggaggtccccagaatagcataggataatgactaacagagaacctatcacagagtttagtatttatctgtgctgccaaataagcaaatgaatgttctaattatcaagacatacttttaatagatagatgacaaattatgcaaaatagtaattaacaatcaaaaaacaaaacagaaaaacttcagatggggaacaacaaaagataaatacaaaattggtgacaaaggaaaaatataatactataagaggatacattgcagactcgcactttttccaaaataactatatctgcaaattacttggattttattgtaataagaaaataaagacatgaaattgtaataaggttatcttaattaatttgagttttgctagttctcataaactgttaagaaaacaatttaagcgctttgacttcactagacattataatctggtagctgttcacacatggaaataatggacaaagacaaatgttctggaagttctaaaaaagtgcatatcatgtgatccgtttaacagtataagggaaaaaaagaaaacattataaataccttagatgcacagtctaccctagccatcaataccatccctggatgaactgcatctggtccattaaaaagccttgctactttttcataatggggctgcaaagttaatttcagtcagcaaccaatggtcataacattgattcatcaacaatatctaaacaagatatatggatgtataccttataatttctgcatgcagggcacctaccaagcaagtaagaaacaagaagattaaacttcacattttcaaatgataacattaagtgcaagagagagagtaacatgttggatgggtatccatgaaaaacgtcatgcaagaaaagtgttttctttcctagaaacaaaataaagaaatgatgttgggtctattgtatttccggaatttctgattggaaattcaagaaaatgttttctgcgcataagagataacataccaactagataattactgaaagtcgtcgtcatatcaatcaactcttaaaactgttcaccaatttaagctattttccagtccaatatactttgatattcaaattaaccatcttttccataaaatcataatactgaacttaaaatttacacacaaacaaaagtgccaatatgaaccaatcccgtggaattcaatacccaatctaccactagaaccagcaattgaagcaaagtttcaatcac

SEQ ID NO: 243754 - DNA, 4453 bp, Cannabis indica
tgagtcggttcgaggttaaaccagaaaagaagattatgttttctttatcatcggggcattaattgtcttttatttttcgcttatggttggttacatgtgagatttcaaaatgaattgtagcatgtaacgtgtgaagttggatgcaccttaggtaccaattagtttagtctttcaaagatataagtttttagtgaactaatttaccctgattttcgttttgtcagagctacgatttttttagcgggacattatttccataagttgaacaaatgtacaagtaccttaactgaatatttttacttttttaattttatttagtgaacgctaactttaaactgaagggtttatattattttgaaaattatagccatttgctttagggtttaattatttgattattttggttaaaataagtaaaatttgggagccagagcagatgttgcattttgcagattttgacagttgctatacttgcgcaatgcaccaaaccgtattattaaccctcggtaattttggtattacactaatttttatgccgttttggttctgaaacacttacacttggaatgtgggcaccatttatcgatccaataaaaatttcttcagaaagagggtctgaactttgtactctactctgtaatgtttgccctctaaacctcgatttcaaaaaccaatatattttctctataactttggttgtgttgagctttccttactttatatttaacaatttgccaatttgtccttttctttttgtttgtattttatttttgtatttttctttttctaagcacatttttaattacaaagtgtttaggatatttgctgtgaaacttttttaccatttacaaaaagttgatgtgatagttccttcttgttttgttttgggatgtttattttttatttttttacaaattgcctaacccaaaatcatccaaactaaactgaataaatggatgaaaaatgcaactggaataatccaacaaaaatccaaactgcctaattatgatgttgggagggttaaaatttattccaacatgcttgttaactccataatttagcatggctaaatcctgagattagtcttagtgaagtcttctattgacaaggtcctgtcaaatggtaagatggcatgatctctctaccggataaggagatcaagtctcgacaggccatcaggcattgacacatcttgccaggccaaaggccatgatgcatctcactcagcccaaggccttgacacatctcactaggccataatgccttgaaacatcttgccaggccaaaagatgcatatcgccatgtcatctcgctaggccatcaagccttgagatatcttgctagggtattaggccatgtcccagctcgctcgaccatcatgtcttgatgcgtctcgcttggctcaaggcctttacacatcttgctagactaaagaccatgactcacctcactcgtgcacatcttcaacatcttgtttgtgcaagtgcatctcgcctgaggctcgagatcaccatatgtcctactcatttagccaagccctagtaaatatttctaagtgttggaaaagacaccatttaaaatgagataaaaatgacaaggaatgcacacaactaaggacgaatcagagtatggccacaccattagcatgacttgtgacgaggtagtgacaatgcaaggaggtatcacaagtataagtagtgactacatcacctccaagttagaaatacatgataggatcaattttattttgacatttattttacaaattaaacaaaagaatgtgtagtacaacctggaaacatgttactaatcaatttacattaaacaatgattgagtagaaatacttacaatcacgcagcggaattaatgacttctcccgttaaatgatctaacccttgtcttttatgacgcagagtattatcaatcattgaactcgattctccatagaactcagatgaaagaaccaatttcgacataacattcctcagtgatctagttgttgttggggggttttatgccctaaataaaaccaatttcaatataatcttatttactaattaatagaagatcagaaattattttatattgcttgattcacatgattattttcataattatatgtttaatatataaattcttttaaatctcgaacatatagttattcatgactatagtattatctacatagtggaaaataatcatgattatatgcttcaaaaaatttagtctcatgatttattagtgcactggatttacactaatgtaattatcaatgatgtgatttacttacaattagataggtagaatgtctttttaagtgcattagtaaagtaaacttatatcagatgtatcgactatatattggaatggatcgatattaatagtggaaaatgtatcataaacttactgttatatcttttctacatcaatgtcacttagttgatcctagatcaattgatctcaatcttgagatggttaagctttagcttaattgtactatacaggttcttagacttattcgttaccagcttaaccattggactagcccatacttacatgttgggaggtcagtagtgtatttgagtgggagtgttaatcatagatatgaaatccagaactttataactattatgaagtgaaatgacggttttcttagagcttggttaaacgatatacatggaagagctcttatttctgtccttataatagtttttagaaatatcatttataaggagctaagtgttttaaggataaaatacaatagaagggtaaaatagtacatttgtccatactcgatgtagaccatctatagaagatcattggctatttaaattgaaacaatgaataattcataacgtatctatatttggtatatagagcgttttatgtaatcaagagtataattctgaatttatagtgaagttaggaggaattaataagctaggaaatttactcgataaatttctaatatacttattgggatcttagttacataagttcatagtccccacattatctgggacaatactatcttgtagactcaattaattaattaataagtcaattataattctaaaataagagtatgttttatttgagatttttcactaagtttggaccgatttgagaagaaaaaagagatatgggttattttttaattaagacactttgcgggtctaattaataaatatatttaaataataattttgtttgataattattaaatagataaaattaatatttaaataaatagattagataagtagtatttttgaaaaaaggtaagattgtttcatttattgaaacaaaatggcaaaaattcaagtccttgggccttaaagggaatttggctgtaatgatcgcatatttaaatatggaaattagtaactcattacgttagttttgaggtactaaaccaactacgtagcagaataatagtttctaataattatcgtaccacatcctcatgaccaccatatgtatatatatttatctaaaataatataaacgaaaagataatttacctctcgaaacctattagggtatcctcaaaacttttcgtatgttgtatccttagttgatctcgaagtacttacaccatagtcttctaaatcttctatcacacacaaggactagtgtggactagtaggatatagtgtatatgaagttcttaggtttattctcaacacacgagaagaactctttttggagagaatatggaaaagatattgttgacctcaaatttggccaaccaacaattgtatttaatactgatacttaccacgtgtacacaataagaatataaaagtaaaagagacacaagattatatagaggttcaacccccttagttagcgggtaatgacatactccctttttagttgtattaatacgagatagtaccactcagatcataaagattgtggaatctgaagtggctctattaagattacaatatgagaatcaagtaggcaaatcccaagtgagagagaagccttgggcgtgtaaaagagagggagagagagagttagggttttagacttagagcttgagagcttttggggagctagagacttagagagcttagacttagagaaattagggttaggctaatgctctttatataggagagcttacatcaagataataacctaatatccctgaataatagaaactataaagtattatttacataataaaaagtaaatagcaaatgggttaattatccattaagaataggggaatatctgatatttctcccctatttttgtgggttgttaaagaccaaatcgtaacttagcttgctgtcccagatgaaggctgcgcaccaagcgactgctaagtgtaggatggggtctagccggccatgtgcctgccaaggtctggccggttatgttcctaccagggtctggcaagtcatgttcttgccatggtttggtaggtcatgttcctgc

SEQ ID NO: 243755 - DNA, 1900 bp, Cannabis indica
gaatcattccctttcatggatccttgactcattggacgtattgaatttgaacttcttaaaatatatggctaaatatcatgcattaactcatctctcacacatgtttttatttcaacaggagtggccttgatcgaatcgacaaaatcatgagtacatcgtaactgttgctcttgctctctcaacttgtcctcaagttccttaatctggtgtaacaaataaaacattaccactttggagttgtcttctctaaaaggacctaccctacacacttaactgtaactataaaaaaaaaagggtaccttctgatgaagtaataaggagtctgagttttgttcctgctgctccttgagttttatttcaagttccttaatctggagaaacaaaaagaatgtagagttaaatataatatagaccacttaattttccactagcaaagagatacacaaaatattaattctattctagttcattggcaaccaccaccttctgttggaggatagcagcataacaatcagcttcttgcatttgatccttaagtttggtttcaagatctttaacctgatgaaattaaaagtaagaagctatttcagccaaattttatgttgaggggaaagagcatgtgtaaatataggcacaaaccttttcttggaaagattcagactctgattgctgacgttctttaagcttcgtctccaactctttgatctgcattagttataaaaagaaaaccgcttagtttaaataacaggagattaaaatgaaaaattattaagctcaaaaaaaccttttgttgaagagaacaacatatttcttcttttcctttcagtctatctgaaagttgtgagacttgcttctctgattggctgtgcacagttgcctttagctcaagctggttttcaagttctttgatcttttcttgttggtttttgaaggtttgatcttttccttttgtcttattctctaaattctgcaaggtctcttctagtttccttaaagattcatctttagatcgaacttcctgcctcagtttttcaagcttttgaaaataaaaataagttgaaatgtcgaaaatagtgatgagaagaaaataagttaaactgaatatgtagatactcactgatgctttcatcttttgaacttctcctgtatcaacctgcttcctagcaggacccaattcaactccacgtacccttgtcgcaaaatttaaagagctcaaagtttcacccacatccaggtcggaagggcttatttgcacaaacatcaaagtttttgcatcaccccctgcatatgaacacaacaatctcattagcattaatgaaacccggcataagaaccaaatttttacaagagcgggcaaataaagatcacaatgttgtgtgacttctattacctaatgaatcttgaagtagatgtgtcaacttagaattcctaaaaccaaaaaataaatgattattagacataacagaagctgtgttgcaaaattatcataaatacatactaatgatagaaaatagagcaaacctgtaagggatgtggctgcttttgtttgctaaagccgaaatcacgtctcctagcgctgaaagggatctattgatattttgagcctccttgagtcgctccccttgagcatcagtttttgcaagcctctcactgcctgccaaatcaacaagccaaagcttgctcttggtgcactcgccattcatcaagttcttagctcttaccattatgcaaagcaagcttaataaagaaccaaagtaaatatacatgttcaaatattaataaattaaatataaagcaaacaatgaaacttaagtgtttggtataatgtaatggtaatagtaataaaatggaataagaatggtaatggggattgacacagttttcctcacttaagttctat

SEQ ID NO: 243756 - DNA, 1581 bp, Cannabis indica
ataaagtgaggaattaaataatgtgtacctctagttgatcaccaagattgatgacaaatgcatttgggactggatgaacagcaatccatttgtcatctttgaggacctgaagacaactgatttcctctgattgcatcaacacagtgagggcactgagatcagtatgagtagacatcccaagagtgagttcagggtttggacatggtgggaaaaagttggctagtgctgtcagccatggattctcgcctaacttatttaccaagtaatccttctctagtcccagcccttctgatatcaacccaaaaagtctcttcattagctcattcacctcctttgcatattcagcaaaagtctctcttcacaaatcccaaaacaagcacaaataagttaacaaactagactaaagcaacggtagaaataaaaaaaaattgattgttattattataattacctatattgaggaggattttggggtaataaagaggcaaaatctccagcaggatcccaaggatggtttaaggattcactccacaatgctatgttaggagactcttggtccttggagttgagcaagtatccaatgattttgactggcttggtggtatctgtaaactgagacctttcttgagaaggtaaactgtagaaatcagcaacagcagtcatggttttcttgcacaaatctatagggactccatggttggtgatttggaaaaagccatattcttcacaagcttgtgttatcttatgaactaataaattatggtcagtaatactgagatcaatgatggggattgaggcctgagttgaaacttgtgagagattagccttgtgctcctctgggacaatgaatttttctgaaatggacataggattgttgtctacggccctatgaaatactgactccatttttagtgattgaaaatgactacaaaggaacttgtcaggaaagggatttactgtacaagaaaagctctcaactcaagctgttggtcagttagtgggattcgccccaaatttataggagatatgaacttgggcactaagaaaaatgggcggcttgggcttagcattgggatagttggtgttggtgatgggatacagtcaagagtcaagagtcaaagtttgggcattacataatattacttgggctccaaaaccattgatgtcatccaaatataatataatatccagagtgaaatgattaaagccacgtattcacatgaagagcttctaagttgatcaagaaacctacagccagtcaaccatatattgtgttaacaacagggtttttaatttgggagggcaaatgaatcaattgttatttatgtttggaatttttttttttttttacaagtgatgtgctaatcagattctattttagtctcttttacactttttttatattctgagggtatttttttaggtaatgtttattatactttaataattaagcttaacattataacttaattatatttgtaccgttctaattaaattgttctattattctaccaatttagcaattttttcattataggagaataaatatatttttaattgtttagtttttttattagttac

SEQ ID NO: 243757 - DNA, 1435 bp, Cannabis indica
tttccttcagagaaaaacctgagcctttctctctccctatctttagctgccacttcttctttctcttccctcttgaatttcgaaatccttagtgtatgagtagtgcccacacacagcaagtgatacctcaatcatagtgaggaagatcgtgaagaaagatcatcagcaaaggagtttcagcatcaaagattcagagaaagagatccaggttcagatattgataatgctctgctacagaaaggaatcaagggctagatatctgaacggaaggagtcattttattccgctgcacccaatgtaaggtttcctaaactttatatgtgtttatttcatcgttttagaaagttcatatttagggtgttaataaacatacttgtgagtagatctaagatcctggtaaaataatttccaacaaacttcacctttctccttttctttaaaaactacaaagccaagatcattcttaagagaccaaataaaattacgcttccttcgcaccatagttgacgcctgaaagaattcggagttgcgatcaccatctgtcaaccaaatctctctagatctttgacgctaaataagctcttgcttctcccaaagtttagaaatttccttttccagttcttcctcttcaacaatactgcttgaattcacctctctagactgtagcaaaagcagtttggattccaaggctttgagttttttattgcaatcaccaaagactttcttgttccacctctaaagagctacccgaattgcatcaaacctcctagaaatattctcgttagagtcaattgaaccagaggaggtccaggcttgttggatgatctccaggcaacttccctccttgaaccaagcttcatagaatttaaatggtgtagaacctcgagatctttccatcacagagtcgaataagataggaccgtgatcagaggaaaggattggaagatttctgacacccccacgagggaagagatttatccattcagtatccactaatgctctatccaatcgttctcttataagtccccccgactgtctcttgtttttccatgtaaatttgaagccaaagaatcccaagtccacacccccggtctcgaacaaaaatcttctcagaattgaaccatccctcgggacaaaggttcttcctcccgatttatcttcactcaagagaagaacatttaggtcaccaacaagagcccaaggcccagagcacaggtttatatcaccagagaggttatcccagaacacttgtttatcatgggtatcaaagagcatatctataatagcattctttaaaaatattaaaaatttacatatgatttaaaaatagaatattttattttatatctctcttacattatttttgacatttttacttctaaaagtttcaattttttatcagaaaaataatgaatagcatcaatgctataacata

SEQ ID NO: 243758 - DNA, 1706 bp, Cannabis indica
aaatgatttttttatcaatttttttgatgcattttaaattttattccattcctattcctattcccattctcattcctattcctatattttcattcctcccaaccaaacgcctccttagtgtttggcaatatggctttggttctatggtgtttgggtgtgtgggcggagtggggtggctagggtgttgcgctttcaatgatggtgtaactcatcaggttcaagttgtttgttgcaatatatagttagtctttgttttgtttgtgttttagatatgtgcttggtttttacttttgtttagtttgtttgggattattgttgcaatacttatgttttatcttctcatcctttgtttgactttagcttgtgtcttttgtataattcttcctgtagtttacattttaatttggtggtattatcgatagggccgatcctagaaataaatgggcctttggcaaaatgataattgggcctagaaaagaagaaagaaagagaaaatttggggccttttaaattaaaataattttgtaaaagtaacatttttgcaaatcaattaacagtgttgtgaaatgatctatatattaagttttgtaatacttaacaaataaactgctaacatcgaccattatcacatcagtcagcgccaattgtataatttaaaataaaaataattaataattaaaaatttgcatttaaaatcattaaattaaaatttaattaataattaaaaaattaaaagtaatattagaaacttttaaatcatttttttaataatacatgtggcaatgacgcaataataaatttaattgccttgtcaattttatgtttgctacttgtaacaaaactgacaaaaaagctacttaattataatattgtgaataattaaaggactatatttaaccattgaaaaaagaatcaaagggtacaataatgtataagtgattgttcaaaagacaaaaatcttcctttcaaaaaaaaaaggggacaaaaatcttaaatgacttttaaaaaatacataatctttttggaattaagctctaaacataattggtgacacctattactagtgtaacctttattaacacaacttagagcattaataaaaggctaattagtaattttttcccttgaattttgacatgtactaaattgtgtctcctaaccttttttagccgttaaaaattctccctgaactattgagattgttaaatttaaagatttttgtctaattttatttaattttactgtttcagtgattgtttatgtactaaatcatgctcaccagactttgatatctaccaaatcattcccctcaaactttgatatgtactaaatcatgcccctttgaactttcatccatgttagaattttttttactaaaattagacaaaagtccttaaatctaacaatcttaatagttcggggagaatttttaacggcgaaaaaagttcaggaggcatcatttggtacatgtcaaaagtttggggggaaaaaatactaattagccttaataaaaacacaactcaaataccataattaataattcaaagaagagattctatctcttcacaattctaaaaaactaaactttggaattcacgaattaattagatatttgtttttcgaattttaacatgtactaaattatgtaatttgaatttttctcaagtttttaaaaattcttctaaaactattgagattgttaaatt

SEQ ID NO: 243759 - DNA, 1704 bp, Cannabis indica
tttctgtacttgtattatgtaattatttgataggatctgtgttactatataatatgttaagtgctacatccgtggtaaattcaaatgaactagtttgtgaaagtattattacaggctattgcatagtcaagctggaccacaatgctaacaatgaaggcactagaaatgtaaatattgaccctcttagtgtaacacaatggagcctgttagctgtttgcctgtttttctgcactggacactggttagtttattttctttttgtgggttcttttttccctcattttcgccaaataatgctagtctttcgcatcttggttatttatccttttatggtatctaaattctttagatcatcatgctctcataagtcatcctttataatatgtgtatcaggtgtgcttttgatggccttcgatatggtgctgcgtttatcgggtgagtatatctatgcctgcagagtagtcactgtttgcatttgcagtcattaggccctggccatctcccattcttgtgcatggagtcaatttttttgggctgaaaaatggagtcgcttttgttgattagtgattatattattaacaccccaaactccttttactattattttttcctgtttcaggtttgatgacttcattctaattcgacaagctattctccttacaattgaaacatttggcatttctcttatccttccgattttcggacttccatttcttgttggctgtaatcattccacaagtctgactggcgaaggaaagaatgccatatttgcgtcattatcccttgtaagtttatcaactaaaattgttacactcagtatgctttttcctaattacgttggacatgttctcctttaccaaggattcatattaaagacctcagtggtattctattctataatcacgttgaagttaatatgtatgcttggttgttttaggtatatttgttgtacgggctcatcatggctactactgtaacagtcactatgatttgtgtcactattcacaggcggcatttgatggtaaagggggtcattttctttttaaatccttggttaagattcattttatataaattatcaaaaagtgtactcgcatgacatatttctctacatgtacatttcattgcaggtatggggattatttgctcccaagtttgtttttgatgtggtgggtcttcttcttacagatatcttaatctgcttggcctcactttactattttggtaagaattgcagacaacaggatcataccactgaaaatttgagtgtatcataatggaaatgcttttgaaaatcttctcacgatatgaattgttataagaaaaatttacatttatagggggctaacttgaggataagtgaagcatgtagaattcatttttggtagaaggaaatataactaaatgattggattcagttttgtggtctaatttgggcatttcaattttcaagcagagaaattgtgtaaatttgtatattatggtagtgttgagctctaacatttcaatccacttttccttactaaataagaaagttcaggccggtaaggcccataaaggaattgcctactacatacaaagaattaggggtggcaaaacgggtttcgacacggcacacgaacacgacacgaattttacgggttagggttgggaaaaatagacgcgggtcgaaaacggatcgacacgaaataaaaatgggtcaaa

SEQ ID NO: 243760 - DNA, 1827 bp, Cannabis indica
accaccatcatcttctttaattattatttactattatctataatatatataatatacatctaagtacgtatagacgtacataacattgccctatctatattatacgatactgcttaatagttttctactacacaattagttagtatattttgttttgtttttttgttttttttttttttattgactcgatctcattccctatttatatttacaattttgaagtccaagaataatttctaaattaatttctctattttcaaatagaaacgcattaggataaagtcggctggagctgttgcgttctcatattttagaaaattattggaactgaataaaatgacaaaactgggaatagaacaaaataatatataatggttattattggatctcaattattaattttggctatttttctttatttccgtatatatatatataacagttagtactttggatcgtagttagttacattcaaagaataataatcgtaatgactaatttagaacgtcaattatataaatgcatagtccaggaaaatggtggaaatttagtcatactttttgaaataaaaatcatgactctcttgacaagctctttgtttttgactatttcaattatttatttattttctaggcagtaatgaattaacttaatttttatatatttcccaaattttaatctaaagcgacgaagtcaggcaattaattagctgaagatttagttcaaattttgagaataatacgtactgtaagcgtagtttttttttaggtacgtttgtatagagttttctttgatcttctattactttatgatgaccaacacattgatgatcaatgagtaatcaacgaactctaataatttaaatcaaatgatgaattacctcatgccatgaattattccatgataaaataattggatattttatgacaagtaggtagattggttttttatattgataaagtagggtcataataagtcagagcctaatcttagaaattaagattgctattataatattgcctcatctttgtttgacaagttaataaagaccaataatattggtatagcagccagcttactgctttatgatgctctttcaacttattttatgaccttctatttattactcatttataaataatatatttataattctactgaaaataatttattaaataattctttttctttcaagagttgtatacattcaactttcttcgcgatcacaatttccctagaaaaattacttttataatagactaaatataaacattaggtggcgtttagttagaagtaatgaaattgaatagaaaggaaaagaaataatctacattccattcctttatttagtttgcatattaaagtgttggaatatcattccaatggaataatttttccactattttagttgaatgacaatttcattttgaaatagaaaaaaagaccattccaatgcatgatgagaaaaaatttatataataatttttttatcactttttttatgcattttaaattttattacattctttcctactctcattctcattcttatattttcattccttccaaccaaacgctactttataagtgttgaagttaaaaagtctcacaatattgaaaatacatataagtccgtttggtacgtaaaattggacgggatcaaataggttaatttgtccacacggacatactgaaagtctgaataactaatccagctaatcctatttttgtattattcatctcatccaacaaggtgggataaataatctcatacaggtgaattttatttttaccgtttttttatttttaattttagttatttgttac

SEQ ID NO: 243761 - DNA, 2688 bp, Cannabis indica
gtctccgaactggggacagatattcccaaagaaagtcacctgaatctgataagagcgatttattagatgaagtgagtaagaggaaacataaagattcatttgtgaaatttgagccatcttctgaggaaattgctttatttgatcaaaatgcaactagaaagtattctaagggtgctccgtctcattcttattcgagctcttcaggtgatgataaagaggatgttctaagaaagaatgagaatgttgcttattttgaggatgtggaggctgaaaaaaaatctagtcgggcttcgtccagatctcattcaagcacctttggtgatattcatgaagacatattcaaaagaaatagtcccagtgaaaatccttctcttcacaatgacggaagtatatatagaaacacttcagaaataaatattaatgacaatactttaatgtttgatgactatagttctgatgaggataacaataaagttgatctgggtgattataagggacaagaaacaagctcatatttttcatccccgattagaaaaccatctgcaaatctttttgctgattcaactgtttggtcccctagacatgcagatgaggaacttagaaagtctgctgtacagtcacatcccgcggagttttctgaaagtttgaaagattctagtgttgcaccacaacaagatgtattgccacctgcagcttttgatgattatgatagccaaggatctgactgtgaagaagatttgggaaagtctaagttgcttggaggtgcagattttgataactttccttctgaaatgaatttgaactctaaaagttctgagccattccaaagtgaagatcatagtttaggatcatcttcttctgaggctggaggatctagaagaaattcatggctgccatccacgtcagttgatcaacgtcccaaggaagttcaatctgatagaagccaaggacatgaatctagttctgtatctgaaattaaatttaattatgcagagctctctcctaggcttatgaattctcgattggattcaacggctaaggacacactagaatcgtttgatactacaaaagacactgagcatacagaagaatatacttttgaaagtagtactcaggagttgagttttggggcactgaaaggtggtttgcggaataagagtaataggcgtccactgcatatgaggaaatcatcagaaaactccttgtctgttgaacaagctagcaagggtagtttttccaggattgaggaatcttcctcttctccaacagttaggacttcagttggttttggtgctgacaagcaagacccacatcgtgaggaaagagacacaaacctaagcaaaaaaggggatgtgaggaactttacaaaacacacagactccattgataatcacttggacgaggaatttcaaccagtgactagtagcagtaaacagccgtacactcagaaattgggtattgaactaaacaaaaaattaaatttaaggggttcacacaattattttgattcagataatagtgattccgaggaggatcttcctaaattgactcccaccagaaatgcatacccaggctttggagtttctcgaaggacaaaggcttctcctgattctggtagaacattctcaaagagtaacgttttatctggggaatctactactcccaattatagagctgaagcaaagactaatgtattccctggagaatctacaactcccaagtatagagctgaagcaaagaccaatttattctctcgggaatctacaacttccaagtttggagctgaagcaaaaactaatgtatactctggggaatctataactcccaagtatagagctgaggcaaagactgatgtgttctctggggaatctataactccaatgtacagagctgagacagtgactgatatattctctggggaatctataattcccaagtacagttctgaaagcaaatcatcctcaagtagtttccaggccagtgaagtattgcctaagcctttgcccgagaccaaaatgtcagattactcagtggagcagcatacgcctaaagctgtactagaatccaggagctcatcacgcaccgaaagtccaaagtcaaccccgagaaaacaggcatccaatcctctcaatgcatcagtggagcaggatagtcctaaaccaataccagagtccagaaggtcttcacgcctgtcatctacaagtgaacaaacatcaaattctcatcggttatcattgcagcgggatagtcctaggccaatatctgaatcaagatctccatctacagacagttcaaagccatccaggagggaaagaccatctaaatcacttgataagaataagaaatctggggctactgaagcttcgaagccctctgtaacgagggagacttcatcgaatgacaatacaggtcatgtgcatcctaagcttcctgactctgatgcttttactgctttcttccagtctctcaaacagactcgggattaaaacagttacattgttacatactatactctatagattgcgtttgtacaagtatgatactttttggtgctttgatattgtatatgacttttactacaacaatttttgatctttagattggagagcaccctgatgttcatataggatgtgtattattttactcccttacaaattgatcgatacatagcttcattattttgttcta

SEQ ID NO: 243762 - DNA, 1684 bp, Cannabis indica
aatgtataataaataaatctttcctgattttgctacctaataatttatttatattgtaatctgaataagtgattattatttttctttctataaaaagaaaagtgattatcgttcttttcttttcgcaaaatgattactctttttttttttgaaaagaaaatgattactctttttaattactatcaacatgctatttcttttaatatgattttggtatatgagttatacgtacataaatactaaagatcaatttgattaaatggtaattactataaatgagattatatattgcataaataatcttatggccataaagtgagtaaagatgtgttcatatcattaccataaatttttcttaattatgatttgtttctcagtttagaaaactaatggaggaaggataaaaataataatagtaattatggaaaatttgtagatgctgcccgatttttattaacagagaatcagagatacttttttaaaataagaaattgtatattaagattttttcctattaattaatatttctaaaaatattaaataaataaaattagaaaaattagaaataagagaagttgtgtttttgtgtgtgtgtgtttttttttgtccagcaattcttaagcggttttaaattaagaaccttgacctgttttttataggtatttacataatttcttgtgcgaaaccatacacgttattataaaatctcaatcttaaattttatctaaattcaaaaaatattatatcattttctttaaacttatgagttaatttcctaaaataagtggcattgatgagactaacaattccttaaactatgcctcaataaaacagtggaagactatactgattatagagaaactaaggtcgagtttggttggaggtaataaatggaatggaaagaaaaaaaatttcattctattcttttgtttggttacatataatagtatagtattagaatgtcattccaatagaatgacctttccaccaaaatggtggaaagactattccattttaaaatgaaaggaatgactattctaataaaaatttaataattttctttttgtacatttttttttgtacattttaaattttattctattcctattcctatgttttaatttctcctaaccaaaggtcacacagcatcatattctacaaaatgaaaagatagcatgtcaatgagatgcattatttttagatatggacaaaaaattaattattataataattaattaatgaattacatattaacaatcatataactctaaaaaatatatttttgaacttatcccttttctaattcaaaaagaattgccgtaaagtccgaaaaaatttgagacctaagcaaattgttaatgattaggtctatagaagtaaaaccatccaaaataaacaaatagagaaaaaaaaaaaaagaacataaattaaaaattgtaaatattaagttatattgaatatgaattacatagacctttttatttagtgtgtatttgaaggttcttcatatactacaaaaattaaaaaaaaaaaaaaaaaaactacccaaaaaatatttaacaaaaaattaagatttaagcgttaatttagatatatatgtagaaaagatgagtatttttttttttaaaaaaaaatacttataaattgatgtatcaactattttttttttttaccgtgctttttt

SEQ ID NO: 243763 - DNA, 2832 bp, Cannabis indica
ggagtgagtgaaaaaggaagagagagggttaagttttgaaatagaaggggtaaaattgaattttatgaaatattagcttattctactaatataaattaatctaaggttaaaaaataactttaaatccaaaagaaaaaaaaaatagataaaaaagtgaaattgcacttttcaaaatttaggtgtttcatagtttataccttcacgcaaaactatgaaattagtacaagtggtcatagatattgggggacctaatagtccagagatcgaattccatgtgtatcccatgtgtaagtcaaaaaaaatataatataatataaaaacactttaaaaagaaaaaaacttccactccccaaattgcaaaatcaacatcataagataaatcatcatcatcatcttcttcttcaatatttaataaataaacaaaataactaaataattaaatattgtttttcacttcactactgaccattgacaacaagcagtagtagtagtagaagaagacacattattactcaaacccctttcttcttcctcactcactctaaactttttataaatatcacctttataaaattctttggttctatacaccaaaatcaacgacaccaaagctccaaagaaagtcaccatagccaaaatggaaaacgacaacttataacactgttttccaatacacaccaactccttcaccgaatttcgatccaaccctttccttgtcaactcctttaatgcttctctgtcgtaaagtgctccggcgactttgacattgagaatgtaggagcccagaggactggctaactgtccacaattgaacaatgtcgagtaatatttgagcccaaaaagctctgaaattattgcgaagagcagaggtaattgagctccgaatgagaacccaattatgattgatgaaatgtaaaccgaacccggaattggaaatgctatgaggatatgaccaatgcatgagaggagaagaacaaatgtcatcatcaatggccgtgggactttgtatttgactaaaagagcttctgaaacgaaaccagaaaagacacgaccgaaatagttccaaatacttactaaggaaacgaatgaactaacggtgtgagttgggtaacccagtgattcgccgatctgacccaagttgtcaacggcggttaaactcgatcctagtccacaaagtgtagcgaggaagagaatgagcatgtctgcacttaagagagcttgtaaaatggtgtagtcttctcctctgggtggagggtcaaacactgttaagaaacaagatttcttagctttgggggaaagaatgtcttgattctgaatctgtttcacttcttttgggatttccaaaatgatctgagaaggagtgtggttagggacatttttcatgagattccaaagatgacgctcttctctaatggcgattaaaagaggtacaaagagtaaaagacaaacaacagttgcactcccagcataagcggctcttgagaattgggtcaatttttgagcaattatcattgccataatgaaaatagccataaacagagaaacatatagaaaatggtaaaagactctaagctcatccttattcgaaccttttctcttctctggctccatagttctaattgtatatacaaaaacaacagataaagctgcaggtaaccaagctatgagaagaatcaaagatttagaatcatcaccataaattgcataatagatctgtgtcataacagcaccacttaatcccacaaacccttttaaaagacccaacatgactcctctgctttctgggaaattcttaacgcaagtcactaaagctcccgtattagcgaaattttgcgaatttgctccaatacagatgtacatacacatttgccagactttgggttttgggatttttcctgctacggcgagaaagatcatgaagtaaccgacgaagttcatggctgcaccgattaggaggacgaaccaggtgggtgtgacctctgcaattaggccagagagaactccaacattggctccaaggtctttaaagaagccgatgagatttagggtcttctggtcgtaaccgagggtggccttgatttgcttggagtatactccgaacaggtaggtggctccggcgccgaacatgattaggaatgaggcgaaaacgctgaaccatcggcctttcaatacctgaactgcaaaacatgatgttctggtgccggtgccggtgccggtaccggtggtggagaaatgggtcgacctcattttgtgattttggtggcaaaggccgaaggtgtaaggagttgaatgaggagattcacttgaaaattgggattacggatcgatttggttttatggttttttattttaatatataatttttatttatcatttggtttttttttatggttttttgttactttctaaaaaaaattgagttttacttattttttttcaataatagaaaaataaggaaagttttaatcagttataacattaccgcgtaacactcaacaaataatttagttgtgaattttttattaatttttttagtaaaaaaatgagataatatatattaacaacctaacatattagggtgaggaatctcattcaaatatttgtggaaaagaaattgatcttatctcaatctcgttcctcgtttaggcaagaaaatctccctcttgttaagcatgcggggcccatcaattttttgatctctaaacttgattatgaaattttaggataaaattactaaacacccataatttaattataatcaattttacaaatatgttattaggaaaataatcttatagctgtaaataagtaatacaaatgtaaaatatagtt

SEQ ID NO: 243764 - DNA, 3634 bp, Cannabis indica
gagtttaaaacatcacacaatcatcaaatatgacaataaaatcagcaacaaaaagaattttgtagttcatcaaatcaactaaaacagtaagagaaagattactcagaactaatggttgagctataacaaagaaacatagggaatttaaaccatgtctgaaccacaacaacacttaaaatcacaaaatgagtacatgttgggaaatatgacctagctaactaatgtaaacaaaatacctgcttggttgcttgagattcctccatctcttttgtcaacgcactaggcaccttagcagcatgccaatcccacttatcaaggttagaggccatgaatcgtctgaatacatttcgtacttccttctcattcgcaagcatgtagggagtccgtcctctttcgtctctgatacaaggatctagaccctgttctaagagttctgaaaccttctcggcattactagacattgctgcttcatgcaaaggtgttgatgtgcctatatcatcgttttcactcaaacttaatgcagatgcttcatcaagactttgattaagcggtcgtgcttcaggttcagtatagtcagcacaatcagagcttttaactaggacctcttcgcccaatcttaagctatcattgacaacagtacatttactagacagtgaatcactaatgaaatttgcagtgtttgacgcaatttccttctcatctacttcatgagctacttgagtcaactgatcatataatcgtcgggcctccttgaacgtaggccttcgaacagtcaatggaacatttcgtacagaacaatgttgattactaaagtacggcttttccccattgaaaagaagctgacgattgctagaaggggcatatatgaaaacacaggaggaagcatcaaaataaggcttccaagtagcaaatagttcttgaatttcctaaataggtaataatatgtaaatcagtaacttaaacaaaatcaattcaaaaatagtttacaaatttcactagataaaggcaaccctaatttcctcatgagcacaactgtataaaatactgggggtaaaaaaccaatgaaaaagtcaatgcttctgtagatacaacattaaatgattatcatgtgtccatgacataatattaacgctaccatacttttttcaaagcaagttcattatatctacgaagggatgctccagcagaatgtgcagccctgccacttgcatcttttgatgattgtttctttccagccttgcctctcacaacatatctacaaatgacaaggaaaataattcaataaggttttccatacacttgaaaccttcaaatgagaaaatatgctgcagaaatgtgtatattttataaaaaaaaaattagagtcctagatcaaacaaggtgcttaactggatcataataatgttgtgaaaataacttaacgaggtttttcatgcacttgccatgacatttcaatacaaaaatattgacaaaaactgcagttacagatttagagtcctcgaccaaacaaggtgctcgatcggatcatgttatgaaagacagatgaagcttatacctcacagtttttgttatagctattgactatcgagaagaatcaattaggacaatgtaaacaaagcttaaaatgttaaccaacctgtgaaatgttttatgagccacaaccaaattaccatcaaagacacaaccagcgaagtgcccaccactagccagcagcacgatcctgaaatgagtcttttctctcggctcatagaccacatttttcagtctctctatcacatctttctccttaagacatggcaccatcccattccccacattatctgaacatcctatattatcactctcaaagagaatatcttcagattcattcatgattaagctcctccacactgaaactcgctcccccgtttgcagctgtataaataacttctgcttaagattctcagaaacaaagcccctccgatgatggatgtccttctcagtctcatcctctgaccctgatatactagatatatcatagtctttaaatgaatcaggtgttaactcctcaaaatcatcctctttcacagtgttctttccagctaagctcagcttaacctacaagaatatagtatcgaatttcacacgaaaactcactaaaacgcactgctcatatggaaaattggtgtaaagttagaatttttagactaattggaaaactgccaacaatcgaatatgttattaccagctaactcagcacctattacaattgcaaaatatacatcaactttgaaatatggagaaatagagaagaaaaaaaacagaagtgaaaatgcatagaattatgctgacagaacaatgtgcaaataatttcagctaactcagcacttattacaattgcaaaatatacgtaaatatataaactatacactgcataacaggggggtaatccaataaaacgcactgattgcacatcaatttgagttccttttttctttttttgaattattaagaaatagagcctaaagagaaatgaaaatgcatagaattctactgatataacaatgtgccaataatttcagactaattccaccaatataaataaacgttgctttgttaaactaaaaataacggagaagtttagggagttgaaatacattgaagcgatgaatatccgatttgaagtgcgaacgttgatctttgagggactcaaactcagttttgcaggtgttgcaggtccacctagttgatatgatggtgttttgagatcgattctcctcctcagcctcgtcaatgacttggagattgaaattattggaggtctcagtaaataaaggagttaatgagtgtggagtcggaaggaggatgcaggaattgaagaagttggtatccaattcgaatatcgaacggtgtcttttctccggcaaagcagtggtggtggaaggaggctcaggtaccgtcgccatgtttgaggtttgataaaattccctaatcctatgttaggcggctctcaactctcaactgctgcacttcttttacaattttgttttgagatacgtaacgacgtcgtcgcatcctctgccatatatttatgccaagtccggtcatttttatttggctatagtctttctattggctgtttttttacaatacacttcattaaaatgagtatactgattctcagttggttatcaaagctttgaagggattccactcttgttggagcattgataattatatatctctttgtaatcaactctctaattattttgtgtcttgtaatttctcttttatttccggtatttctaattttgccgctcacaatgtggctagataggcattcgcccagaatattacaggtgttgtggagccttctctcatacattttatcctttgtaataaccgtgaggtctagctttctttatctatataacgtttctttttcaaaaaaaaaaatgagtatactgatacaacctttaactatttcaatatctataagaatttttcagtctaaattttttgatggtcgtgtactttatagttatttaaagcatcctgcaaatttttgagaaatttgaaataatttactgtatagaaatcaatgttttaaactatctatttcacatgcataaaaaataaaaaagtcacacgtgca

SEQ ID NO: 243765 - DNA, 2456 bp, Cannabis indica
caatacgacctaatacggcgttccaaacgagccctaaagagcataatttagcacatgtcaaaattcagaggtaaaatcctaattagcctatttgcaaataacatgagccatattgttggcttcccttcttagatacaatcaattatattaattgcaagtccttgtgaatcagcttttatatacctaagttggaacttaacaccttgacaccatgataaagcttgttttaatgctattgcctcagccagagttgaattgaaagctcaagcaaaactagctgagaaccctgtaactactcttccattatcaaatgctgttaagctgattcaactctgagttaatcaactctttctctatttgtaatttcagtacattgcaaggtctgttaatggtcaagcattggtctatgaaacttgtaagtcacattataagagctataagtttcattatctaagatttatcacaaatgcttcttttcaattgtgattatgaactgtgttactatcaacgatccttcatattagtatattaggggttaaaaaaacacaagtttctacacactttaacgattcttcatgattttattattagctcatggaattctttcataacgatcaacaatgtaccaatattcatatcaagttattttcaaggactttgacaatgtaccaaaataggttcatagttctcaatcattaaacataccttgtttagttatttggtattatgtatagatgagatactgaaattggaagccaaattcttatccaattcatgttttgcagccaagagttgagacttcatcctctcagctttagctatttcagaattactactatatccattgttgccttgaaatttcacaaagctcttctgcaactgaaattcatggatctgaatctcaattctcaatgacaataaaaaacaatattataagttcaaaaaagaaaagaatgttcaagaattttacctgattcagactacatttcaaattttgtactcgcattcttaattccttaccaaatctctctaccttttgtttgaactctttcatttcagagatcttcgactcataaaactgatctttctgcttctccaactcctccagatcctctgcttcaatcatcaaaaccctaaaatcaaagccaaaatcaaaatatcgtaagagaaattaatcgttcgcaggaatagaacagctttaatttttcaacctcagctgatttgaatccgtttcgtatttggaatcgatcatttcgatttcggttttaagagctaagatcttgaaattttgggcggcgattttctgatcgagcacaaagcatctctgttcggtggctcgaatttccgccagcttcgatgccaggacgagagacttgttcgattgcaactctttctctgcctgcggatattgtaattctccgtttggtaaccgagaaagtggaggaaaatcaaggaaagaatcaatctcagcattaattagaaagtgaaacagagagtaagagtatgacctggagaagagagagacgtttgttacgatcaagttccattcgttcaagtcgttcatggaaggcctcggaaaacgccattgctgagaattgagttcctcactcacactcgaatagtttggtatttatacctgtaactggaatgaaaagtttctgtttggctgttgaggttcgcgccattttttctcgaaactttatagtttgttttaaatacggctttttacaaaaacatattggattttgaatttacaattttactgtcctaaagaattttttacatatatatatttttttttataaaataatataacaataaaatagaacaattaaaaaataattatagaacagctaaaaaatatcagtgaaaacataacacaatataaaaaacagaaaaaaaaaatgagaaatttcaatatgtgaggttaaaacctctaatttatttagggtgcttatactcatatactctctatttgtttcgacatctcgaagaattttttagtctatctttttatatatttgtgtacgttatagttatttaagatatcctacaaagctttgagaaatttaaaataatttacaatataaaaaatagtatttaaacaacttattttacacgagtataaaataaaatagttgcgtgcaagatactgtttgaaccttattttggacgtgttaaatttttccaaatttcttaaaattttgcaagatatcttaaataactataatatacatgataaataagagtacaacggtaaatccctagtatataatgggataagatgagaaatacctctttttttgtatttattaatcaaaaataccctcaaattatattttattaaaatataccaagtttcctattacactcttaccctctacttaaatttaacacataatttacattaatataagagtataataaggacatcacctataaaatattttttattt

SEQ ID NO: 243766 - DNA, 3563 bp, Cannabis indica
ctgccaatccccgtcgcgacgggatttggcagcaacatatttttttagtttttcttctcaattctttcagcacttgtcctcaattcttgtaaatactttctttaaacacccggggacctggaagaaaagaatcaagcgtaaatgtatttaagtagatatactgaaagaattatccttttttaatgataatgttggacctagacccaaaccccaataccagaccctggcccaaggcaagaacttagaccccagcgccagagacaaactctgaccccaaccttggacccagaccttctaaccccagcctcggaccctcttaccctagcctcggactcaacccccaaatttggacccataccttagccctggacctcggcctcaaccctaacccggaccctagacccagcctcgaccctgaccttgtactcaacctcagacctcgaaccccgaccttgatgagagagaaagtggtgagagaaaaaatgaggagagagagagatgagagagaaaataatgacagagaaagtgatgagagagaaaataaagagaaggaaaatgaggagagagaaaatgataaaagtgaaagtggtgaaagagaaaataatgtgagataaagtagagaaaaaatattgatgaaaaattaaaaataatattttattgatcttaaaattcttattttttttttaactttattttttaaaattaattttaaagttaaacacccctaatttgttctagcaaaataatattgtatttttaaaaataaaaaataactttttagttatgatgtcatgcactaaaagaaatatcttgcacgcaaattatatatgcatgatcatagaaaagttttaaataattcatctcatttcatacaataagacaaacaaagcttgacttcatataatataaatttatattcacacaaatgaagccatatataaacaatagaaatttaaataaatagtaaattcttttctcgtttagcctaaaacaaaaaagtttctgtactttcttggtaaaatgaaaaaattggacaaagcctttgccataggttctaatgtcatgcttaaattgaacattatgattttgatgaattatgaatcttttggggttaagacaatcatgtcttttaaaagagaaatcatgatggttttgggaacaatcctatactaacttatcttcctattaagttatcattgaataccataatatgttttaattaattaactgagctcacgcgtttcattattgatgggccactgtgtgtttatcatgtttttctttgaggtgggtcagattagatgtttgagtaattgtgtgcatgtcttggcatgaacacagtgttgagtgcaacacaaaataataatgtactatttctttaagtaattaaattatattaaaatttctcaaattataatgataggacttagtgactcaagatcacttgttccttatccctttttcctctctttaccaacccccaactaccaaaacgtaccccccaaaaaaaaactaataacctcttttataagagttactagctagctttgttttatagagaaacaaaaatgaagggtgtgtttggaagtaactgtgtaattactaggtagggtaattattaaggcagtaattacactatattttaaaatgcaagatatgtttggatatgaggtggtaattacatatgaattcgtaatatcttgtttgacaaaatagttagtaattatatgggaaaataatattttttagtaaataatgtttaatatggaaagtttttagtaattatagagtgtaattacattcaattctcatgggagcaatgagaattagagagtaattagaagcactcaattacttccaattacacagttacagtgtaattaaatagtcagacaaacatgttaaattgtgtaattacctttaattacacacaaatctaattacattgtggctttccaaacgcaccctaaagagaaaactagaatggaaggcttagatgagaaaagaggtccaggagtcgttacggaaggccgagaagtacgaaattggacggttgaatgtgctgttctggatgtatcgaagccatctaagcttcctaaccactgtgatgatgttgaccaggtaccttacttgcatcaaccatttctctcagtctcactcgtcaacttccatattatttttcatattaagaacctatgtatccattgtacgtatggattaaaaaaaaaagagaaagtcaaacataattaatattctcttttattagggagatatatagtagtatacatagagaaacttggctattgcagtcaaatgacaaagtccagaatgtaatactgtaaggttgagctgctaatttgcttaaacttttttcctctatatccttatccaaaaataatataagtgatcagaatttaataatttgcacaaaccatatgaggtgcaaccttatattttaataattttccatattatttattaaattaaaaatatatgtgacccaatattcaaatgcaccaatgacaatttgtcatctcatatggtacgcttcacacgttaatgtatccttttttttttctaagaaaagcgtttatatataaataatatcagtttgaccacatggtcattacaaaatagttgttcacggatagaggaaagtggaatacaaccaaatctctagtgagaaaacgctcatctaaccacattataggctgcaaaattataatttctactaatgttcgaagatacaacaaacaaaaaacggagaggatctaacacaaaatgagacatagttctcaagctcctaacgggactcctttccattaagagcgttgatcactaccctcgaatcactctcaatcacaataaactttgagcctcgatccttagccatctcctgggccaaacagcaagtcactgcttcctcacaaagtgcatcagaaaactccagtttagatgtaataacccagatcaccttgccaaaatgatcccttgcgaccaccgcagcacacatgctatccggtcccactctgttggaaattattttaccaggatcttagatctactcacaagtatgttgattaacaccctaaatatgaacttctaaaacgattataaataaacacatataaagtatgagaaaccttacattgggtgcagcttaataatatgtctccttccacgttcagatctctaacccttgtatcctttctgtcgcagagtattatcaagatctaagcccgaatgtccttcttgaatgtctttcttcatgatcttcctcactatgattgaggtactacttactgtgtgtgggcactactctatcactaagagggttcgaaatattcaatgaagaagaagaaaggagagtggcggctaggttagagtgaaaggctcaagtttttctctgaaggaaacaagatgcaaaagtcactttttcctgaagccatcactatctatttatagcatgccacatacggttaggtttgaattatttggcattaaatgatgaaaatattaagtgataaaacctacaaaggtggccggccatggcttagtggact

SEQ ID NO: 243767 - DNA, 1832 bp, Cannabis indica
tcccaggcagggagaactgtccttataaagcaagttgtccagtcaattcctttgtatacaatggccaccttcaagcttctagtggggatttgtgatgagttggacaaagtcaccaaacgcttttggtggacgagaggaatggaggataagaaattcctggctttaaagtcatgggacgctatttacaagcccacatgttgtgggaggctagggattagaaggtttcaggatatcaatttctgtctccttgctaaactggcttgggccttcgcttcgaagaagagctccttgtggatcaaagttttagatgccaaatattgcaaccttaaatcgtactggtcatcttctatcccttcaaatgcatccaaaatggccaacgatttatggagctaccgcaatttcttcaggggaaactacagatggttgttggggaataattctcggatgaacctctggactgaaccttggggcaatgaggaatggagggatggagctgcctttaatccgattgtagcgactgaactctaggcaaaaaatctgatgaatgcataagggaattcgtggaatgtcaaggaggtaaagagaatttttcaagaaagacatgttgctgcttttttggatacaccaatcttgggggagccaggaggttctctgatttggagtgactctaaggacggatgcttctctctgaagcgggtgtactgggcaattaaagttgttcttaaggaagttggctcatgatattctgccaactattggaagaatgtccagcttctttggaattcaagttggtagatgttctctttgtgatacggagggagccgattcttttgagcatctgtttctaaggtgtggggtaaccagagccatatggttttcttgcaaatggagtgttaaaagtgaacagctgggaggtttctccagaaaagatttggtggattggattcttaatcatccttttctctaggggtgaaggatgaagataaatgggaatttacggtctttgcatccatgatcttataaggtttggtactataggaaccttcattaccactcgagaagcaaagtgaacacatggacaattataaaagaagtcaattaagctgctaaagagtctctaaatgtgaaaatggcgaaggaggaggagaggtttataccacaggcgaccgaacagttgtttattagggactctgcgtacaaggttgaagttgacgaagcttataaggacgttataggtgcagtaggagtgatgggaagggtaactgatggttcggtcttttcctattctgtcgtaagaagaaggtggtgtcagccctggaggcgaagattctagcttggaagcgctacagctgctccagattgggtcggcaaacattgtttcagattgccaggagctggtgcacggaatcaatagctcgagaaacctggattggagagtggcgggtgctttctagtctatgctcaacgaacttaaccaagggcagggaaaggctttgtggaccaagagagagaataaaaggatgctgaccggttggctaaatggtgtttgggttctagctgtaatggttttgtgaacagttgggaagttgatccccttgtgatcaacatttgatactttgtttctgttttaatgaagtacttttcttctgaacaaaaaaaaaaagtaataaaataaaataaaataatacatcataaaagaaataaacaaaataatcaagtattacaaattcaacaaaaacaaaataaacacccattattaatataactaatatatatttaatatttttttattattataacaaatattgataatttttttaatatatattaaa

SEQ ID NO: 243768 - DNA, 1727 bp, Cannabis indica
acataaaatatattaccgacttgtatttaagcgtccatacacctatccacaaaacttagcatatgatcaagaacgttcttaatagaagtacgacctctgtaccacattcactaagtaccgctactgtactagtattggtaggattgaaccgtaccccgaacacttctgagtgttgtaccacatgcactgcgtacttatccgtactggtgttacgtactagtgttggtaacaccaaatcatactctttgatcatcatatattgtaccaatacactcagtaccgctaccgcactactgttaaaaaaattaaattaatcttgatcgatctttgtaaataataataataataataataataataataataataataataataataataaaataattaggcaagaaaaatctttatctttctatatctcccataactatgttttactaaaaatccccaacaaaaatttcaactttcacggattcatatttcctcacaatgccgccaactttaaattattattcatctacttcttaaatttatgtcataatttttgaaccctctctaggttttttatttataattcaataatgcaggtcttaatatattctctttttataggttgtccactagacaaacataatcatttataaatgaaagctgtgtttgaccaaaaactacaagaaagtctagaaagtatttgactaaaagaaaaatatcataattatgagaaaatatagtttttaatattatcattaatatagttggtttcaactcaaaacacaaatcaaattttagagtcttggcaattaggttaaggtaagctaaattctaccaaacaaaagcttctctccatctaacatttatgatccaatggattaggttttgattgttctctttttgggtaaagacttcacctgaccacttgatcccctccacatgacaatccatgaagataagattgattattatatgattggatcattttgaaaggaaaaaaaaatataattaattatatcattggatgttatgttttataattttaatttgcataaagattaggatgtttttattattgtatataataatatctcttccggtaggactgttgtcccacattgagaacttaagagtttaatattgtattatattatttccattaaaaaaaaaacaacatagaaaataaaagataaatactaaaaaagcatcaatgatgcttagcacttgtgaagtaatatttttctaagagagacatttttaatttttagattttttttttctatctttctttcttttttcatttttcgttttttttttttttgaaaaaagaagaacttatcattaaccgttaacaaacatcctcaccaatatggtcagccatacagtgatcaatatcataaaaaaaaatgagaactttgtatactatgctttgcctatgaatgggctactttattttcatcagaaacaaaacaacataaaccaatttaataaaaagacataaaaagttatatatccttaacaataataacattaacatctacagaattattacacctaccattaggacaattactctccaccacatgaatctaaatttctctcgatggcaccattgaagagcaactcgaatcaccataaatttttttgttaaaggtataataaaataaaagtaaaataaatctcattaataaaaaaaagttctagattttctttaattgccgtatttctaaccc

SEQ ID NO: 243769 - DNA, 1346 bp, Cannabis indica
gaattgaaaaaaaaatttagtgttgaaatagtagatttttggtgtgaatttaacatcaaatttaggtttctccattggagatgtcctaataatgttaggacctctgatatgatttataatttctccatataaggacagataatcttaaagtgtcattgtgaccatattgacaaatcacaaatgcaatgcatgtttccaatatattgctttgaaattgtatataaggacacaagagttggtggattttgttactattaagtagagtcaaagaaaaggactgcctccattattaatccgcgtcctcttttgttaactttgttattcaaaaaacaaaaaatacttaatgctttgttttctgaaagatatttctgtttactttaccttatttcaggcatatggaagaggagagattattattcaatattaaatttctagataggtactaataatatcttgattggaaaaacaaccaaaatatcttatatacaagaggccacgtgttgttcgctggaatcccccaacttcaaaggaaagtaagttccaattatatttttctcttccatgatcatcatggagtttgatatttttgtttctacttctttcctatattaaaaaatccgttgaaacttatcttattgcaagtctacttctctttatgttaaaaaaaatagcattactaatatactattaaataatacagtaacataggtcattttgtttattatatcgttttatcattagtttattaaaaaacaatgtttggaataactataaaataaatatgtcacatcaataagataattttgtatttcacttaagaaagtaaaagcacaaatgttatatccacaatatatatatcacttgcgagacgaaaataaaattcttatttatttatttttaccatggatatgtaaaggactctcttagaggatatgaagagaaataagatcaccatggtagctaagttgagaattgatcatgatgaatacatcttgcttcgaaaggaagtctttcattgtgtacgagtcgtatgactaattaatatgaaggctttttaagagcacaactctaatcaaagctaatgagaaacattccctattcaattaattataatataacgcgtgaagttaaattaatatattataaaaattgtaaattgtattagagtaagtctcacaaattactaatatattgaaataaattgtgatatataagatgaataggctactttttcccttgccaattggttttgagatagaacctcattcatcatcttatccccaattttaaacatagtatcagagccacttgtgatccgttgtgagcccaaagtgccaccggtccaa

SEQ ID NO: 243770 - DNA, 1673 bp, Cannabis indica
ttgttcatcatttgcacagaaggtttctcagcattactgaaacattatgagcagagacaacaattaagaggcattcaaattgctcgtggggctcctacagtatctcacatgttttttgcagatgacagctatatcttctgcagagcaaatgagagagaagcttccaatgtgcaaacgttactgaatgtgtttgagcaagcttcgggacaaaagataaatgcagaaaagtcatcaattttctttagccgaaacactgaagttcatgtaagagacaccatttgtggggatatgggcatacacgaggctgatgatcatggtacttatttaggccttcctaatataataggcaggaagaagtctgctatcctgggtttcttgaaggagaaagtgcaaaaacgtatccagtcatgggatgggaaactcttgtccaaggcagggaaagaaatactcctgaagaccattgtccaagcactccctaactatgctatgagcgtcttcctgcttccaattgaaactagcagagagatggaacgtgccatgtgcaaatactggtggagttcttcataccaaaaaggataagaatattcattggatgagttgggaacgcatgtgcaagcctaaatcacaaggagggttgggctttcgaaatctttatgatttcaatgtggctcttctaggaaaacaagggtggaggttaattgtacaacctcattctcttgttagcagagtcttcaaagctaaatactacccaaatggcacctttctttcagctgagctaggcggcagtccaagcttcgtgtggagaagcatcatggaagctcaacttctactcaaaaaaggggctgcaattcgtgtagggtctggtgcttcagtgaatatactgaatgacccttggttaccagacaattcagacccttttgtgcacacagtaagtgaatctctcattgataaaaaggtttatcaacttatgtccatagaccaagatcaatgggacatggatattctaaatgacatcttcaatgagagagatattaacttaattgttagcatccctatccaagtcacagagccggacatttggtattggaagagagaaaatttgggacactactctgtaaagagtgcttatgctatcattcaagaagagaagcaacaatcggcaactcctgttcttacaggttactggcgtaagtgttggaacttaaaagttcccccaaaggtgaagaactttctgtggcaagcctctacaagctgtcttcccacgaaaacgcagttacaaacgaaacatgtggctgtcaatgccttgtgtcccttttgcaatgttgaaaatgaaacaatcagccatattcttgtcacatgttctttctccaaagcttgctggacagagctagatcctgccataattactgttgtggtagacgattttccaaactggctgaatctgatttttgagaattggagtggacgaagtaggcagctggtagtcatgttatgctgggcactttggaagtgcagaaacgatctggtatggaatcaaaaaagtgttgaagtcaaggacgttgtaatgttggctcaaactgttcttaatcaatggctatatgctcaagataaaaactttgatccatctttaggattaatatatcccgaagacggtaatgagcattggacccccc

SEQ ID NO: 243771 - DNA, 2122 bp, Cannabis indica
ctaagcatagaaaatcaaatttccctatatatatgtatgatctaacaatatagtagccttatttgatatcttttatatgggccaaaatcctacctcttctttatattattattattattattattattattattattattattattattattatgagttgggtcaatattactttagatttatattttttaaaatagtataaatagaattttaaattaattttttgttatttaataataatccaacctaaaagtattacgataaaactaattaaattatctgcatctgttagtgttgtcttcaagttggttatattaaaaaaatattgtcgaaaattaagttaaaaatacaagatttattttgtcatttaacaaaacagagaatccaatctgtaacttttacaaaacacaaagtctaaaatgatacttttagattttgaaattgacatcctacgatccaatccaattaaaattcaacttttaatatacaatccaatctaattgtaaattgatatctaatttttaataatttgattggattagatcaattcaattagatgttacccacccctagatcaaagccatcaaaattatggtgcaaaaatcctgcagtgaatactaggtctatatcattaattatgcttaaaatttataaatttattaattatccttatagttacttttcaagtcaatgcaaaatgttagtgtatttgggcattcagatgtcttaaataacaaaaggtaaacaaaaatacagatccttgaaactaaattacatttgtataccctcgagctctctgcagacatactgtatctataaattaaattaagaaatgaaagcacaagaatctattttctagcttagcaactattatacatagccccttctcaaaaaatgagtgattataaaatgaaccacaatccgataaaatcagtaaaatgggactaaattacagaggtggagatggcattttataattcaagggtcaatagccatgggagtaatgcgcctcttggcagacttattattcacaatgggagtactagttgaggaggctggtggagtttgtttcacttcagtcttttccccttctgatttcgtagtgtcgttcactgcaacagaattatcgtttggagttgcttcaattgccatgtcttctgccttctgaataggactttggctatcatctgtcattttgtttggttctagatcagaaggaaacaaaatgttaaagggaaaaacaaaagatatgatgggctaatggaaagtgaggacagattcaatgggtgagcaaacctggtaagataggagatcctagttcatcattttcaaattctactaaagtgcagtacccatcttgagatgacagcgctaaataacgagcatctgatgaccttcaaagaccaatatattcagcttttattgaaagaaaaaaaaaacagaagctaaataatcattgtaactaatactgatgttcttaccaagcaatatcggttatagcagcatagtgaagaccggccagtactgcaattggagaattactctctgtgtcgtaaacatacaaggaattcaaagtggccaccgcaaaaatgagacgataagggaggttaaaaagtccacctgccaaattcaccaaaaggatgttcaagtaactacatttacaagtcagctaactctatgggccgtgttagaaaaataacaatgaaaaaatatgaatacatggatttgatcctcggaggatgaaacgtaaagggcagaagcgaactgctactacaggtttgctggcaccaggaagctgtagagctggtctgcatattgcaagagcataaagtttatgaaagtgaaccaaagaacaaaatatttcccaatgaaaggttttttttcccttttttttcttttttttttttgtaacaaagtgatgatataagatgattttatacattgtattaacagacacaaatttgaaatcgttattttgataattagataaatactactatggtgtgattaaatctatcaaaaagaaacttgaaattgttaaacaaaaaaatatttagatacaaatactttaatgctgaaaaaatgagagttttctcttaccttgtaagatctttttggtgaa

SEQ ID NO: 243772 - DNA, 2386 bp, Cannabis indica
tggagtttatccatacaatttttgtcccacctgaaaacaaaaaattattaattaattttataatatgggtaaaatcagttaagggaagatatatgtacgccctggttggcaagattttcaaaagctttttttagatttttgaagcttcaaaaacatttctgctactagttaggtaattcagtgaattttaacttttaactctaaaaaactatttaatagaaatttgttttaatagctatttcaagaagagcttcgtaaaaaactaaaaggcagaaagcaaaaaatcaaccaaacataactatatatacaatatgttgaaatcaaacctatcaattgcttcaataaggagcttatgttcttcaaatataccatatgaatcataaatatcatcagcgattgaggaaagtgctatgatcttcactaaaatatttcttgcaaaagagtattggggttcataatagactcctaatatccaaatgtacagttccacaatcctatttcttgcaaatggaaagttgtgtgcactgtctaattccttccaccacctaataattataatatattaattacatatgcaaagagagattagagatgatataaatatcaaaagagtattggggttcacataaacaccaacattatttatttataccttgagatttcactaagctcctttttgtgcatggattgtaatagattgaaatctaactttgcaagttgtagcaatactttgttatgtgaggcatctttttcatatattgaaatgaaataccttgcatggagattcactagggtctttcttaagggcctctctagggctcgagatatttcctttgataatggatcatcattggggtgttcttttttattattttccaaaaattcagttaggtgtttggtagtgaaagaaagggcttcatctagtaaattttctccaacacaactcaaatgtgaggcctcatataagctaagcaaaccaacggtgtcactcgccaaacattctttaaagttgccattctcatctttgaacttgtcaaatatatctgcatgcatgcatgcatacgtttttactaattaaatcaacactatccaaataatatatacgtgcataatacatcaaaagatgggtcatataattaacataataacaagagggtgaaggtatatgttagtttcagttcatcttaatcacttgcaacatgcccctagcttattggatttcaatactttcactcagattgcctacatgtcaagacttagacatcttggattagttagttatgacagttaattagctgtcaaagtctgttatgactgttatgcctagctgtcatatctagagctcacatataaaccaaccatttaggtaattgttagaggttggttagagcttgttggtgagcagagagaaaagaatggagtgagagaattgtggtgagttcttgtgtttgagagagcttgagagaaaaagaattctctgagttcggtggctacattgttgcagtagaaattgccatttccaaggctttctcttaattagtttataattcatctgagaattacaaactaagagtctatgatccattcatccaaagcattctcagatgaatggatcatatagactctggatgaatggtcgatttaacttcaagaaaagaaataaccatcaagaatgaatggatcatagactctggattcacctttcacatgacgaacaataagaattggatgagaaacatgaaagttcagaagaatggtaaagttattgttggaaatggtcagacctgtgctatagcaggaataagaaatgttcaatttagattgaatgatggcactattagagaaatcaaagatatcaggtatgttccaacccttgctagaaatttgatttcaccaagccagtttgatgatgcaggttatgaattcaagtactgcaatggaatattgaaaatatgcaaaagagccttggttatgttgaaaggagaaaagaaaggagggatgtactatttgaaaggagaagttgtgactggagaggcatctattgcatctgggacaacagaagacatggttgtgttatggcatactaggcttggacacattagtgagaaaggtttgcatgttctcaacaaaaaaaatgcatttgctaaagataaaattgactctctaccttttctgtgaacattgcatatttggtaggcagaggttagttttggcaaaggcattcataattcaaaacaagttcaagaatatttgcatgcacacttgtggggacctgagaaggttcaaacttttggtggaagctctcattttctatcagttgtagatgattactctaggaaagttttggtgcatgttttgaaacataagaatgatgcttttaacgtct

SEQ ID NO: 243773 - DNA, 3044 bp, Cannabis indica
tttatctggtagtggtactactatgatatatttagatagggaaaagaagttctaatcaaaccaaatatgttcatgtaaaactaacacgtctatgaaagacacaaatattgtttaactagtatttatttaaaattgcagctactctcacacccattcatcatcaagtacaaagacacccaagtagacttggcagaatttgtaaaaagcatgtttgatccaacacaaaagatgaaggacttggcagatgtaagaacagcatgcagcacacttttaaccacttaatattactgagaggatgagataacttgtatttactaagctcagaaaatgttaatctaacttgttctttgtttgagcagatgctgacaatacattattatcaactctttgatggacccgatgacctctggcaacattcaaagactttattcaacgacgactcaattttcaggtactgaacagtgcaatgataactttccttcctatgcttttcatgaatgaaattgtatttgcgagttttgtcaatgtcaagagaggattccgtataagttaataacatggctttcctatgtcaagtccaattcactccaatgaagttcttgtctttaaaatacatgttcttgtaaaattaatgaagtaaaatatttcattttaaatttctgaaagcatattattttcacttttcataagctttaagattaatatcttcttgaacatatctcttttttagtttctccggaaagcaatcagttggtggaaatgaaatttttgcgactctatcaagcataagaagtacattagccggtgactggccttctgaaagacttatacatgttgtggaaaaacttcaatgtcgtgctcatggtcaagatggagttgcaataagagtatcaggaaccttcattattgggaatcagttccttatatgtggagatggcttacaaccagaagggttgcccaactttaaagatctatctatcgatctttctagtaggagaatgggcacatttcgtgagcagttcattatggaaccaagtagtgttatcggccgctacttcatatcaaaacaagagctatatattatgcagtgaaaggctgaaatagattctgatgaatcttaactaactaaacaaacttcgcttggtgcatttgcctaattctcttcatttcaaagtctcacaatcacaaaacaccaggttttgattttttttctcttctttattttttctttgccaactctcttactttatttgtaattcctttcatttatcttattttattttttcataatgtgagtttcttcctcttcaggaaataccaaccggacaggcaatttgtttcagccaatcagtgatatttgtacataaccacccgccaatttactcagtacgcacctctcaagttgtaaacgtgttgagaacatgatatttattcctttttggctaaaagaatgtaatcataatttataaccaattgactagtaatcctaaatgtggcacaacttgaaatgttacacttttagagctcgtttaggacgccgtattaaattatattgtattatattatattgaattgtattttatacaatatttttatgaaaaattgttgggattaaactcacttaatctatatcaagtcagtagtttcatcatgacactcactaattgaaacagtttaagttgttagttataacagttggctttgacaccaatttgaatagaacttcaccaatacctatatatagggtctgtctcaactctctcagcaatctttaatgctcatacttcaaatttcagagccaaatttagggagagattgtctatgatcattgtgtgcgtgtgtgaagggatgtaatgggagtatcacttttgaagtaattcccctcactgtgagatatattttgtaattgttcactatgttgatttgtattcttggacatattcaaattcaattatgtactactgactattcttattaataaagattcatgattcattcatttttgagctaagttttattcttgtccagttttttaattaagtttagtttaattattgttattagttttagttccattatgtgttcttgaacactgttattgttgtaatagcgtggttttgagggtgatctttcaccacaaatggtatcaaggctcaggatttagagttcaagaatcacactcaactaatcaagattcatcttcaacattttaagaattaaactcgaacttttcaaagctaaattatagcaatcaagaatctggtttgaatggctacagcaagatctgaggtgaacaagttcacaagttccaatgattaaagcctatggagaattaaaatgaatgcacttctggttcatcaagggatctatgaggctcttgatgttaaagccatgggatcgaagacaggaagaagagaattgagattgaagccaaggcacacaatcccattctcctaagtcttggtgatgaggttttgagagaagttttagatgaggatatggcattgggactctagaacaagctggcttcaatctatatgaagaaatctcttgcaaacaagttgtatctcaagaagaaattgtacacacttcgaatggatgagtcaagaaattgagaaagcatctacatgattataacagaatcattcttgatctaaataatcttaggatgaaatttgattatgaagaccaagttatattaatcttgttgagttcacttcccaagatgtatgaatactttgttgatataatcttgtatggcaaagaaactctgaccatgatagaagttaaggctgcactgaattccaaagaaattcagataaagggagatgagaaaggagagaccaacggggaaggattactcattgtcagtggtaaaattcctaaaagagaattcaagggaaaacagaatttgaatggctgcaaaggtaacttatcaagatccacttcaaggtactccaaaggaggacatagccctaatggagttgtaggaaaacaatgttactattgcaagaaaaaaggtcatttcaaagatgagtgtttgg

SEQ ID NO: 243774 - DNA, 2339 bp, Cannabis indica
taatgtaaatagatggtagtgttctatatataagaagatagggagtagtaatagaaatagaaacaattatatatatatatatatatatatatacatgcagtaatattggtactaggtaaccttctactgaaagtttagctgaataaatgaaagaagagagcaagagaacagaacactgatctcatcacttacctgcactaatggtatcaaacatattaaggtctctaggcttttgaagtttgtaaatcacttttcagtacaattcattaggttgtcttatctaatccaagtgaaacgtgaacttaaaaagactacaaggttacatgtgtcaatttatctattacaggtcctaggcatgaagaagggagattcactcaccctgacataatagccgcaatgctgtcaatgactatcaacttcaccggccgctgaagaagtgaaagtttgatttgttgcaaactggtgataaatcagacaaatataatcagctagaaatttctgacaaccgtgacacaaaaaaaaaataaaaaacatacgacctacactttcaccttcactactcaatagtgccatgaaaatcttaagccatgaattggacagttaaatttaattcaccagttcaaatcaagctctggtttactttagatcctacctctcagtaaatttagaaagtgtagttggccgcaaaactaggatcctacctgccatctgcattgtagaaaacaaccccttagtaaatttcgagccaacagttcgaagtacactcataaagatactaattctgcagaccagacctcctgcaccactcctttcatgttaaatatgtctgggaaactttggactccaatttctatcatcctgagcaaagaatcaaaattaaaaaattctgagagaaaaccatcttcactgatatgattattgtgttttctaaatacctttttgaactaaatttggattcaacatcgatgtagataacatggccattcaaacctccataagctgtcggcaatgaagccaataacgagagcttcatacacaactgcaattcgcaacataatcaaaataaatggtgattaagatcttcattcaaacgtgcatgatatcaacacctaggccctagctcatcataaaaaccagaggaaaattcctaatacgaaaatctcatctacatcaaactgatgaataaggttctagtaaaattggttagtaatcataatcatcctttttttagaatcaattttcatatataagatcaaaggaaacaaagtcttgtcaagcaacaaaacaactatgcagaatccgaatgtgcaatggataaaaagcttcattcttcagttcaattactcaaaattatattttttacgaatcatatgcatcaaaagcatgttagattttttatgaaacaagatataatattgcatataatttattgagaaagacatacctaatcattctatagaattaattgagaaaaaagagacattagtagtgtaatactaacatattaagtcttactccctatctctaatcaacaatagttaaaaggagggggacctagcaacaaaacatactaggtttcctcgtcaaaagcttcagttaattagaaaaatccacacacttcaacgactaaaacagcccttaattatttatctattcatagtttcaataaaaccattaaaaaagccaaaataaaagtcttacaaaacattgccaaaccaacagaatcataaaatgagcatagcccaattagactaaaatgaaatcagaatcaatacttgtgttttgccaattccagggggaccaacaagctcagtaagaacaccgaatggtattccaccacataaggcttcatctaaccatttcagacctgttggaagatgaccaccatgatcctccttatgaaccgtttgctccatcaaattcagtgcctacgaaaacacaatcaagcaatgaaacccacaaattacagaaagctaaaaaaaaaaagaagattgtgtgaataaaatagctaacagtttggtaaggagggcaagcgatttcgctaatgcgggatagtgcggatgagacctccgccattcccacatccaacaactgcatcaactcgaattcggttagggatagggcttcctgaaattaaactcatcaccataataaatatgtgaatattgaattcgaaccacaaattgggttgaactatttttcactttggtttaattcaattgactattgagttgtaaaactgaaaaagaaaacagtttcaatgggatttcggaggtggaagagcgatgatgttttacgagcatggtgagaatgacagaagaagaagaagaaggggttct

SEQ ID NO: 243775 - DNA, 1411 bp, Cannabis indica
tcttcttgtgtctctccaatttcagaaacattctccccagcccccatcgtgcctgaggcattttgtttgttcattgcaggtccaatctgttgtgtagtggcgtgactggcagcttttttagcagcatagagatcagccgcctcttgcagttcttcgattgaaacaacttttgtattgttgccaaaaggggcaatttccccaatacctgggaggtagaccagtggcatctgggtaataaccaatcctggttgggtgtcgccggcgtctgaatcctcctccgtgactatccgttttttccctgggagtttttgacggcattctctagcttcagcagagttcccgttttcaatcgctcgatgtaccttcagcaagttgcgggttgtaggatcgttgcacaactgtttttgcaggacccaatcttggaaccattttgcaagaggagaggagaaagtggatttctcaggtgcttcatttttcaaccagaccccaaacattggaaagaagtttccagccgagtctttgattaccgtgggcgatttaaaacaagtgctctgatcatgagtgagtattccacatttaaaacacaacttcggtagtttttcgtatttatattgaatccataggtcgggtagcctttgtcttcggagataaaatcctgaaaagatgggcttgttcaggtcaatggtggccttgaaacgtagggagctcattcccacagcgtcctcgataccaggaggaagttcaaaaaactggtgaggctttagaagccagctcctttaggttggatagattccagtagaagggaggaatgcggtcaatatgtacccaaatagtagttttatcgaacctaacttccatgggggatagccaagccggccatggcattatgacaattaacgcaccacacacaaaccagggcctccttgctaaaacattcacagcatcctctcttctagcaaaagtaaactgtataattccttcctctaattccttccacttccagcccttaatagcattccatgaaagtttcagggagccttggattgctgctttgccaaatctgtgacggctgatgatctttcccaaaagcacttgattagcttcctgtggctcatccacctctcctgggtttagagcaaacgttatgtcattgtgtgagatttgtactgaatcttcaaacagattgcagacacttgctgcatccatcctgatccggtgggaattggtgaatattgttgctgaagaaagaactaatggcgtaaaatcgttgtatatgtctggaaccgaaatagatagagcaggcctctattatgcttccatgaagctaactcctagagagttttccaagtgagtctataaaaaccttttcaaccaaacattgttagttgtttccatgctgcatccatccttc

SEQ ID NO: 243776 - DNA, 1541 bp, Cannabis indica
tttaaaaaaacaataaataaataggtttggtaaaatcgtaattacttcccaaaaaaagacctttctcataaacgcgttactttaaaaccaccttctctcatcttcatcttcctcctcattaacccattatctctttctctctcttaatttttttttattttagagagagaaagtccgaacaattctcttccaatctccctcactttccttctttctttctctccccaaacaccctccaaagccaaaattctagggagagaggaatggaaagcataataatgacaacaacgatgaagaagaacaaaaaatttgggcttcttctttgcgcagatgatacagactacgttaagaaaatgtacggagggtattatggggttttcgtaagaatgctgaaggaagaaggggagacttgggatatgtatagggtgacacgtggcgagtatccagacgaagatgaattggagtcgtacgatgggtttgtgattagcggtagcagaaaagatgcccacagtaacgaaccgtggatctccaggcttttattatttctcaagaaactcgattccatgaagaaaaaagttctgggcatttgctttggccaccaggttcgtacattaaatataaatatatataatattaattattaagatttaatttttatatactccaattttttttcttttactaaaaatgtaacagaattttctcgaaacataacaaacaaaaaatatttatacgaatgtggttgtttttggaagtagtgtttttagtttgtggggactgagggtatcatggtaattttcagtatattcagaattattggtccacctaattgattattacttacttttttaaaattttaaaaaataactaatttttaaaatgctgtcactcgggtcacgcgtgtgagtgaaaatccgaactttttttcggtgtggagtatattgtccgtacgattgtgggacctggacggtccagattgagttaaatgtacaaaaagagtatattctgttgtgttatctcagtggatatccagtcgcgagctttttcgagtgggttacactcgcttatctaagtgagtcatcaggcatgatctagagatgtagggtgggaccctttttgtaactaattaaataattaatttgtacaaatggtctgttgtttggtgagccagttggtgcacgtggttcagcatgtgacagctaaggaataataataaataaataatacatcactcacgtaaaaaatgctttaatgtgtatattaactatatttatattgattgagacttatacagaaaatgaaaaaggcatgcttcgttaaaactggtactaagtctaatctggatataataataggaatgagaatcggaatagtattaagaatgaaatggagtaaaatttgaaatagataaaaaaaattgagtaataatttttttcttgttatattggaaatgagatttttttttttttttaaattagtaatagtccatttgggataattttacaaatttcacaaaaaataacaaaaaaaaaaaaataata

SEQ ID NO: 243777 - DNA, 3615 bp, Cannabis indica
aaaaagccacattaagcttttatttaagtaaaaaagtaagtgtattttaaataacaaatatttatagtttggttaattagagtgtatggcccatatattctttgtattagtaatgatattctatcagtttgaatcacaataatgatatttaatttttcattttaaaaataaaagtgaaactattgagatttgaacttgtgaactcttatactctaagaagcctttatccctacaacaacttactacattaattgttaatttaccataaatatatttgtatagaaacccaaaaattcactaagacttaggctccaagtaattgagaaaggccctaaacttttaaggtgaggtgaccgccctaactaggctcaacatagcttcgcccctgagtaaacagacacttgttcataatgtgggctctcctgagaaattggcaacataaagtgactaatgtccaatgttcgatagtgaattgatcaagctcgattatatggcttcttaagcatggtacttcaattcattgaattgcaaatttgatgcataggtatttgcaatgcaccatttcatgagtttttatcctatcatagattcacatgaagtagtgtagtagttaataagtataccttatctagagttgccttctcaaggaagcgcgaaaccagcctccaaacgcttacaaagaaccaaggcatgtttaaaaggaagcactttgccagacgttcggggtagtaagactgcaggttaagtaggtacacaaatggttacaattatttgcatcatagttaaccacaatatagaaatggtgaactttaatctaaactgaaccaaaaccttgataatcaggaattcaattgcaaagaaaggaaaaaaaaaacgaccatgaaagatgaaaccatcttcaacaaaagaataaattagttcaaaattaaattgttttagatatgaaaggcatgaaaattcactcaatattggttaatcctacaattgcttcaacaaaattcatgaggcttttcaactatgtgacaaaatctttgagtgacacgacggaaaattctgagggtgtgaattaaagccaggcaagcattctctggttcaaagtagtttgaaatcgagctcaagttgttgggtctgtgtgtggtagaattctcgggttcaaagtagtttaacaaataagtaactaataaccgttttgtttcttcagttttgtgccatgcatgttcttatccaacaaatgcctacatacaactctgttgaattcaaaatataagagagttcacctgtagaaactgaaaacctgtgatcagtgcacgcgcatctatgttcttgtatgagatgtttttcagatcaagaacgccgatcaacttttcattcccgatctctcttcctttaaaagaactgaagcagaatgaacaaccaaatcaaacaataatccaattcttaattgtttttgccttattttagtaatgggatcgaaatactccaaaaactctctttcactactatgttctgtcctatgcaactctttctactataaaacacaatttcgcaaaattgtgacccttaacaatttccataatttatatacatatttcaaaagttttgacagaaaacaaaattagcaaagtagctccttaagctaagaatgtcattagccccatcactgaaaaaaaaccaagtactacctggcaattgttttgtcaaggatgtggaccacaaattctgcatgggaaacaaaggaaatttagttgttaatcgatgatgtaaaagagatgtttgttatcaattcaagtacatttaattcgagacagaaagcaacaatgaatgcttgctgttctgctcatgtttttcggtggtggccggtgctataaagatcatctttaggaccaccactagagaatcaaattagcttttcctttctacttaaaatggaaagaaaaagaaaatgctgctgttgttggaaccttattcctgatctctcaatacaacaagcattaattgtatttaaactatatgtggtttgggcaaagttgctgatataaaaagacaaatgagatcaaatgaactgacctctatgaagattcacttcactcatatttaactgcctttcaataatttattcacagaagttagaatagtccaaatgaaaacaacccaaattctttctaataatgtgaaaggtcatccaatacattattaagaaacaatataatggggtccatatggttaggtgtcagtcacagtaataaagtctgacacctaaatttcctcttctcatgttggtacattcaagaatggtcctactgattagaaatgctaaggtgtctaatactacaagagacataccgctgttgatgcatttcaatatcaggtcccacacattttaaaccgctaatgaattgtaatgctcctaaaaaaatgcattgttgatttgaaacaaaccctcaaaggattatcctgatcaacttaggaaaatggtttgtagagatgtttttagcaataaaagtaataatgaataaaaaaggagaattacttttgaattgaagttggtcttttgaaggaaaatgcttgctccctttaacaatcatcactggaaatcccttatttgataagctctgcaaataaatctttttggctgctaactcatctgatacttcagagtcagaaatgaaaccatttggaacaagagaagccctccatttttgccactgaacaaacatatttgcagctttatctgggtccattgaccttgctattaagaatctcatcagtgttgaatcaccatgcttctgcccaaaaaatataactttcttagtaatcagacaatatgagtagtggggttatgaaaaaggtttgatttttaattacctcagtagaagaaccaagcttctcaaccgatttcctcatctgggtcagtacaatttcttgggtttcctccattagagcaaagttcagagctttttctcaaaaggggttgttaaagaagctgttttttcaaatgggcaagttttgattagtcaaataagacccaatgaaatagagagtacaagtatagacaagtccctagtggaaagagagtgaaagcttcagttgacagaacaagctaaataaaagtcaaaaagagacagagagagtttatgagaaagttgagtaatttagttgatgagattgaaatgtgtgtttttatctgaagaatttaatgggaagtgggaattgtaacagagtaagagttatagacgccactatttcggagaagagaagattataaagaagaaaaaaaagattgtttattgacttaaattggccgatcaagttttttacttaaatattacttacttttgtttttagtatcaacaataaaatttgatttttcaatgtgttaacacacacgtgttaggataatattgcttcataatactattaacgataaaaaaagagaatagtttttaaaaattgtatggtgcatagattcttggttttaacatctattagaaattagttttagaaaattctacaattgcaatttttgaaaaaattcaagaaaaattcaacttttttaaaataaatataaattttttattaatttaccaaatcggtcaaagataagattgtatctcg

SEQ ID NO: 243778 - DNA, 1220 bp, Cannabis indica
tttttttataacaaattaaaatttattcttaaataaagtattcttaaatagaggttctactgtatattacttaattatactgaaattaagtgttatacactattaatattttttaacatttctcaaaaaatgttatttgaccgtagtttttggtcggttgtccttatccaaatgggcgggagctctttgtgaattgactattttaacccgaaaaagttgatcatatagcagagagggagggagctgtacccttgtctgccgagccctgtcccaataaacccttttcctctttcgtcgctggagtttggaccgacactgccctaagctgatagattactaatatggacctgactacacctgattaggattcccaagccaatcccacgcgcgaggactgtgttgtcacttcctacgacctaccattcaaccttgtacaataatttagaaactacttaatacagattacctctctcgacttttacattgaaagtggacttaatatattattcttagttttgaaaatggattattattagtagtttataaagctactcagttttgattttgatttttctttctattaaaataagatattttacaaattaagtcaataatttacaattataaccctggaataagaatgccctttatacaatacaataccacaatagaatttgaaagttactccgtcatgattttgatttttcaagagaaaaggcgttcaagatgttattaagtcggacagtcttgtttcaatttaagctttggacagttctatctgaatgcctttattgtttagtttaatggtgtttgagtgtcaatcacttttactttttcttgtcaatgttaaaatttattttgttaagcgatttgctaataaaattgcatattatcttgctcgtaactattgttttagttcagattataattctgtagaaatgttaactcttgttctcttcaaactcttattaataccgatttgacagttgaatggattgaaacttttcaaaaacaaataaaaaatgtcttaaaaacaacacattaattcaaacatttacaatcataagcaataaattaataagaatgcagggtataatgcaggcccggtcctgggcataggcgggctaggcctgtgcctaggatccacccagtcgaggggcccaaattttttttttcctcttttaaaattatacattttttttaccgattttaaaaaatac

SEQ ID NO: 243779 - DNA, 2736 bp, Cannabis indica
atgtatgacggagacggttgtaaaggctgcaggatcttacctgggaggctttgttgaatcgaacccgaataatttctcgggtgtttggagggattttcttagagtacgagcaactttgtctttggagactccgttaaaatggcatatgaaaaataaaaaaaaaagatagtactgaggtgttttgggctactttcaaatatgaaaagattccaaccttttgttttctctgtggtataatgggccactccgaacagttttgtgaaaaagccttggatatacctctagattctatcatcaaaccgtatgggaaatggatgatagcttcatctcgacgggcaaaccagttgtttggttcaaggtggctccggtcaggtagggcggaggagatgaacgactttggtgctggagtgtttaatgctggaggcgttaacagtgggattgacccacattttgtgccagttaacaatagagggggccgtctttacagagaatgatgcatggaaatatggctcaaattgtgggtaccacaaatcaagcaagacaggagtcaagggggggatatggggtcaacgtggggactgggaatataaatatcatatctccaaacaatcaggagagtgatacgctgactatttctgatttgaagaggagaagagtagagttgggcctaggtgatgggccgaatcaagatgctttgaatggaaatattgggctggttggtgaatagggggattttgagcaattggaggttatggaacatgatcttaatgggccaaaaaatggattgggggtgggtcttgcttcgcaggcccaccaagcattatgagtactataagttggaattatcgtgggcttgggaacccacgggcttctcaattccttgaagacttagtgcttcaaaagaaacccagttatgtttttgtttgtgaaactatatgtaaaaaagatgttattgagagggttagaaattgtttgggcgttgaggcttgttttagtgtggatccttttggtcgaaaaggtgggttggctttgttttggaaagttaaagaggaggcttctctgttgggatattccaataatcacattgatgtggaaatttctcaagaaggaacgacaaaatggaggctaaccggtttgtatggagaacccaatcgttctcttcgtcatcaaacttggacccttattcgcactcttcagaggaattcccaacttccttggtgcgttattggggatattaataacattgggagtcttgctgaatagaaaggggggagaccttatccaaattctttgattaatgaatttcaggagatgctttgtcaatgtggcttggtggatatggatcttactggttaccccttcacttgggagagaagtcgaggtacaaggcgttgggtggagagtcgtttggataaagccttagtgtcttctcaatggctcaagacttttaatgatgctacacttactacttgtgagttttcttcctccgatcacacacctattcatttggagcctactgccttccaacgaagtcctgggattgcccactttcggtttgaaaattcatggactcatgaacctatgtgttatgagattgtcaatgattgttggagtaacaatcctcttctctctattcaagataaaataaaggtctgtgcttctactcttgctacttgggggaaggagttcacgggtggttttaagagaagaattgtagctagtaaaaggcggatgagtttgttcaaagaaaagtccgatgaacaatctatacggttgttccaagaagctcaagatcaatattttggtgtattggctcagcaggacacattctggaaacaaagggccaaacaattttggctcagggatggagacaaaaatagtaagtattttcatgccatggctagtgctaggaagagaagtaataaaaattcaaagtttatctaattcggatggtgttagttttagttggaatgggggtttggaacaacttattattgattattttgtctctctttacacggccggttcggctgattataaccattttgtgagtggtattgtgccttctgtatccgtagttcaaaatgctaagttacttgctgacttgactgatgaggaaattagaggttctatctttcaaatgcacccggataagtctccgggtcctgatggcatggggccgggtttttttcaaaaacactgggatatagtcgggggtgatgttaaacaattggtgaggaacttctttgatactagaaatcttcctggtggtttaaatgtaactaatcttttcctaatcgcaaaaaagaagaatccttcagttatgggagatctcagaccgattgcactttgcaatgttcactacaagattgtttctaaggtcttgtccaaccgaatgaaagttgttcttaatcatgtagtttctgaaactcaaagagcttttatccctggaagacttatctctgataatatcatggttgtgtttgagataatgcatttttttgaaaagaaagactacgggtaagaaagtttcatggctatcgagttggatatgactaaggcgtatgatcgtgtcgaatagtcttacttgagagctattatgatccaaatggggtttgatattcagtgggttgatatggttcttcattgtgtgtctacggttcagtactcggtggttcatggtgggcatgttatgggtcctatcactcctacccgtggtttaagacagggggatcc

SEQ ID NO: 243780 - DNA, 1443 bp, Cannabis indica
aatctttgaaatttagagaattcctagcaaactttatcctataagaaaaaaatcaagaaataagagtcactcgttgagtatgtagattttgaatacaaaacaatataaaaaatttgttatcatttataaattagaattaataatctagtatattcccatattttgtttagattataaatcaagattcgtaattatcaagcctcattaatgttaactattatgagttaacaaaatctgcaagggtaaacttgctagaaatgtcgcctacaccttgcacatagaagaacgtgttcttccacttctgagagttacaaggagtctaggctacaaacataaagtacattgttgccttacagaaacagtagaagcccctagctttgggaacaggaactacatcatacataaaatgaatttttgctgggtttaggtctcaccaatgttattgcttgtatgagatgtaaagtttgctcaggatcatccaagtgttaggagtcaactataatggggcaaggataaaataacccaagtcctcaacaaagtaggggtttagggggcatgtcactgctcctcataatgtgaagattgtaagccacaaagtcaagaggaggatgatttgctctatcatcattagcagggaagtgacatataacccttcccttgaggcaatacatactaattattctagtaagctcaacctcattcatctctaaaatatttgtatgaatcgcaataaccacacctccatcatctccgtggaagtctattctgagataggataaaaaaatggtttcaactggaatcaaacttggaataacaaattaagagtacaaaagtccacaagaacattaaaaaatgcacttatagaattggggcaagtgttcacctcgaaattcgctatgtatttcaaggaaacaaggagaaaagaaagccaatacacacaaaaatctagcttaagttctagagagaatgtcaaacttctcctctcagagcacatggtcctaacatgacttgacgagacaagcgcaccaagggaccccgagagggttcccttccttctccccgcgctacgccaagggaccctgagggggttcctttccttgtccccacgcttcaccaagggacccaaagaaggttctcttctttcccccgtgccatgccaagggaccttgagggagttcctctcattcttcatgtgtcgcaccaagggaccctgatggggttccccttcttcttctcacaccacgccaaggtaccccgaaggggttcccctccttttccccacgttgtaccaaggcaccttaatggagttcaatttcttatccttgcatcgcgccaagagaccccaatggatgtctcctccatcacctcacatcgagagaccccaaagggcgttgtctctctatctctccctctctaacctaaccctctctctctctctctctc

SEQ ID NO: 243781 - DNA, 1642 bp, Cannabis indica
atacaccatggcagttcactttgacacttaacaaatcaaaatgaatgaaagaagtacagatcaaaacgattatggatatttgagagtttaacaataactttttcaatctaagaatttaaccgcaaattacccttataaaataaaaacaataattttattatcaatttttttattaatttaataaatttaatatgtaaaacaataaaaaaaaatatataaataatttataatttaatgcattaaatatactaataaaataatacaaaatttacatacatactattataacacatgttaaataaactatatttaaacttttgaccacttatttgaatttttattagatatgcttttaattgtatattagttgtaaaaattaaagttaattgcattcagttagtttcttaatatagtgtctctaatttaattaaattcctatttactctctaattttatgtataaataaatatacattcaccattttctaaaaatctcaagttttacctcatgaaaatatcaaatcatattatcacatgggtagggaaaagtagttttcgaatcaaatatgtgatcaaatttgttttaattaaaaaaggaaacaaaaaaaacattgatacaaaatagaaacagaaatttaacagctaaacaagtatacaacaaaacaaaaacaaactgaaaattgaatgccaataatcaaacttaaaaaataaataaaaataaaagagggattgtttaaattatcaaatctagattgaagtgaatttcctcatgtatattcaccgatctatataatgttgcataaaatgataaaaaactctagagattcaatgacaaaaatcatgaatatcatatcatgtaattataagcaacaaagtaacttaataagaagaaaaacttgagcaaaatttaatatatatagaaatcacaagaactcattttggttggtcctcacagcaaatactgacctcaattaccagttacctttgccttttttcttcttcttttctttggtttctgttccggaataatactaaggcacttgttgtcatcgcctgcaattttgttgggatttggaaggcttgtcaatccatcttcacctattgtcacctccagatgttgttctttctcctgtgttcgaaatcattgctggttctccaatattcggattggatgcaggcgctccttttcaagccctgcatctatagatactgctgtttctgtctttggactggatgcagactccttttcgccgacatggataatatcactttgttcacgtccacttttactctttcgtctgcgtttcctagttttaccattatcgatgcctttgctctcagcaccagcaatttcaccaaggcctgcattgatagataatgtttcttctcgtgtcttaggagtggaagcagcctctttctcgcccaaatggataatatcactttcaagttttccatctacagttgcactttcaccacaccctgcatctataaacactgctgtttctgtctttggagtggacgcaggctccttttcgccgacatggatagtatcactttgttcacgtccactttcacgctttcgtcttcgtttcctagttttaccattattgatgcctttgatctcagcaccagcactttcacca

SEQ ID NO: 243782 - DNA, 5210 bp, Cannabis indica
atttatatatcaaacatatgatcttgaaagttaaatgtgaaccaaataatatacaaaatagtaataaaattatttctgaacttttattgattaattaagggatcccattaattaattaagattacattgaaattgaattttatttaggacataaaatctcattaaactccacttgactataaaataattagtacatttcaactaatcctaaattcttgatacgcttctcgaacgcagtctccatcaatgtcttggtgaatggatcagcaaggttgtctttagtgtcaaccttctccaccagcacgtttcctcttgccacataatcctaaatgatgtggtattttgttctctataagttttctcctcttatggcttctagactttttactgttggacattgcaccagtattgtcacaaagtaacactagtggtttttcgtatttagaacaatgccaagctctataaagaaatccctcagccagactgattcctcaatagcctcagtagaagctagtattcggcctccatggtaaagtcagagatagtagattgtttaacgcttctttataccactgctccactcccgagagtgaacaccatcctatatttagatttcttatcgtcaagacaaacctaaaaatctgagtcagtatagcctataggatccaaagcaccacctttatagactaacacatagttcttgattcttttcaagtacttcataatgtgtttaactgtcgtccaatgttcctttcctgggttggactatgttagggtttatgccttaaaagcaagtatttaatggataatatattaaagaatatatgaaatacaaatatattataaataaatatattaatcatagaaatatatatttaataaatatcaaaaaagttcatattcatatagagaaggtatgctcttgtaaggaagtacacaagagaattagatcatacaatatgaataaaatacgtaagtagtgtattaaattatggatctttaatatggaattaccaagtacgatttactaagcactatactttagtggcatgggatttttattcaaataacatatgtggatagccatttagtaaaggtactatgtatatttgattatccatgactagaccgatatgaataaaacattttatcaacgtgttgtttatcaaaaaagagttattcatataacaataataattattagtctatcagtctaaattctgaatattcatgaactcttatttgtattcattaagttctttgattcacacattaaagtttttcggagaagatgattcttacaacttttattttaagacttaataacatgaatgactgggaacatgctgtataataagtggaatccaaatttccaaaaagatcgaatattagtttccttaacatcttaattcttggagtgattacaattgggcccaaatctatgattggaactgtaattaatggtatttaaagaattccatgatatgaatttaaaaagtgatataaattacattgtaatgtagtaaatttttgttgttgacttcctaaaaaagatattattggtgcagcccttaagactatatttggacaaaaaattgctaaaaagcaccgtagtgtctagcaccctcctaaatgtcataaagctattggtgtaattaaatattgggtctcatataatttaagaaaataacttttaatgaatattgctaactaatcataatacgtcacctatagatggtgttggacactactgaggccaatagcttttggatcattatagacctgttcacttgcaggtaaaagccacttaatatatagcgaacagcttattctaactaattctgtacgtatggattcatttctttcatctcacaataaggacaggtgcccttctcttgtatctacattcttatatacacagtcactacactgtacagattagaccaagtaatatacagcagagtcactccttccctacataacaactttcagaaccaaacaaaataaacatgatctttactattctcattctcgttcctatccattttcattccattcaatcaaaagtcaattttcatttatgaacaattatcgaacaactggtcaatgttaaagcctgatcaattaacaataaaaacatgaatatatgctgactgagaaccctttcaataacaaaacatggcaagtttgagcactgcaagcaaatatctcaagattgctaaacttctggttcattagtttttacatgttctgcaacagatataacattccatgtcacatcagcatgagtttcttatttgttgtacaatggttttttgtcaatgttgaacattgaagttgcctttcaagaaaagcatcgaagttgtcacttgtagcatatgctctagaaaactaatcaaattaactaccaaaatctaggaacttggtaatgttgacatccaaagaaaggaaacagacgttgaaaaattacaacaaaggtaccactcgaatctgaagatttgtaaatagtttaaataaataagtatgctttaaaatttaacaaaattcaagcacttacagatgcttgtttcttccctttcttgctcccactaccttctttgcctcctccctttatcattctggaaagaatatctgcttgctttgtgttgccctcctcattaaggttcttaaccaaatcttcacagctactccaactagaaactcctcctttctccattattttgcatagtattgaatatgcattaagtgtctttcctgctgctaaaagagaatctaaaactttatcataacttgaaaaatctacagaatagtccctttcaaggcaaaagtccagcaacttgatagcggcaattgtcttccctttctcacaaagaatagatagaagactgtcaaagtctggctcacagccactatgcataagtaaatcaatccgacccaatgcttcctcaacatgacctctcatgaggagggcttccaaaaccttagcaaccaagtccatgttctctttcacacccttctcaaccatactcttcattaccctactagcagtttgaactctcccatcttcaaatagactctccattactgatctgaataatgatgactctggaagatgcccactttcaatcatgttatccaaagctgttttagcatcagctggttcacctttactcaagtagctcttaatcagcaatctgaaagaatctgcatcactagcaacccctcttctactcataattttcaaaatttcaaaagcagaatcagggttcccttccttggagtggccgtgaattaaattattgaaagcaacagaatccttgacacctgttttcatcaactgcctgaaaaagttttcagctttcccagtctgcccatggttgcatagatactgaatcattggattataagcactagcttctatcactgcagtgctctgtggccttaatataatttctttctcaacaagcttctctaacaacttaactgcccgatcatacacctgcgccttacagaagttttcaattaggatgccataatgaccagactctgtcgggatgctcagccggatcattgccttgagtacatctgcagctgcatctaaatctccagccttgcactggcttgataacaatctcataaagatggagttatccttaggagcaataaacttgtccaccatctccctcaacattgtctgagcttcagacattttctctgcatcacaaagccccggcaataaagttgtgtatgtaacagcattgggcttaataccaaaagacttcatctcctcaaacaatctcagtccatcatcaactctaccaacagagacatacccttttatcatggtagtataacttataaccgtgggagctatgtttcttcccttcatctctgtaaacaaattttctgcctcatccaatagtttgaaccgattatacccgtggatcattgtgttataagtaacaacatctggtgatatacccctattcttcatgtcctcataaaaccgtttagcagtctccaatctcaacgaaagaaagaaaccccaaatcatgatattataagtatgtttagtaggctctattccctcactcaacattgcattaaagtaccttttcgccatcatatatcgtcctctcctcagaataaccttaaacaaagcatcataagacttaatgctcctctcaatacccaactccttcatcttattgaaaattttcacagattcttgaacaatcccagctttaccataaccatcaataagcaaaacaaaaaggtcttcatcccactctacacccttattgggcatgtccaagagaatgcaccgggcatgattaagcttcgaagctcgggttagaatctcaataatcttagaatgggtctcacggtcgtgatcaaacaaaccggcacgctcgacccacctgaagaactgaagcgcgtgctccgagttccgggcaccatgcaacacattccaaacgagggtgggatcgaattgaggaaccaaagaccgaatcgagttttgtaaacgagtagtccattcccggttagccatcattctacatataatatcctctaacttttctgggtttcgacgcttacctcgtggggttctctgattcacgacggtttccgaaccaattggtgatgatgagatttcgggtccagttggagcttctgaagaagtggggtcggcatttgggtctgatactttatcgacgacgcctgtggccgaatcttggttcgagctgaagaggcggaggagacagatcggagaagggtctgatatcctgataagattagggaagagcctcggtcgccattggcagcgcttagataagacgaacgccattggtgttcaggtatggaatcaaagagagttggggagaactgtgaatcggggtttaagagcagtccgctgctctgttgttagggtttaaagttcatttcttttaggagaaaataaaataactcaaaatataaaatttctattttgccccatttttttttaagttgtgtttggttagaatgcttgaatgctttataaaatacttgatgacataaatttatttttgatatttttttttttaacaaaatcggtatctctattaactaatcaaatcgttaataacaatagaacgtacttcagaggaacaatccttcaattgaagcacgcgacctcgagagaaacaagagtctctggctaagcagtg

SEQ ID NO: 243783 - DNA, 2059 bp, Cannabis indica
aagttcatcttttgggttattcacgcaattatgttgatttattaattactactgaaggatatagttcatatcagcaaacatgggtttatggtgaaccaaaccaaactatatgaagagagacttggaatttgttaagatagcttcatgttaaaaggtgtttgccatgataggggatttcaacactatagttagccatggagataaacaaggtggctagccttatttgaattggttggtggaagggtttcaacatgtctttctagattttagtctgatttgtatggaatttacagggtataaatatacttgggagagggataagggtaaagtgtcataggtggatattcagttggatagagcatcagtaaatcttgattggcttacattataacctcttgccaaattatttaacttggaaatctctttttcagatcatacaactaaactgttatagctatattttatattacctacttcatgaatctcaaaatttcggtttgaaaattcttgtattagtaacccaatgtgtgaacaaactatccaaaatattttagatactcatatggatgtattgatacaagataaaattcatttttgttgagaggagcttcgggaatggggtaaaaaaccaatagaaaattcaaagattgtataaagaattataacaagaagttcaagagtttgaaacacaaaattgatgaagaggggatctagttatactaggagcaaaggtagctgttatttgaagtctttcatcaatgggaagtttttaggaaaaaaaagatcaaaaaactttggttgaaagccataaatcaaaacaataagtactttcatgctactgctagtgctcgacgtagaaataatcagtttaatttgttacaaagggaagatagaaattgggtagattggagaaattgtttatctaatattgctcaattactttaataatattttcccagcctcagaatctacctaggaagtgattgtggaattaataaacccttatattacaaacatccagaaccaagtattgattaaatcattgtcgtcagaggaggtaaagtatgcactctttcaaaaaaacatattgataaatcaccaagacttgatggcatgaatctagcctttcatcagaaatattgttggtaaagatatggtttcgagggctcataatgttttcctcacagatgttcttctgaagagacttaatgatactaaagtggtcctaattccaaataataaaaatccaaaaacaatgggagatttacaataaatttttctatgtagtgtgttgtttagagtggtgtctaaggtccttgctaatcggttaaatcatttacttcatggtataattttagagttcaaagtactttcatatcttgccatttgaacacagataacatcatggtctcttttaaagtcttgcattatttgtagaggaagcataaagggaaagagggttatatgactcttaagttggatatgagtaacgcgtatgacagagttgaatgacctttcattttagcaatgttaaggcgcatgggtttttagtagaaacagtttcaaatagtttagcagtgcctttcaatagttttacataagagtatgaggggggggggttgtgttagggcaaattgttctaataagggggttcgacagggtgatccaatttcaccatacttatccttgatttgtgtagaagatttctctaccctaattcagcttatgagatgagaggattgattcatgactgtaaggtgactagggggccctagtgttgtcgagtaaatttcgcaacaccaaaacgtattatttaattgatataaaagagaatttttagggaaatgacaagtgtgagtattcaacctagaatggcgagtactcaactgggaatgcaagaacaaacaacaaggctggaaaatgtaaacgagacagagaattatagtggttcagtcagattaccacctgcttagtccactgtcacaaaggattcgtagtcccaatttcatggtggatcacccctttgtatacaaagtaggtgtccaatcggttacataag

SEQ ID NO: 243784 - DNA, 3894 bp, Cannabis indica
actcaaaagggcaatttagtcaatttaagcattccgattatgtttcgtaataaagtaaacaagataaatcacaactattccatttctaaaaaattttagtaaacaacatattacaaatattgattccgattatttttcatttattccgttacatttctccattaatttattccgattctaattactgtatagtaaacgtgccatcaatgttatctttctttgtccaattgataattattaatgaatattttctgtcacttcttaaaaaacaaataaatttagtcaaaaaaaaagtccaagcattattgcaaatataccaaataaatcttcagaagcattaaaatttaaaactagactaccataaacttagagtagataaagcaaaatactaggaaattatttccatttaaatcagaaatgtttcattagttcttttgattacgaaatcaattagaaatacacataataatcagtacaaaattcaattttataaagacgagataccaacaaattgcacagcttttttttacttcacaatctctgatctaaaacagaggaactacttgtacttttttgacaccaaggattttacaaaacagtaagaaaaattggtgttaaatccatttggtctgtattagtagctaaaatgagaagagtaactcactaactcaacatcagatagaagtaagaattgtcctaccaggcacaatcgattttcacgtctctaaaatgttgttcttgagtcaaaacttcactcttcaatgatttggactaacccgaaattccacatcaacgagttcaaaacattcgatatctagtcaagctccatttcatggcgattttcctcttcggtgccactgctcgaccaaagcttgattgttcggtcatgtgacacggtagcaatgcaatttccatctgccatcaaaagatatattccttttattataaccaactcagctaaatacgaagcaattgaagaagcttgaaagctttttaaacaaaaccaaagataggtaaacaaaaaaatcgaagaaaataaatgaaattatggaaagtatgaagaaatcgttctaagcaataaattacggtttagacaaataaacttacactcctaaccaggataatgaacttacctcctgatacatctaacgaagtaaccttagcttcgtgtccagaaagtgttttcacaggcttaaaatctcgtgctgaccaaatctggaaaatgtggatgcaatatataatagtttagaagaaacaatatatgaaataaaaccacataatttttcaatctttgtaacttagaaaggaaaaggtaccttggctgtcgtatcatatgaggccgttaccagaaagtatccttcttgaggctcgaatttgacctgagaaatgaggttcgagtgggctggaatggtgtacaatgattttttctttcttaaatcccatatgcgacatgtgttatcttctccccctgatgctaaataatagccatttcctgagaaacttaaggcaagaacctgaaatgataagagaagaatgaaaatgagaggccagcgatttagataaactaaatctattatcgtaactattaaaccaagaaaaagaaaaagaaaagtttaagttccgaatctcactggcttaacatggccttcgaaggcaagaatacttcggccagttctgagatcccaaacacgtgcaagggaatccagaccacaagaagctgctaatgatccatcttgattaaaggctagtccgtagacacttctgctgtggccttcttgaagaagcaattccacaccagtatcgacatcccacaatctccacgtcttatcaaagctagttgtgcccaagtactttccagatggatggaaattgatacgtgcaagacggtctagatggccctcaaatgttttcaagagagttccgtccgtgttccacagctttgcagttcgatcagcagaagcagttgctagaatattgtccgttggagaaaatgtgacatcagttagtcgctctgtgtgtccctttaaggtggcaacctttttcacttgaggcatgctccacagcttagcaactccacttaaagcactatttaaaagcaaatggaaataaaaaagatacttttaaagaatgaaattgggaacaccaaacactagtaaattcaaatctcacacccatcaaaccgaaaacttagttaacagttcaactaggaaaaggtttctccgaaatttccatttcaacaagcatctaaaagaaaagacatctatcaacttattaaacaaatagcatttataaccttaaaacacagatttttcatgatcagttccttgaccaagcaacatagcatgttatactagcaaaagacaacagaattagtgaagagttttaatcattttacactatggatgggactaagagttgaccaaacaattaaaataaaattggatggtagttaaaactaattttgttaacaaagtgtatccttaccaggtggcaagtagttttccatcttgtgagaaggagcaaccagaaagtggacggtcatccccaatctcactgcaatcaagagctaaggtccttgcctgatttaaaacccaatccatctctgcatccacgtcctcatcaggatcttctcttctcctccgtgcacgttgaagacgtgaggctgctcttactatagaatactttgcaatatcaattctagcatccaaaagtgctttggatccttcagtgtaaaaagggtactgaagcatttcttcttcagtatcttccgttgcagctgaagctgcagcctcctcttcctcgtgagctttcatcagcttctccagctgcccttcagcatctaactttgccattatcattctcagcctatcccgtctttccatttctctttctccaaaaagtgtaatgggctcgccaagccgacgtagacgtgcacgaacagatgcatcattggtaggaactgcaagggcagaagcacgccgcttcatcatcagttcttgcattgctttttcgtgtcgttctcttatttgtctactctcctccgatatctcatactccagagttgaaccaggagcagagcgggaagggcctgattcatcatctgaatctgagtcactcgttacaacctcaccattttgtggtactgggggcctaataacaggagggcgggctggtaaaggtgctaatgggcgaagaatggagggagctggaaccgtaggaattggagccattgcaggaaccatgggaagaacaactggaggcacaattgggggtgggattcctggtggaataatagggaggactggttgaaatggaatggtatttgcagcagatattagagactgatcatcaagaattggagaagatgattccattggagttggtaaagggttattttcctcttctgctgccatgatatctaaccctgacaattttaacaggccaacaaagttataacaagagcacaaaatgataatgttacacaccaaagtaacaatattaaacataatattgaagaggcaaaaaaaaaacaatgcaacagtcataactctccaattcgtaagattgaaataaataatgcaactactattttactatccaaaaaaaaaattatattgggatgttgtcaaccatctgatttggtgaaccatacttctcaggtacacaatcttgatggaccaataatcaatttaaaatttggaatgaactaaatatatacagagaaacatatagatgactatatatagtttttcattattacaatgctttcagatttgatgaacaagaacaatgaacacaataatgtcgtgtcgaccataagtgaatactacaagtaaattataacactactactaatcaacacataacagagatgtaccaagtgtgcatataatt

SEQ ID NO: 243785 - DNA, 1111 bp, Cannabis indica
ggatgtgatccaatgaacaccccaatgtaactctatagattcagtgaatacgcaggatgcttatgaatgaaacagttccttcctactgttactacaaaaactcataccaatttaattaattggctcttaatcaatcatctttcctttaaatctcaatcctgtcaactaagataatacattcattgatacacctctaaaagcagggccaaataccaggattttgaagaaagaattaacaaaacccactaagcttacaaagaaaacgactacaatttagaccgaaaggcataattatcacatagctaaatgggcatttcagtttcgatacgtacatattgggagcaacggtggccacgtttcgagctccagtctctgaagtgtccattgctgaaagtaaagcagattttgaatccaattacaaaagaaacttcattaaatttaatcaaaatcgtatgtatatattgtttcaaagatttgtcagctacttaagagaggcctttcctgaaaccgagtaaaatattaccttgagggacatcggaaaccaaatcttccgttacttccatagcagagctatctcttttcttcttgtttctatttttcgccattgcgaaagagaaagaggaatttgcgaaccaaaccttctccaactttagaagacaattggattggggctacagtcagaaaccctaagttaatgtgcagcagcgaccaccgtcaacgtcactgggtgtctttgtgttattgtctatttggaccattggatgcatagcccaatggttttgggtcgggcttcgcgagcaatatgagatttaggcatgggccttgatatcttagaataattatcaaaatttatatcctttaccaacttttccaaatttctttcatttaaactgtgacacgctgaatataatttttctacctttttttttattatttcaatattatactgccttggttcaaattgtatatgatgggtttgtggtttactgttgtcaaatttttgtgacagtttatactttttttatttttatttattattttcaaatacaaaaaaagtgttaaatcatttattttatcccactcccccacatatactgttcatcttcttctt

SEQ ID NO: 243786 - DNA, 1919 bp, Cannabis indica
ttttaaaaaaaaaaataaatttatatcatccatatttatgtataagaggtaggttgattttttttgaagttatagagagattgatatcggtaattttaactaattttgaataaatttatattttaagtaaatttaaataactttggccaaaaaaatgtgaattattttagtataataatttaaatctaaatataaatttatgttacagaaatattaatataataatatatataatattctactaaatttagtttaatattctattggccataggttagcataaaatacatataaaaaattaatgaaataaaaagaaaaaataattagttttcaattcatatatcacaactatgaaaataaagcaatcttaaaacagttagttttatgtggattttttttttatatagaatattataaaaatatatataaaaaaactttgagtgtaaatgtgtaaatattttaccaaaaataacttcaattttttataatattagaaaaaaattcaaattaaatgtttttatttaacatatatgaataggaaaggaaggtgaagattacccaaatgtctttagtgtttaataagctttcaatttatgctcttgacctattatttgaatatatcaagaaagatgcatatacctcaaaatatttaaaattatccataataactccaaagaatttgagaaaaacttgaagaattatgtgagcatttttggctgtaaattaatgaatattataccattcatatttgggacaaacccaccaaaaattattaaatttaaggagatcaaatttatccacacatagcaagtgaatcaatacttattaattgatgcacatgcatatgtaaaccaactagtagttttcttcatgagaatattgaatatgaatggatggcatatagctaacgtaaagaaatatctgaatctacatatgaaagctacgttgagtagtgatactgtgatacacatacttgagttgaacaagttatctataaaataaattaaattataaacacaccacacatataattttagaaaaaaatataataataagtagggtcacctatttccacttatagctatacttgaaaaaaatgaataataattaataggatttgttctcttgaatgatatatgaccattaattgtggagttctccatttctctaatctttttttgttttttaatgttgcaaaaattttacatgaactataaaaattattgtaaatatcttcggcctttagttacattctgcttatttttttaaacaatttattgatatagcactaatgtgacgttaatctcatccatctaaaaaatttaggcaaaagataaacattactacaaaatcgtcagttttgtgagtgccataaatatggcccctttagtttataactggtggaaaatgtcttttcgaataatttataattgacacgaaaagtgacacgtgtcaattataaatcgatagcaaagactttgtgacatgcataaatcgacggtaaaaaaaatatatagacctggtccttataaaaaaaatatatctagtatttcaagaaccaaatttcaccacttcaaaaatacccacaaaatttaaatctataaaaatcaccaccaacaaattatatatctgtattttaacgaatcactacaaaatatatctatgtatttatggatacgcaagtatatacgctgtggatattaaattcttttaaccagtcaagtcagtatactcatatctttgctcatcagatgaatctgaagaaagctactgttatttataacagttggatttaataccaacttaaaggggacgtaccatcaactatatataggtgttgctctattctcaaaaggagatttctgatctctaatctccaatgctcatactttagattcagttgagagagagagagagag

SEQ ID NO: 243787 - DNA, 4273 bp, Cannabis indica
agagaagagcacacaaaattaaagatgcaaattaatgagaagatcattacccagaaagttgccactgagatctggtttatgggagaagataacaaaacagctcaaggttccaattgctagtagccaaggggggaagaattcatcaagaaaaaaaggaaaaaaaaaacaaggaagtggaaatgaagggaaatgaagatgagtcctctaaagtagagtaggtggtgagtcagggttgagatttcagctgagggtgcagggatgatgagatctcaaattcatctgttctgaggtaatatgctgctgcagttgagcaattccacggctcgttgatcatgagtgaagtgaaaataggaaatgaatttgctcgactagataatacaatactgaaattcttttcatttggttcttatttagaatcgtgtaccaaatatgatattgtttctagattttgtgtagtatagcagttcatagttagctgagcatttgtttgattattttatatgtgaatgagatctcattagtcattacactaaccagtttttgtagatgatgtcattggtggcgagcttcttattaggaatatacgacttcttaagccaacaaagttaaaaacaatgaaagataactgagtactgatggctttggatatgtttctacaccaatgagtaaagtcttttctatcaaaagaacaaaggaaaaacattgctaaagtaaccaatttgcagctgtaaaagttaagaattgacattttcatttcttcttttttagcctttcttttcacaatcttttgtttaatcaaatgtgcagataggttcaatgataaataaaagcaattcctccagcaattctagaattagactcttcttatgataaagtataaagaaaggggattatagccatgaaatgcaataatcttaatcaactaacactaatggagcctatgaaataagtttctttatatcaagaaagcgaagaacagtctggcctctattaggtgcctattacatctacattatcttactccactcgcccacaacgacgttaggctttatctttccttaccaatcaatgatcattataacaacatgtgtcgtttacctttgttagtaccaccaacttaatatgaatatcaagttttgttaataaaatattactctattaacacatgaacaacaccttgttcttccagctttagtattttggtaattattttttgaagattctcaccagctgtgtatatatctttgtcggattttctttgcaattggatgaggcaacagaataagcatgaaacaagtgtacttatagtagagaagatctttttctgttactctacaaagcaaaagtggaaaattctgattgcaataagcttccattcagttcatcttatcatctacatccaataaagctactcctatcaaagcctaagacgtggtttgttcctaaaccacctacaatcttccctttaaacacattaaaatatatttatatgtcaatggttggaccccatcattacactctcagttttaatctcacctaatcaatatgtagattaaaaaattctctatttctaacaatccaaactactatatatatagtaaagaaaaagatccattctttttggggtaatctttgcgtataacaatagcaagtcataagattaacaagtacaattttaaagctggaatgtgaatttgtaccaaaacaaaacagagtttaattttcagtgtgattcctttattttatttaagctatcttcagtagtcctaatcatctaaagccttttttggaccactttaagcagctttacatattcaccagcagattttgaaaagcatgacacctaatactatactactactactaccctaatagaggaaattattgaaggtccacttaagcacaccatgatcactatctcgattaaccacacaaaggtttctctaattaccttattaatttatcttaactaattctctgaaacaataccatatattaaatataattaacaattaaacatatgttgtaaaacacaagacacaatcatgcttaacgtgacccacttgctaattctgcataaatgattaacacaatttcccttcacagcttcaaattaagtgtcctcaagaggaagataaaaatgagagcctcctctctaaggcaacacaagaaaaggcaagatcagcttgagcagatcaaatcaggaggatgcagcagagctttgtgttgtagtagttgcaggcttagtgtttcatcttctgaggaaactgagagcaccagttctgatcggttcgcttcggtttctagccttgctcacgccatggtccaggaaaggttggagcagatgatcagagaaagagaaatgaagactatcaatagtaacttggcagagagaagaaggcaaagagtaagttgtagtagtagtagtgatcaaggaactagtagtagcagtagaactaagtttgttttaatggttgccatggaaaagtgttctaatgatattagagaggattttagagaatccatggtggagatgattatggctaatcggattagagagcctaaggatcttcgtagtctcttaaactattatgtttccatgaattcggatgaatatcatggtgttatattggagatctttcatgaagtttgctctcgtttgtttttatcttgtaaaggtcattactcatatgcaaaatgaaaatcataatgtaatatgatcattctctctctctctctctacatatcataaatgtgtacgcaaattttctcgggaaaattatttgtttttgctttacattttcggtaaaatagtgtcgctccaaacagagttttgcctagtaaaaattatactcttttttgacagagttttgcctagtgaaaaattgtactttttatacttattccaacgttaacaagtgacattttgtgtacccctagttgatattctctccttaacaaatgagatagtcaaattgaagtgtccttgtcaaattagaaaattaagaccctgctttttttgagtacatccgttgattaaaagcaaaaacatcctcttgattgtaaaaataaatgatttttcaacttattagtactttattaatgtgcaaatatcatgtgccatggatttgcttctgatgtatattaaagcttatgtgagagtttggaccacagtacaacacataacaagttccagtttagtggcgaatacaagcacgtgatcactcctaagtaaatcatgctggacacgtcacttgtataatcacggcattaaaaaaccttaccttattacaaaacagtagtataactataagatgtcagaaacagaacagagccattagagggactgcataataatatagataaccataatactatatttttcttcaaacgctccaaacaacacatttgtggagtgtataaatccttttcaaattagcattgctggaatataacaaacgaggatctccaacctttatgacacagtttttccagcataaatatgcttattctattactataattcagaaccgtttgccggaaacaaacccacataaaagcacctaaaacattttataagtcatttgttttggagtacaactatacttctttataatttaattgacaaggccagagttacaaccaagttcttggatttattactacttttctatatatattattacatcgaataaccgaaaaccaaactggctcttttatgtatgtatatgtatagattacatgagaagaaaagggtgtgtgagatgactcagggtgtcaacagggagcttccttcctttatcagcacaaatacactgccggcatctccccttgaaattcgaagttcgccatcaaggtatgtggttaacagccacgattgagcattgttgtttgagattggaatcttcagtggtggttggttggagaaggtcttcacaacagaagaagctgtatcttgaacagaggtgatcaagcccttgaaaggtgtcagatcaattttttgtcccagaaattccacattctcaggtacaactattgagtctgttagttggggagttccaatgatgccttcctcaaacttaatctgaaccaagagaataaaattcttttagaacatactcgaaaaccaatggaaccattctaattctttagaagagttaagatcctctccaacagtgaagtgatcacaatgaaataatcacaggaacaagtcaaatgagcagatttcaaacaacttatttgtgccaaagctatcaattgcttagctattagt

SEQ ID NO: 243788 - DNA, 3872 bp, Cannabis indica
ttatctttgatttctttcatctttctcaattataattttaaatactttgaaattcactttgtgtttgtgtgcatcaagaggggtactttgttgatccaagtttcatttgtttctttgttatcagtattatctctaatatatattttgctaagcttaccatctttcacttttcattctgtaattaagaatttttttcaattcgagatttaaactaacctaaaaatcaaacaaaggtaaaaaaacatgtaaaagaaccaaaccagatcacctataaagaaacattttattattttaaaaagtgaatagtagtatataacacatccaagatataacaagaaaaatggccaaaacaaattatctagaaattgatacctaaatagatgtcatcactttcagtgtcagcctgtgtatagagattgtatgtgttcagtttactatgtaaattcaagcatttacaaagtagctgcttaagaattcacaatttcgacatttgttcgatcagttgtcaacataatgacacacaaaacattaaaaatggtgagtttaaaagaagtgggcaagagagagggccgaaacagacttattatgccaaggaatgtagaacaaggatcaataattttcagatttgtaggcacattgttacttaagttacctagcattagtaaatgctcttcctctctctcactcaattcgtttcatttccgatcctagacatttttctgtcgaacgaatctcctcagattgtggatgggatttagccccagatgaaaatccatgaagacatgaagagactccaatccaacattgaaccattaagtcaatgcagccttcaaattgaaccattaagtcatcaggattgtacgggtgcaatacctgtcatattattacattatcaaatatcaaacattctggccaaatagaagaaataaaaagcactaaataaagcacaaatcaaaggaaaaatatgcatttcaaaatagtgcctccaataacctaacccaagacagaaaacttgaaatttatcttctcatgaccccaataatttgaatgtccaattctgataagtctcattttcacaatcaccacaaaaaaatgaggaattgctatgaatgtccttgaagaactctaattagattttcaagaacaacaagacttcaaggtcgataacatttgatacattgaataaataagaactagacaagtttaccttctttcggtctatacaagaagttatttggcaccagtaaagtatcaactttctcagacacatttgatagactctccttcttgcaaaccatcgaaatcaccaactcccaagtatctacaccaatcgaattcgcatttcccaagctactcaaaactttcaccaacaacttcatatcaccttcctgacacaacccatcaacaattttttgtctaccctcggaagaaggtatataacccttaaacaacatctcatctaagaaagttgctgcttcattaaaccttctacaattacataacccaacaaacattgttctaaaagaaacaacatctggtttgtaaccaagtcttggtaaatcttcaaacaaatcattagcttcactccattttccatccttacacaatccaccaattatgatattataagtaattatatctgctttacactcttctttcaccatctgatccaaaaccttgtaagctgcatttaaatcattttccatacaaaacccatgaatcattgcattgtaagttacagtatcaggtttcaagccagaacctttcatctcctccaaaatcttatgagcttcatctttcttaccaaccttgaaaagagcactaataaaagtggtgtaaacagtcaaacccaatgtaactttctctctttccatctcatccttaagtccaaaagccaaaccaaattcaccaatcctacaaagctcttttatcaaagatacataaactgatgaattgggcttaaccccataaactttactcatatcttctttcaatctcaaagcttcttccagcttacaattcgagcaaaacccggaaatcaaagttgcaaaagtcacttcattcggttcaacacctctgctaagcattgtatcaaacacagtccgtgcatcatccaaacacccatatttacaattagcattaatcaatatattaaaagtacaaacatctgggttgacttgatttcccaaacccaccaagaattccctcatcttaccaatctcgccacacttgagaagcgcatcgagcacagcattgtaggatttcaaggtccgcctgcaacgaaaggagggaatttgctcgaacatttctagggctttgtggggaagacgagccctggcgtaggaggaaatgacgttgcaaaagattatctctttagtgacgaatcgggtttctcgtcccatttggaggaggatttggtccatttgatcgaacattttggctcgagcgagcttggtgatgataatgtcgtaggagaggagtgagtagcggaagggcttggtggattggagttgagggttagggttttggaagagctggagagcgagatttgggtccttctggcggcggaggagggaggaaagccggtgaggagagatggctttggggacactcatggtggcttcttcttcttcttcccgccaaaaccaaaattgtagtttaaatttaaatttatgagtatatataagcaatttaattaaattaagggtaattaaatttttggtggatttactaaattatgctaattgaattttttaataaatttgagattccttctgaattgatatcctatcaataaatattaagtacttatcaaattttgatagttaagaccaaacaaaacaatatatcgataaatcattaatactatgtcgataactaatcaataactgccaaagttgacaaaaataaatgtaaaaagaaggaaccatcgagaatctattgataaagtatcgataacctatcgataatcaaatttagctgaaaaacaccataaccaccctcatctttcacacaaatccaagaaacgtattacgctataaacaatgattaatcaaacttaatcaactaaaaatattcttaaccaaatattttttttttaaaaaaaaaaaatacaaaatctaatctttgagggtcaacccaagtttgcgggaatctgatggtgctttggcgtttagtgtctcctggattccgtccttcaatggtctcaacagtatgggtcgagggcaaggcgtctaggtcaattggggtctgggtcgactatggtctggatcgaatggggtttgggtcgagaggggtctaggtcgagacgagactgagtcgagaatggttgtagtcttgggggtcagacggtggtctcgggattcctcgtcgttcaaggttacaaagagaaaatgtagagaaaaagagaatcagagttagagtgagagggggaagttcaaatgtcgaggatatttttggtaaatcaaccaaatattagcataaggagcttatatttacactccaacaatttatacgtacatctctaatttaaatacactccattttatttatttaaatattattttttataaacacacctctttttatttattaagttgggtttctcttaaaaaaattcaccccatataataaatgtccaacttacttcttttttaaatttatcttcttttttgttatttcttcttctttatttttatttttttcaattaatcattactttttggggatgaaaatatgcatacttgcatgtattattattattaacaatcaatcaaaaaaaaattatgatcttaaaaaaaatgagaattgaatagtatgatgaagtaaatcttttatatatagaaatagataaatatatatatataaaaaaa

SEQ ID NO: 243789 - DNA, 2436 bp, Cannabis indica
tataaaaaaaaaaatatatttttgcttccgcgaataacagtcgcaaattttttaacctcggtttacaactgaaactaaagaaatttgtatcttttttccactgaaaaagtaaaagacaatttttaaatttttcacttttttttctcggttcctcttttagctttactatactagctgacaatagttgttttcttttagcttgggttatgtacaaaagcataaaatcttgacctattttttacctcggtcaatgattttgatgagacgcgttaactgacgtatattatgtattttgtagtagtgtaggtccatattaaatctcgacgcttaaataatcagccggtacaaaatagggagccgtgcccgcggtaataggcctatttttttattgtgtaataaaataatatttttcattactgatatattccttgatacacgagaaccaataagtttgaaaaaccccttggagaatgtctcatcggaattgggttaatgagttttgggttaatgagtttctaaagatgcttgttgttaggtaaatagtacttgagttaaattaaaaaaaaaaaaataagaaaaagagtaaagaaggaaaacagaaatagctcattatctacgaacctggtgttggaagtagaacaaccatacttggcgcgcgcgcacacacatatatattatattatatgttatagtactgtgttctgtgttcaatattgatgattataatcacagtggctgtttgcgaagtcagtcacatggattcctctgaccacatccgacacctgaacaaaaggctgtgaatttcgctgtttgtttttttcgttttctctctaatttcctctttcattgttatagatcttcactagaatctctggcttttcaccagcttttcgtcatctttctcttattcacgtccaagtgtccgaccacattattaccaaatgaacacatagtcacgtcttcaactaagattcttccatctctcctttttatctttttagccaaaacatacaatttataacttaatttctcggtggttttagagtgcactcatacacctcttttgggctgccgcataagagtggtattatattacataataaataacactatattttgataaagtaatgtattgtattaattattaccaccaaaaattttatacaatgtatgttgtattatttaatacataacaaatagtccctattagtttctattataatatttacaaaggattcacagtcaacacgaatctccaatccagacctgggacccagacccgtacccggacccggacccggaccccggctggacccgaaccccggacccaggacccgagactcggaccctagaccccgaaccccaaacctggacccttacccgatcccaaaccccggcaccgaaccccggacccagatcccaacccggaccccgaccccgacttggacccatactctgacccggacccagactcggacccgaacccaaactcgagacccgaacctggactcggaatccgatccggacccgaacccggacacagacctggacctagaccccgccccggacccagaccccgacccagtacctggacccgggaccgagagcgggaccgggactgggaccgggaccaggacccgaattaaataatactaatacaattcaatatattaatacaagtcaataccaaacatattattatattaaacaatgctaatacaatatactacaacataatccaacacaatacaatacgtcatactaaacgagcccatcatgtattctacatttcaataatacttgctcattttatagaaaggggttactatagggatatttttgtacatccttcaaaattttgataagtataaaataatttatatgtcaaagaaaaagtattactataaaacattagtagtatctagtactatttaaaggtagtatcttttaaatagttaacaatattttatattagttattacataattgacttaatatctttcagcaattttttttaaagaaaatagtgttcaaattatatatacttcacaaacgtataaaatataaacagtatgtatataataaagtgtttaaattttattttcgacgcgtttgattattttgaatttcttaaaaaatttaaagtatatcttagataattataatatatattgtcatataaaaaaaaaaacttaaaattaaaactatctaaacatcgaaaacacaaataaatacatcaatacacaaatgtttaggagatgcaaaatagatttatcttaaggtacaataatgtttattgtaataacaactaaagtacttctttcaaacactactacaaatatctaaattcgcgacggtcttgagaacgattttttttgtggactctcgctaaaaaaaattaagtaactatttaaaaccgtcgggaaaaatgagtat

SEQ ID NO: 243790 - DNA, 3613 bp, Cannabis indica
gaataattttaagtaaacgtttgtgcatgtgctattattaaggcgtaaatattattttaaattttgtatttttttgtaaaaattattagttttgttaaataataaaataaattttatagtttttaaaattgtacaaatataatattgaaatgatattttgtcaaaataaaatttaataataatctaatttaaaaatattatcataaaactatttatattttctgtatttgttggtattagaaattattttaaaatttattatattacaaaaataaaattattgaaatttgaactcaaaatcttatttttactattttaaaaatataaaatatattttattatttagtaaataaaaattaaattaataatttttatgaaacactgagtaaaaactagaaagtatttacctattattaagtctagcgcttataaaacttgagagatatataaaatatatttggatggttgcaattaacgtactttatgacaagttaatgtgataatttatatactttatttatttacttattaattaaaatatatttcgatggttgcagttaacgtactttatgacaaattaatgtgataatttataaactgtatttatttacttattaattatttgtcttttacttcttaataaaaaatgtatcctattagtcctttccaaaaatataaaataaacctatataaagtagcagtagctataattaatattataaagcagaccattcaataatattagttagtgttcccttatttcgggtattaaatttattaattatttgttattgagtagtgaaaatcttggtaacgttcgtacttttttttaaaaaaaaacttggcagcaatctacctacatgttatagtgtgaatttctcgtttacaaatatgagaatagtctcgtaaaaaattgacacatggacccaatcaaaaatgatgacatgtcaataaatagctccagtaaaactgatcttgcatgacataaacttgcaagaaggtgcgaccgagacatgatctaatcgcacactatcccgacatagttgaaagatatgcaagactaagagaagttagtacaagtcgcacatatatcatatatgcgatgagtaaatacatctcttatgtgacacatcaagactgcatatttgcatagatttggtttgaaagattaatttgtttgacgaccctataggaactcacaattctaagttgtcaacgcaggaatacccagatatgcaattaagatatgaacttgacgacattcattaattaaccaagttggccgaaaagcctgttatgcgaacaaaacaccttagagcccgcaatctcgtgtatttagaatatggaaagtcaaacctgcaacttgacatgtcgcacacgtttagaaaattaatcaacggatgaaattgttcttatatttattctttaaatgtttgtattaattaaattatgtaataaacggtcctgccttaccggttatgtaagatcgaaggacattaactgtctatataaaggagtgatcgatccaaatcaaataaattaagctaaaactatttgctaaagtagactaagcaaaccgacttctgactgaactactataaaaccttgtctcatttactgtaactgtctttgttttgtttatatcatagtcaattctttgagtattcgccattctaagtaaatactagcatatctgctagtgtgtgttcttgctctgctcgaatactcgctatttttggtgttgtctaactttctctgacaatatttagcgtcgtctgtgggaatgactttctaatatatatgagattttagagaagaatcgcaacgactatgaaccagatgaacactaatgagaacaacgggaccaacaatggaggcaccactggtgcttcgatcatcaacgacattattgcccctgctgagatcacatttgaaggagtggggcataccattacgacttcccagaatcttttcccacaattttcaggcctggctggagaagcctcaatgccagtggccactgttggccactttccaccaataatgcctatccctgaaattgagagtatagtgcagctaacaaccaccaagtatatggtaatgcaagaacaaatgcaggctgttaaagctgaaattgcaagaaggaatcaaaaccaagttggccatccaccatgagttcccccagccaacaatgcattgataaatacgtaaataacactactagatgtcgtggtaaccgtacccatgtttctaatagtcgcatgtaaaacgaaaggagtgctcggatgagaacaatctagataggcttgagttgaactagcctcttcgcgaccctgcatgacagaatggacccactattccaaactcgaactaacaatgtagttgtagagaagaaagactgggagaaggtgatgacgataaatgatgccatccttcaacttgtgcacaacaacgagataaggtaaatccccctaacactgtttccacttcattgaggtttaaaaacctctttcctagtttctatgacaggtcacgttcagtctggactagactaggaggaaggtatcatgttaataggggcgatctgtgagagcgtctgaacgaggcatttcttgcccaatccccaactctaagagattgcagaatcaaggaggaaccccatgatccccatctggccgctcaaggtatccttctcgccaaacatccgccacagttattaataatgtagttaatgcagccaacctagaagcaacaacaaccctagtcatagccacagaaaacgtgatcgtatctacaaatatagtagccgtagccgcacctgacaattagattgcacccgtcaacaacaccaacatagtatagggaggaattgataagaagaatcttttgtgagctcttctcgtgatcaaacaacagaggaagccaacttacaagtagcatgagacatcaccttttacaaaagaagtgtgacaagactgaatcccaaaaggcttcccactctctgagttgttgaaatacaaaggtttgactaaccccatagattacttagataagtttaacattatcatggaagttgaccaggtaccgtaacttgaaaagtgtcctatcctcgctgcaactttggaagataacacacattattgattcagccaatttccagaggcaccgatcttgatgtgggagactgtagacctgtttctaacacagctttaggcagcaatgacagacaaaccgccttacacgacactagccaacatcaagccagagcaaggtgagactttatagaactattttaaatgttttaatgatgaagtaaaaaaatttgagaaggcactcaagtctttgttggttttaatattgattacagtagtgttattgcatactgatctcaggaaggaaatccaagtgcgatgaccgaaaacactggttaagttttttgctatggctgagacccggaagcaaatcaagaattcacttgtagagctcaaaaagattaaagaaaaataatgatcccagctccaaggacacgatcaagaagtccttgatgacgtagtttgaagggcatagtctgagaagacgtaatccaactaggtgtcacgagtttgtaattagc

SEQ ID NO: 243791 - DNA, 1602 bp, Cannabis indica
aacccttttaaacacttgcaaattggagattcagatgttttgcataccccaaaagctccacaagttccatatacgtcgcattgagtttttggtacctcccaggcactataccaagaggcactaccattgtatttgatgatatatcttagaagaccttgtgatgaaacatacactttgatgagaatagatttgtcaaacttattgaaatagacataatttgttcccttctctatgtcttgttggagatagagtgaactagtatatgaattgtccatctcaggtattccaatgaacttggttttatcccatggtccacttctccagtgaggcgttgtttcattgatccatacgaaagattgtggcggtgactgtttcgagattccagaagtgaaattaccaggtgatgtatcgttgtcactcttccaagatgtcaacacataattctctccagttttgacattataacctaagaatgctccaggcatgtacgtgtctcctgaatgttgaaagctttgccataaggtttctcttgatattccatcattgagaaccaagttaccgtcgtctgaaagagttgctactgaagtatttgatccgacatgaatactagttgaccagataacagacttgtcaccactcaaaagctccagatttccattacttccaatcactagacttgccaatgcagagtctgccatttttagcggtttctctctgttagccacccataacacagtaagcggagaaattcccttgtaccacatgcccacatactgatttgcagaattatttggattgaaaaagcctaactcaaaaatttggttagaggagactagagtttgtgtttgagataatggttgggatgaagatatgttataaattggatagcaatattggaaatgaaacaagaagaaggataacagaaatatattcaacatcagcatgctgcaatacagtctctcaccaatgtattattttaatcaaaattgaaatgcatttgcatattctaaccttatatggatctcttcacgtggataagaatatataatgactggttcaattattatttatttatttgataaaatgcataagcgaaagcatacagctaacacaaaccaagcaacaagaacaagtcactaaggtaaaccaggccaccatttcttagcatggtccatggacaatgatcgttcggtgtaaatcacaattccatatatgcgtattcttaactttttggaatctttttaatatgatagaatatttagcctaggttcggaagttggattttgttggagaaagaaagtgtggagaacaaaaaaaataaataaataaataagagaatttataactttttattttttttacatttttcttacttttttctttcttcaccaaaattcaacattcagcctacggaaaaaatttagatgtacttagtatatttgtgtaaattttgtatgtatatatatatatcattataatttatatatactacattttgctgcgagaaaagaaaaacggcaataaattaaataggaggaattcaggcataattaactaatgaaaaatgaaataatataagtttattgaatcacaaattatcat

SEQ ID NO: 243792 - DNA, 2135 bp, Cannabis indica
catcgttatattattattttccactctaagctataatcagattttgattatggatatggtaatgggttttcgctaaactgttccttgtttatgaataggagtcctttcttttccttctctttgaatattgggttttcattttgcagaaatgaccaaaacggatgatttatacttgggatatgaacggtggttgcctagtcctccaaaagtgaagaagcctcgctccatttacaatgcagcagcattagcatatcttggcgattgcatttacgaggtctgtttatattcaacttaatgtactgaggtcattctttgaaatcatcattgattatagagcacagtattagatttgttgcttgtgatacagtgtaccgtttttgttcaactttactgagtgaattaacttactaatatcaagatttcctaaaaatgcagctatatgcccgcaggcatttcttgtttcctcccctgagtatagaagaattcaatgatcgtgtgatggcagttgtacgatgtgaagcccaagtatgaaaaactctcaaaaccattcgtttatggccttgcaatttttttggctatttatcttttattggaagtaattgaattagcttttttatcatatcaggatgcattgcttcagaaacttctaagtgataattacctaacacaacaagaaaggttagtagaagatttaagactctctttctgttttaaaaaaaggctttaaatacgatctttcttttctaagatatcaagtagagatagatgtatggcctccttatgctatgcttgcctttttttatttccaaataaagtgacctaattaaactaggcttaaatctaaaagcattcactgtattttttttctatatactaaatctaaaccatctcatttaaaagttgtcttaccttattacgctacatagaagagtttttgattcgtatgtctctggttctgcagtttagaaatattgtcatgttgatgttggaagtacctgttgagttgtttctatgcaccattttaaaatcttcgcctttttccatgtttcaccaattggagagacaatattatactatgctgccatgatgggttaccgaagaagaattatatgggttacgtattgtattgaaataattcctataccataatttattggagatattctacttagacttgtaaatacttgctgcagggatgttcttcggtggggaaagaatattgggaattcagtaaaaacacggacaaaaaagcgtgcaggtgtagcagtttacaatagagcatcttcactagaaacattagtaagttcccactttcgcaaggcttcttatggcctattttatattaaatagcgatggtgttgtttgttgttagctgtaaatttgactgatatattgttatccttttaaaaattgtatactatgtggattgcggttcttattgaacactatttgctatctagtagataatttgattgtgctatattcccagaagaaaatgagaatagggaaaaaaaattgtactgttaatgggcctatgaaagtattatggggaactattttatctaattaatgtcattgggcttaatacatagtaatatgtacggagaactgctagtggtaagtaattaaggatttgttcagagaaatcacaagtctgtactccctaggaagtagagacttttttaacttttcaccgatctaattgctcctcgtatttgtagattgggtatctctacctgacgaatgcaaaacggttggacgaaattatggttaagattggattctcagctgactcctcgacacagttgattttggaggaatcagtcggtaagttgctaatcattttctccactatttttgcctgtggttgctatatttccatgaccttattatttcccatgttgcacctctgcattgtagtttgattctgagcacatgagctataactctctctgtgttatcttaaagttaccccatttatagttgagtgaagtatccttcttttctggcctagataaacattgttacactatgactaaacaatctgcttttatttgttattggcaggcaaaagcgcagacagtattgcaccaccaaggctttcatgaaatacagttttgccttaatacttttgg

SEQ ID NO: 243793 - DNA, 1041 bp, Cannabis indica
gttttaccaaaacttttaatctgaagatgaaaaataaatctactaaagggaagaaacagattccttccatctaagagtaacaagtgactcaacggttttcatacaaaataaccaaaagcatataagaaaaaagttagctcccaacaatatttcaaaagcataacatcaaacattcataaccaattccaactaattatgtcatagcaatacaatggaaggaaagaaaaagtacaaaccaagttgccgagcttcctccaatgagagctccaaaacacgctttgcacgaggagtgaatggaatctcaacagcaacaaaaccactacctcttccaataatcttttcaacctcaacacgagcgtctttaagattaatacccattgatttaaggaccttagcagctattccagttccttcaccaattagacccaaaagaatctgctctgttccaacaaaattatgaccaagcctccttgcttcctcttgggcaagcataattactttaatggccttctctgtaaagcgctcaaacatggctttggggacacatctggtagccttacgttgcttggaagataatgtaattgccaccttagaatgaaaatcctgcccaggcctcgttacagtatctaaagcattaaggcttctcagtcctgagaaacctctcatgctcaatccaggtgcttgtgtacaactcatcatcttcactgccctttttgactttccagaccttttagactggccctgctttaacccggccactaaaccaggaacattcgtcgactgaaccaaagcagccatgattaccacctaacacactgcattatatataacaaacaacgttagcctctttgaacacacaaaacaaaacaaaacaaaatcatggttatttactcacataactaccaagtaatagtatactttcctataatgttttatttattttatttttttctactgaagaattaaattgtgttaaatattttgagtaatgtctagtatatatccgtttacaaaaaaataatgcactcatgtcatgttatt

SEQ ID NO: 243794 - DNA, 2770 bp, Cannabis indica
tttttactgtatttaatttcggtataacaaaatttcctctgcaatatccccaattccaattttaactctaccagacttcccattttctaattaaaggcacattactcacagattgttcaacacacagaacagggaaatgagcaaggcctggagaattacatgactttctcatcttttttgaagcttgagtagccctaatctaggaggagatggttcgttttgcactagtaatctcagtaggggccagggttgccaacagtgagttttccatagaaagtggagattgacctccactggaatgagcttgcgatgttccaggaggtccttgtattggagacttataatcgaaacccaaagagaaaggttctgaccatgagcttctaatatcgggaattcccgaaatcttagattcgaaaataggaggttttaaaaaagaacctacaatctattttgaagccactgagacctcttgatatggattgaggtcagtgagattagtcttcgaagttccaccaaaatcatcatcattttcaaattccaatagctcaagagcttgaatccctaatagttccgccatggatttagtcttgagaatagggtgcttggaaattggactctctatcttgcttttttgagtgattgcattccaactttccaagattgagttttccctgccatagccacaacttatgttgagaggaaaatcctagtagagcaatccaaaaaaaataataataaagaaatatttgttcactctaatatgcaacctatattcaaacaagatgctctagctagataattaataataattctaaaaaaatcaattaccattacacaaataaatttcccattcaaaatgttaatgaaatatatgataaatatacatttttattaggcactatacacatttacatgcaagtgcttaagataaagaaaacatctatgtcaagccgggcacgtacgttataaattatgcaacattggaaggtttttacaatgtatacatataaaaaataataaaggttaaaactttaaatacccagcttaaactttgtcttcattatctaaaaaaaataaaggttcatcatcggatggtgatgtgattccaactccattattatttattactctaaagaaataataaaaaatagacatggaaacccacaccagtcccttgatgaccttcacaacaccaatcatcaccgtcatgtaatacaaccaccacccaacaaagtcagccatttccaaattcatattaatattatcaaacaatattaattcccatttaacctcagccacaaacaccaaagcctcaacctcttctctcaaccctaaataacaccacaaacaccaaaacccaatactcatcaaaactctcttcaccatctcctcctccttctttcttctccaaacgacaccaaaacttgtgtcgtttatcaccggctccactactagacttgaccaacgaatcatagtctcatgcaaaccaagaaaaaatattgctttactatacaaagtcctgtccgtacggacacttgagaatttattaccttctactactaatgataataagtcgttattccctaaccctaaaccaatggaaacttgcatggttagaagtaaaatccatgctacgtagttccctagagtagtagtagtagtggtgagactagtagtagtgagtttattattggttagggtgtggaggagtgtagcaaggcttaaggtggagactatgagatagaggatagctaggtttgtggtgtggagatacgagtgattgggatattgagatgatgaagaagaagagagtggtataattggtattagagctacttggcttaggagaagaaaacgagagaaaacaatctttgcaaggtggagaaaagctagagggagtaaaagggctagtagggttagtgtaattatgcgaaatgagactctcacaatcgttgatttgattatgattaacaatatcttctcatcgtggtgatcattagccttctcttccaagttttgatcatccatttttctcttatatatgtacactaaaaccaaattttataaatgtacagttatataaagagttgtaatagctttttcaattgtggatgagaaaaatggacattatatatacatatatatactataatatattatatgatagctagagtggttgccatgtctatgaaagtcatgattaggaatcaaattaagttatatatatatatggaaataattatatgcatagttttctttcttggtttgttgttatgattatgcattatacgttttgtatcaatatgcattatatataatagcatataatacattaattagttgatgattttgaagtctaaactaataaaagttgcagccaacgtggcatttttatcgattccaacgtggcgagttgcagccagataattgtgtagtgaaatattatttgtttgacttatattacaaaattaataatttgaatctatctatctatatataaatatatatatataaaaagagagaaatgataaagggtatcagtggtgtttagcatcctcctatatgttaatatcgctattagtctaactaagtattgagtctcatatagtttaatattagcttttaaggaatatcgctaaccaataacccgacatgtcgataaagtgttaagcactactggtacataatagcaatgctcataaagaaataagacggtgacatgttccaaatatttttatctattttcttcttaattcttttataagtttat

SEQ ID NO: 243795 - DNA, 2499 bp, Cannabis indica
cctaatcaatgcgagcattatatattaattaattaatctcacactcatctcatcaagagttatttattagattagagaaattgttgattattgggaacaataatttgccaaactttaactagacagtccaatccgccactgtaaatcacatacgaattaacaccaccagacgacgtcgtatcacaatcctcaacggtactactactactactagcagttagacacttgattgggccagtgtgaccttccaaaacagccaaacaagaatagcttctctcaatacctctccaaactctaaccgttttatctgctgaaccactaaacaccaagtcctcaaccactgccaagcacaatatagccttcccatgccctctcagggcccccaaaacgacaacattaatcgtgctatcttcactgtcgttttcaaagattctctcccaaacgacaatcgacctgtcactcgcgccagaataaagaaacgacccgtcgttgctcagcgccaaggcgttaatccccgaattgtgcttctccaatgtacagaccaaagagtgtttcttgtcccccaagctaattctcttcctccacgccttgattttcctgtccgctgatcccgtaaaaacgacgccgtcagacgagagagcgacggcgtttattgcgtcgtcgtgggcgttggtgatcgattccaggcacttgaagtcggtcgtccgccacagcttcagcgtccggtcccacgagactgagtagaggaaccggtcgtccggcgataaggccagagctgacaccgtatccacgtggtgaacccacgtacaactcttgtggcggcgaatcttgacttggtttttgggcaagaggagcttcgccgctcggtcacctaacgtcgggagcgtggctaggcgcgtgtacttcatcgcgtgctgattgttcttgtcgtctctattgctgtcttcgtgttcgttttcgattttccaaactcttattttgttgtcttggtgtgcgctgaagagcttgtcgccagaaacgacgagagatttaactgccccgtttccagccaaaacgatgttattattgtgactgttgttgatattccaagagccgatttctcggtctgaggagccggtgaagacgagcttcccggcgagtgtgagtgcagaaaggtaggttgaatgaggcttgaaatcggagattaagcaaaactggtagtgattttggggtttaaaattggaagcgagtgaaggaattgattggagactccgctgagaagagaaataactaggatactgaagatcaatctgatcttcacgatcactactatcacgatgatcatgatcatcatgattatcttgctggttacaactgaagctggtttggtgacattccatgataaatattcccatatcttgtgagggaagggaaaagtgcagttggtttatgaagtatatatatagagaagaagcggggaaggaaagaaagaaggaaagatggaaggaaagagaaatggagggaaaatgtatagttggccaaaaggtactgttggatcatggaaagcaggtgtgtgtgatggcaaaaattattgtgtgtttagaacagttggactactgattctttagtgtacgtttatgggtggaaaataataatggagcatttgatttagatcatttttttaggttcacaacatattatattcatgaatttgcaatatgcataaaaagtagctatttaattattttttgttataatttaaaataaaaaaatattctattaaatttaatagtcttatagtaagattacatttataaatatatataaatattaatattatttattttagattaattaaaatatatataaatattaatatataatttgtaatattattattatttttaatattaagagtatcttcaattttaatatttttaaattttacatttattttttaaaatttttaaattttaaatatattttaaaaaaaaattataaaattaataagtgacttctttttaatttataagattttaaaatacacaaaaaaaaaaaattaaaaactaagaagataactaataaaataatatttcgttaaatttaactgttagtaaagctaattttataaatatatataaatattaatattatttagtttaaattaattaaaatatataaattttaatatattatttgtaacattattattatttttaatattgagagtatatttaattgtaatatttttaaattttatatttctttatttaaattttaaaaaaattaataagtagttttttttttaatttataaaattttaaaatattatccaactattttgtgatgtattaattataaactttgtttgatatactttggctttcaaccgttagatctaatcattcttgatctaatggttgtaatgaccacaaaatgaccagcgaactatacggtgactgagtaaaatccactcctatatatgtagatattccatatataattaatggaatgttatag

SEQ ID NO: 243796 - DNA, 2666 bp, Cannabis indica
ataaatataataccaacactttgttctttaagacttattggaaatctgtgggcgaggattttgtgaggcagtgttggactttttttaattctggtgttatgcagaagggtataaatgaaactaatgttgtcatcattccaaaggtcccaaacccgaaaagagtggctcagtttaggcgcatctcactgtgcaatgttacttataaagttatttcgaaaatcattgttaacagaattagacaggctcttcctaggctgatttcccctactcaggttgtctttgtcccaggaagaagcatataagataacaatgtgctggtccaagaaatcatccattcctttaagctaaaaaaagaaaacgagggttgttttactattaaaattgatctagtgaaagcctatgataagcttagctggcaattcattgaccatgtgatacgcagtttcaaagccctagtcaagttttgtggttggattcgccaatgtatctctacgatctctttcaacattttcctgaatgggagaaatgttagtagacttactcctgaatgtgctattagacaagggaatcccctctccctttatctctttatctgggtcgccgaaatcctctcgcacatcctgaaaaaggccttggattctggtttcattagaggagtcaagctgagcagaaatggcccccgcctgtcctattggttaataatgatcaggccaacgtattaataagatgaaaacctctatcttcttcaacaataacaccagtgaagggatagagcgtggtattaaagaggtgcttgggataaacatagcgatgtgcaatatcaattatcttggtctcccactgtttcagaatcattgtaaagatgctgactttaacttcattctggataacttagtctcaaagcttcatggttggaagctgaagtcattgtctaaagctggttgggctactttaataaaatcaatggggctatccttaccagtctatgctatgcaaaccacgaagttcttcaagagactcgcatttaaaattgatgatatggttagggattttttggtggggccatgagctgggtaactggggtttatgtcttaaggcttgggaccagctatgcctacctaagtctagaggtaggcctggttttcggaagacggtggaaatgaaccaagcgttccttgccaaatggggttatgctcttataactgacaatcagtcattgtgttgtaaagttttgagagcaaagtatctgaaagggaagtcgttcttcaaatgctcgtccaagaactctgactcattgttttggaagaatgttgtgaagactaaggaaattctttccagaggagcctgtaagctcattacagatggcaaagatacgaagatttgagaagacccgtgggtaatgcatggtcggagctttttcactcatcctttaaacgatacaccagaggggttggaaagagtagcggatctactaacagacaatggaaattgggatgttccaaaacttcaaaatctttttcatcgagagtccactattaatattctcaagggtggaaaactaggaggccgaggtagagacaagtggatttggactaaagaacctaatggtctcttctctacaaagtctgcctaccttctccaggccttgaatcacgctcctcctagcaatgtggctcctgccttgtggaataaactttagaactttaaaatcttagaaagacacaaggtcttgtggtggagtatcctctcaaatgcgttgcctgtctactccattcttgctaaaagaatgcagattcaggaagtttcgtgccccctgtgtggtcatgggaggaaactatggagcacctcttcctctactgtaacttttcctcccacctctggcatttgtccccctggggtgtgatgccagtcgtggactctaggacccgaatgtgagattgagttaaattcttatggggactaaaggataaaggggtgcatacaactaaattgtttttgtatgcttcaattgtagtggacacgatttggaagacctacaatgagaagattcacaataactttgtttgtaacattaatcattatattgactatatttctttgtgttatgcagatcatgtttcttatttgcttccttcgccgatgacgtttgcttctcctagttggtccccccggatgactggatcaagatcaactgtgatgccaaagttggttgtgattcaatgtgcgttgtggcggtggctagagatcacaaggagtcaattttgtgggtggctaccaatcagctcaacttctttgatccgcttattgaagaagctgcaacttgtttattagccctagagtcagcgatcctttggaagcactcttttgtcttggttgagagcgactccggaacaattattaagaccctccaaggttctatatcagtttgaggtattagtaactacataactcaattcatttagctctcgaaccttttgattggatgtaattttgcgttcatctctaaaaattgtaattttgtagcctacaatattgctaagtgggcttttgctactaatattactggaatggttgatcattcttccatccagtaaaccttttgtgtaacgaccgagatgcctacctcgtttttatttatataatcctagtattaaatattttttttt

SEQ ID NO: 243797 - DNA, 5262 bp, Cannabis indica
ttccttacaaaattggtgggggaagttctccttttttttttctcccttatttaatcaagttcccttttttctaattttaataatgtaagtaaacaaatgtaagggaatgattaccttacaattaattctcattacttattagtaaacatgtcattatagttctacaaagtcccattcagatttcagtgtaagatttttaaaatttgattgttgtgaacaaattattattgtttccttttatttggaattttgaactatatatgttttgaaggagggaaagaggtaaaggaaagtaaaatgaattgtttggcaagagagagaaagagggatataaattggatagatgccaaaatataagttcccaatagatcttcgaaaatgaattctttagaaaaatagactgaacatgaaaaaaaaaaaattgaggaacttgcaaaaatattttaggagaaatttataaaaatattagagcacgtagattctaatgatgatttcctggagtttggggttaggggttggagccatggtttgggtctggggctggcccatggtctaagtgtagagacaggttcgagttcaagatttgtgtttgggatttcggttcgagttcgaagtctaagtctaggatttaggtccagattcaaattcgagttcgcgactagaatttagagtctaagtacgtttggatccgtgtttcaggatctatgatattaatgaaataaaataaaaatagattataatttataaaatgtttaaaataaaatatatagcttttgggcactggctattgaagtgaagccagtgaccaaaaaaaacatttaaaaaatccttttaaaaaaatacaccaaattttttaacaattctcaggaggaaaaaaaaaaatccaaaacaaaggcccaataattcaatttcttaagatccacacattcaaaagtcttgtcaagttatttgagattaagttatttgttattaaaattatttaagtttttttctggaaagggaatttgagaaattctttgttggagtacacatgaatcttttttctttcatagtattttttttaaaagtttaatgtccttttaaaaattagagaatgtgaataaataatggattagattaacttgtttgagaaaattagagtgaattgtgtcatcctacatcaatttaaaattgagaatttagagtgacaatttccaaaactcatggttttgtcactctcaatctttcttaaattatgaattattaattttacttttattttgttatatatttcttatacaaaaatttatatatataaaattttaattaagggtatttttaaaatttaaaataatataatattgattataaaataattgtaaacacaccaatgaaaatactgcttaatttaattataattcctgcaagtaaaaattgtttttaattccgatttattaatctaattaatggtcaatctcattcttagtcattctgattatgtgtaaataaacacaccataaatatcactttggactttattttttcttattactattattattttaagcttgtgtgttcattactttttagaatatatatgtttgattaaactgtattaatgaatatttatagattaatagccaatataggtatattaagctaatttcaaactataaactcaagaaagaaagaaaaaaacttgtacataaatttaataacaaatgggtttattgatataagactaaaaataataacttaaaacggtataaggcatgattgattgtgaaaggatttagcgagaagaaatgtattaatgttgaagaaatattttttcttattgtaaaaatattatctattagagttgttcttggtttagttggtcgcttgactttagatgtagaataacttgatgtgaaaactgcatttcttcatggtgacttgaaataataaatttacatggaggagctagaagtttcaaagtcaaagaaaagagaatattgtgtgcaatcttagaaaaagtttatatggactcaaataggcacctagacaatggtacaagaagtttgattccttcgtgttgagtcatggatatactagaactatttttgatcattgtgtgtttacaaagaagttttctaatgatgatttcattattctcctactggttgtgatgtcataatgattaaaaagttaaaggaagagttaagtatgtcctttgctattaaagacttaggattgacaaaacaaatacttggaatgaggatttctcgtgacagagagaatggaaaattttggctatcttaagaaacttatgttggaaaagttattgaaagatttaacatgagcaaagctaaagcaatttgttctccacttgcatgtcattttcaagctaagctccaaacaatgtcctacaagtaagaaggataaacaataaatggcttcaataccttaatcgtctgcagtgggtgatttgatgtatgctatggtatgtacgatgccaaatattgctcatgtagttggagttgttaaccaattcctctctaatcctggtaaggatcaatgagaatcagtgaaattgatattgagatgtctacgagctacttctaggttgtaattatgctttggcagtggtgaacctatgctttattgctacacagatgcatacatggctgatgattgtgatttcaggaaattcactttaggattcttgatgatatttgcagggggagttgttttatggcaatcaaagttacaaaaatgtgttgctttgtctattacataatttgaatatataattataattgaagcttgtaaggaggttttatggatgaaaaagtttctacaagaatggagctttgagcaagaaagatatattgtctactgtgacagacagagtgtcattcacctctccaagaattcaacattttatttaagatttaagcatattgatgttagatatcactgattcgtgatgtgcttgaaatgaaagaattacacttaaaaatatgcatactagtaagaatggttatgatatgctgacatagactttacctaaggacaagcttaaagcttgtaagcgaagagcgggcttagctgagcccactaactgaggcagataggggagatttgttgggtccgcccctttgatgggtcttggaccaaaataagggtagcatctcatttgtaatataaagaaaaaaaaaaacaaaaaacaaaatagaagctaatagtgtgtgtcatagagaacaagaactatcgaccaagaaaaagaaagaaaaagggagagaaataagaggagaaatttagagagggaaagtgggtttttgccactttactttgaagatcaagtggttgatttttatcgattttagctcaaaatttgagtgatggtgaatccttgcaaggtgctctaccaatctatcagtttcgatttggcgattattctctctaaggtgctcttctacaatatacaatacccaaggccaaccatgtacctgtgcaagaagtgctaatccacatggctcaaaacttaaaaaggctcaatatattacttttcaattttttttttgaaccaagcattctatcatgccaaattaaaaaaaaaaaaaaagctaatataatttttttccttactttaacgccctttttaattttttttcccataatatttgataactaaacagtgaatagaatgttgatatcttgaagttgtattggaaaaaatgacaattttaataaaattatttgaatttttaggtgcttaattatgtaacaatattatttgtaattattataattttttttgttaggggcttactttttaaaattagaataagacctctaaaatatttgtgacgaccctgacaacaggggcggaggtatgtagccaccaaaggtggccttggccccccacacccaaatatgaatatatgaatatgtattattttattatttttattatatatataattatttcttattttgcgtaaattttttattattctttatttattattaaatttcaataagtaatatatacacttaatatatatatttagaaaattatataatacaccatttaaaaagaatgtaccgatacatctttaattcgaaataattttttagttaattttttttttataattatgtacgttatagttatttaaggtatcctacaaaattttaaaaaatttaaaaaaatttaacacgccgaaaataggattcaaatattgtgttgcacacgtgactattttattttatacacgtgtgaaatagactgtttgaacactactttctatattataaattatttaaatttctcaaaataacgtacacggatataaaaaaaaatcggactaatttttttttctggatgctgaaacagctagagggtgcatcagtgcatcccttttaagggtctgcattatagaagcaccctatattttttttttttttagaaaaatgaaaactaaaatattaaggaaaaaaatatcaaaatacctacctaataaaattaatataaggtttagtataaattcacttataaatgaatttcgcaatatgctaaagagacattccatgtattttaattttaattattagtttaataatatattttaaaatatttattacttaaagtttactataattttggccccccttaacatatactcctggctccgcccttaacatatactcctggctccgcccctgcctgacaatactcacttggtgagactcaaagtttttctatttgtgtatcaattttctgagatgatgatgattgtatcagtgatctaatattgcttaatcttgatgttaccatgagcctctagttatactagagaagaatattataatcccattattaaacattggtgataatgaatgatttaatcggactatggtcctcctaatttttttttccacattgagtttccacgaaaaaattttggtgtctcacttttatgtctgttttgtgtattttctattgcttgtggtactttgcttgatattttatattgtttattgtgatgtttgataagtatcacatttttaacatacaaagaggaaaagtattgtgattaattgcaatagattttcccaacaagtggtatcagagtcgtatctcaaaattaatcatgtgaatgaatcatcagaatgccaaataaaagagacgagcctcgataatttcacgataggatttgtggatgtgctctggtagacaagacggtgtgctttggaatagatggcttgagaaagagcaagaactactcgaggtag

SEQ ID NO: 243798 - DNA, 2662 bp, Cannabis indica
taatacttatatccttaaatgaacaaacttctgagatgagtgagcagctataactaaatgagaactccttacatcttgtcactgatgtcctcaagcagattcatgagtttcttcgctaattgttgcctgcggtattctggagcaacagttacagcagttacatgaccatgccaagattcaccttgcccttcaacttttcccataactgcaattgatgaatagcaacgcagtgtttcatccataagtaaactactaaaaacaacccagaaagtcaaatacaattctaactaaactaaacaactagcccaatcccaactacctaaggtaaagcaatatccattcacactccggttaaactgattgactcctgaatcagtaaaaaccttagaaacaccagcaccatttattaattttagtggttcagcctcaacaactctgttgtgaaatatttagaggtctatgacacataaacaatttatgattcctaattgaacaagacagcacgtaatagtaaaccaatttcttccaattcattatctatttcatccgcccaatgatttaaaaactttgctaccataaaaaaaaagagggaataaacaatatattgcaatgttgcctatatataagtaaaattaaagaacatacctttcatagccaaaacaataataataaaaaaaaaaaagacgaacaaacagaaaagagggagaacttctgaaggtcaaaaacaacaagtttagggtttaaatttgaaaaagcttactgtaacccattactcggtttccaggggcttctgcgacatgaaagtaatctggccaccttgctaaataggtcatgtagaaggacatgttgaactgtaaataacaccagaaaactccatgcttaataaattaaatgcataatggttatgcccacctcagcgaagaaactaaaatgaaaacaagggactcttacggtttcagtgaggtgatcaaaatttacagaggcgaatcggagaagatcattgcagcaaaatctgcgaatcgtcgtcatgactcggcttcgcccttttcgtttgggagttcggactgagttacagtaaaaataaaacaataaaattgctaaaaataatagtgaaaataaatagggataatacaattttatttttaattttttaacaataatattttatttttaattttttaacaattttggttcatgtaatttagctaaatattactttccatatgttgtccggaaaattgtattctattgtattaaattggattatatattatttttttatataatactatattaaattttaatttatattgaaatattatatatttaggtatttataaaagttaatacccttcatagatttatataaaatacaattaaatataatacaatacaatacagtataatacggtgtaccaaacgaacacttaaagaataattagagcatgttcatttgttttgttttttatttttaaaaaaagtatttttatttttgagaacaacaaaaattaaagtttttaaatataagtcttttggttaatgtttctaatttattttttaaaaaatacttcaatactttgagacaccgatatgaacaagacttgaccaggacccggacccaggccttagcctcggactctgaaccagctccagccccaaccttagacctacaccccaaacccgcaccctagccccagccttgaccccgaccccaaccctagccctggacctgaaccataatccagttctaatcaggcctgagggacaggagtcagtgagacttgcccaacctacgtcaataaacaaaggcaaaggcaaggttattgcaactgatgacagctctgatgagtcttcttctgaagacgaagggcctttagacggttctcttgggtaaatcatctcgagaaaattgatggtagtaattcacttaccttacttgctctttgtgtttattacttgtatgctaaccttgctatttttcttttgcagacatggcctccaggatgaaagatctgatgaagcgatcatcgagtagcccctctggcgggtgtactccatccaaagttgtctggacagaggctgcctcggatgtgactcaagccactctgcctccacttccttcaagtccgacctccgatcaaccagcccgtgagttgttgatcccttctttgagatctacttctccaaaggaacccagtaaaggctaccaaaaacagggtcgggctacttcttctagaacggtggacaaggctaaggaagttgcttagaactatcttgaaaggtgtctacttgctgttggtgatcatcttcgcaagttggacagtgattccttggactacttgacgtccagtgcattgaaagatgttgcctcggtaagtgtttctatacctatccggctcatgttttctatgccaccctttccgtacagcttttcccatacacattaattaaatgaaagagataaaatgagacactacacctagtgagaaaaatagcttcgtctggttgtggtggtagaagatggtgcagttggcggcgatgcctggtgcaatggtgcaggacagaggaaggagcaatgagatggtctgttgtagccttcacttagtgatgagtctggagtggtgtcagggtcagtgtggtggagagagagagggagagagag

SEQ ID NO: 243799 - DNA, 4218 bp, Cannabis indica
taaatacatgaagtgagaacacaatttgaagttttaaatttgaagaaactgagtgttataaaattctatttgaaacacaaactgggttgccaaatattcagttgaatctaagtagtgaatgtcattttctttctgtattagttggcaaacgttgtattgaattatataacattgtaatggtgaatgtcatttcctgtataaattgttttggcctttaaattctactcctttttgttattattattgctatcttggaatagaccattgtaatatgatcatataaggctatgtacccaaatgtttgagaagaaatgaattaaaccatggtggcaaaccaacctataaaactcaattagatattgctaactcaagggtattataagcatttataaatttatgcatctaagtataaaattggaagattaaaaagcatataataaaatatagttttgtatgaaacaatcagttattattaataattctaagtgttgtatgaataaagtaaagagaataaacactagaagcaacccaggacagaaaacacaacacctaaactaagtatttatgtccttaacatcaagagtaatgtagtgattcttagcacaataatcatgaatctgtatacctaaaacgaaccaagaacaaatgagattaaaaactcaaaatagagagagagttaattgatatatccaatgctggtatactgtgtttgttatgatcattattacaacaattaaatattgttacaagaaagaagtaaataatatttttactaaaattcttcctctatatacatagagtgagaagttcaaacccctcctcaacattctctgcaaaagtggatagaaacaataaattaaaagcctaaaatcagaataaagtgtgtttaatacaataggtattttttttttgtataaatatgtatgtatggatttgatcacatctgttatatttagatgtactttacggattaaattaaatttaaattgttatgaatttaattagattatattaatttaaatttaaatagtggaatgttattatagtacatcaaccacactatcaaatatatacatattttctaaaattcagtacaagtttagagttatgtatacagcttgctgttactattaacattctaatcaatatcattttttttatgaaagaattttattgattaatatctcccaaaattatacaaaatatcacaaaacctaaaacattttgaaatcaaagttactttttatattacagtattgatccactagagtcttctcatgagaaaatattatatgataaaatgattaaaacatcatattaataaaattaaaatatatgttacatgatatccacacattattattttatgtatgtataaattattataaactaattaaaaaacaaaattcaacaattgaccatattaaaaatgtagatagacaatattattgacattttttcttggcatgccgaaatgtattattaattattatcatttaaaatgaaattatattgttacaaagtattactgtatctaacactaacactttagatgaagtagcatctatttttttaaataatgatgtatgcacacataaattaaaatatatttatgttgtaaataattttaaccaattaatttttttaaagatgagtctcacttgttaaaaataatttatcacataaattagtatcaaatttatgtatagacatatcattattttattttttatttttactatttcagaatagcgcgcttaaatacaaggcctcactgtgtataagttttttttttaaggaaattctccttttacggctttaattattattttttattatttataattttacattaaatttatatttttaatttatttttacgaaaatatgtttttttttttcacatttttggtcgtccttttttcttcctcctccccattactctccatcgtggaaattgaagcttgattttttccaaaatcaaaattgaacttgcagcacatatcacaactctaaaccacgatcaaaccatatcacaatcttagcccctttcttcctcctcctcagaattattccatcctccctctgtgattgtttagccaccacgtgaagcttccattgatttccacaaaatgaactgaagtagcaatcatatcgcaaccctaaattaccataaaaccatatcacaatctcaaccatgcccaaattgtaactaaatcgtgagatcacaacgtgaagcttccattgatcttcataatgaaactaaagtcgcaaccaatattaacttaaatatcaccatcaaactatattggaatctcttcactatgtccagccgtaatttaaatcgcaactctaattaccatcaaaccataactcaatctcagttaaactaagctgcaacccaaattacaacccaaattgcaacatttcttcttctttcctctaatcattctttgattgatcaccgtaaatatgtaaaaaaaaatcttatataacattgattcacttaattagataccgttattggtgtcccataatatattaaatcaatccaagcataccaactcaactaactaattttcttaaatattattaactatgtagacaattttttttttctttaagtactctcaaattaattgatgtcatatatatatatttttttttgacgtgaattgatatgtcatatttaaattaatttaatacactatgatatactattttttaaccgaagatcttaattcgtatataacatacaagcccttcggacttacctaaataaaaaaatatatagacgagtacaaaaaatatatatttatttataaaactattatataattatatattacattaatcatataatctaacctaactaaaaatactccgatcatttccaaaagtttgtgtgggaattaaggacaagtactccgacgaggttgtggctgaaaaatcgaagaagtgatcggatatagtatttacggaaaaagaagacaagtgatgatcctcggtcttcactctcagcctttgatcttcttgttgatcaagaatattatgatgatgatgatgagaataggatgataatgaagtatctgatccaactccaactccaactccattgatattattattctccatgtaacgctcagcatcggagtttataccagtaagttcttgaaccaaagctctaaactctgaagcacttgttttgaccttcataggactcgatatgtatcaccactttcactccttttttggtgttcttcttcatcatatctttctgggttttcattattaattaattaaactcactgatcacaccacatgcatgcaaaccacctgtttgtggaaatgccttatctgctgtttatatttatatatataaaaaaatcttgataacagatatttcaaagaaggaaaataagtagaggaaaagggaaggtaattggaaactacaataatattatcatatgtatttatatgtaaatatagaagtttctagcttggtggggttatatattcttggatgacccgtaagtaaattagttagaaaatgattatttccgcatgagtgctacctgtttgaatttgggatgaaagtagttaagatgcataaggttttattttaaaattaattcgcaatagaaagagtagtttatttattttatatatgataatttagtgagagtaactctaatacactcccctcacgtttggacctagaaagtgtaggtataacaaacgatctttaagagactacatgatcgaacgtgacatttgaaagaatctcacaaggccaaatatcgagaaataagatgtacacgtcgaaaaatttgtaaattttgaaacaagtctagatagcagaagtttgactcatatctttttagactcacaacggatcacaaatagctcttttaacgactcacttttttggactgatactatgttaaaatttgggaagaaagtggctaaggtgcatgagattccatctcaaaatcaattgacaataggaaggaggagttgctcattcatcttatatatgacaatttatttttacacattaacaatatgagactaactctaaaagtaatatttacgattagttaacgttattttataaaatttattacattaaattatatagtataattaaatattaatttttatataatttaatataatttcttataaaatattaataactaattataaaatatcatt

SEQ ID NO: 243800 - DNA, 3620 bp, Cannabis indica
tctggactaatcacatagtgacaagtggacactaacttggtacataacagccaagtacctacgaaagtttcacactagtgacggaagtatttttaccgctaaaaatacgactttggtatctacctactactcggcataaacattaaatacttatatcgcaaattactctatccttttataatatattaaaataaaaattatttatttggaataatgtttaaatcaaaataatttataaaattcgtgaaataataatttctcctttttctctaatttcttaatttggttcttatatactcaacaatataaaagaaaaaacataatttcttttcattgtatatttttcttttttctttttccgtttttagaatgacagaatattttttggggtttttacactatatatttaaactttcaattttttttttatactgtatttttttttttgtaaaaactcagtgtaagttttattctgtatactgtgttaagtttttactattgtttcacggttgttatttagttgttccactattgttttaattttctgttttgttattttaagattgttttataaaaaagacagtatttttgtaaaaaatttcgtgtgatagtaaaattgtaaatttttatccgaaatccagtatttttataaaaactctatattttttagaaaacttacacaaatactggaattttggttaacttttataaaaatactattacatgaatttttttttaaaaaatactgtgcttttataaaacaacagtagaacacaaaacagaacaactaaaaaataaccgtagaacaacagtgaaaattaaacacagtacacactataaaatttaaatacagtatttttgaaaaaagttttgtcccacaataaaaaagtaaaaaaagttagaaatttgtaaatagttgtatcttttttagcaatgggccaaaatttaaaatgtagaagtccagtagaatagttgtatccaattggactgaaactgcgacaaaacttgtgatatgtttgggctgacaatgggccgagctcttcttcttcttcttcttctcgctgctcacaaactttctctgtagtcttcaagcagttggcgaagatggcacctgaacccaagaggaggaaactccaaccaccgccatttcgcaggcaatttctaatgattctcatccgttatccttttttcttgatgttcattactattgtgttgagactcagaattggcttcttttctttatttcttctttaaatcattatagattttgtttgtttgtttgtttgttgtggcttctggaatctggattattgtacagaaaacgttttccattaattggtggtgttaactatcaatgtttcatttgattaaacttgatagttttgtagtttactgtatgaatttgtcttttccataaatttagttgcttatagtgataggctgatagcttaatgttctgaatttgttatttttgttattatttattaagattctattacaaatcgtatttccattggtttttttattagatactagtgtgaaaccatattgctttttatgccggttgggtttttgaaatttacattttgggagtatatgattgtattagaagatgtcatatgttgtggaaaactaaacttgtagtacacaatgagccaattggatgaattagggatatgtttttgtaggcattaggtgtttgagagaatcaaataaatggaaaagatatcatctgttgcttgtttccattatcaaattttatttcatttggctaaatcatgcaaatcagtaggcttttatagtgtgcttgatattatatcattacagccaactctcaactctgttttctagatttattgatattgaatcaattgaacgaatttctaggacttgttccacttttggaagctggctaggatacattgaaactctattcacgtgtcataaatctttactgaatgtgatattagatctatcattgtttataaaagaatttttcgatctagtaatttaatttagttgagatgaaattataactcctattatgacttctggaatctttaattcattagcttatgttgtatctgctatcatattatcttagctcttcgatgaattaagtgtgcttctttttatcatcatcatcatccagcttgtatattccttgtataatagtttccttttgtacaaacaaaaaattggaagatgagaatcctttatttcgtattgaataaggtttcctctgatgtaatctatttgggtatcttccaacttgttctaatttactttgtaacacatgggtaatagttttaactaaccttataaactattgttgttcaaaatcatactaagaagtcaaaaaacccttttttcatgccaaattttttgttcaaaattgttttcatatgatagcagtgtagtagtttacaaacgaaattacttgttttctagactagccctcactggaatgttaaagggtttcacatattacactataatgattgaatgtatttcattccctgagttttattctcttatttatgatttgatttatttcaaacctctccactcaatgggaaaagaacaaaataagtacgaaactttctgaaattcatctgttgaatttttcatttgttgcaaaatctatctgtgagttttgtaataaatacaaattgtccttgtttatgaaacatttagtaccatatttttatttaaaagacagtatttctcctatggcaggatcgttgctggcagcgaagaaagactagacaaatcggtaagaacttctgtctcacaaatctttcatatgctgttatatgtatgctgaattatcaaacaaacataccatgtgatagaaccaggttccagtagcccaaattggtaatgccaacttgaggattcaacaggctaaaaattttgctatatcgcaagcacagcaagatggttccactggaaattttaaagttttcgattcaccatttggaaattactttgttcctgtagttcctactcgaaaggacctagccgcatagttccatgtatctacagcactcaactttaatgctggataagtatatatctgagcttccatgttgcagagattttgcttctaaaaaatcatactacaatgcttaaatatataggaaaaattaaccaatgtatttcctagtaagaattgcgtccatcattatttagctcctaatcagtgcattaattgagatgaaacttattttctagtacttttattgataagtggtttagtgcaaagctggaatactggattaactgataccttctgtaatgtataaaatgtggctgttacagaaatgtgaatctatctcctttttcttttctttttgagtcaaggaattgaacttaaaagctgtacccctccttgccccaactcaattactatagctacaatctaaacatagcctatgttgagagcatccaaatcattagcaaagtgaaaatctaaagaaatgttgttaaaaaaagtgctccaagtgaactaaattagctcaaaaatttagagtacgaataatgtttcacagcatatagtaaataactattcattctttaaatattattttcatgatttctttctttctttaattctt

SEQ ID NO: 243801 - DNA, 1559 bp, Cannabis indica
tgaggtggtatctcttcagtcccgatttcaagtacaaataaccttgaattatcaccaacctgagtaattaaaagaaacactctgagcaatgtgaatattatgccaagtgacatttgaatatcatattagacacaactttgacatggttaaacagttcaagaatggatgcttacatagatataaccacacatgtccatgcatacacacttagctaaaatagtacataattagcctggtctgtcacaatatcatacaatgcttgggctataataattatggtagaaaaacccatgtcctattattttttcataagtcaggggccaaaaattacctaagacaatacagagaaaccatgttgacttatatgaccatcttatgatacggaaaagaacctattatacatttaatgtatataaactgacccttttgacagctgcctccagaagctctttaggacatacaagattaacaggttcagaaactacacccaatggatgttcaagcgtctccctggtcttcaaccataattgtgcacactgacgagctaaactgagagaacaagaagcgtaagcataggcacaaaagttaagagcgttaatgaatgtatgccaagaagttattctcattgaataagcattactacttattgataaagcatagttctgtctgtactccatagacaccggactaaaaatgataaccatcaaagctgagaaaataaataacgtaacaaacatactacacttggaagttggaacttttaactttacatttactgtcggattctaaaaatacttctaattcatataaatactttggatatcctcttggaactttaatttcagatgaaatctaagtgatacagaaactgaggattaaatgtctttgctgtttgtttaggaaataatttctccagtggtaaaggatttgctcaggtaaaatttcttcaggtaccttttaatgtacctttcctttcatgttttggcaaacttgaataatctccttgttcttaacccttccaatctcacttgaaaatcattaatttcccatcatagtgggtgttttcttggctggtttatcttagaaatttaatccatatgaattggttcaaagcaaaaggcctcactctacagcacttccaatgtagtgagcctcaaaacaactagtacaaaagcttagttccaagcaattgctcatgaacacacattattggacatcacttctctaaattaagcacacaatattacttcaaaacacaaataaaacttagttagattgaatgctatatttgacatacaaacttctcggtgtaattcttatacagcataaatcaagatatcttacctgcgcatccgaccaaaatatcgagcacgctctgtcaccccaacaaagcctctagagtctaggatgttaaaagtatgagatgttttcagaagctgatcatacctagcatgtaaggaaagaaacactcaaaaaaaacagcatattaaaacataccaactcctgaattgtaaataaacatatagaaataaaagcttaaacatacgcagggatcggta

SEQ ID NO: 243802 - DNA, 1454 bp, Cannabis indica
tttgggttacaaggggctaaatgcaaaaacaatgcaacaggctttagtatctccaaagatattgacttagaagcttcaagtgaagtgttagttggtggcaaaaaggatattgtaagcccgggatcgtttctttcaagttcattcattagcaaaagtagtgagacctctaagatcagtaaaaagaagtttaggaccaagaaaagtacagaacaaaatggggatacaatgcctaaagatgatacaaaagaaggtacttctttagcaactaaatcaagtaagacaaagattggcaatgctcattgttcaaaggtaagcaaatactgattacttagaagaaagaaacaagattagtacttttttctcgacctgaggaactaatagaacagtatttcagttaaatgcaagcaaggaaagacctgaggaagtggtcatggattcttcaacaaaactcttgtctgataaggagagcaggaactgtattagaaagggaaaactggtgaaagcagctaataatttgcaacagaaacaaaaagctcaacatgtggggcaaataaaatttcaaggacaaatgagcctgaagcagttgtaccctgcaaatggaaaatctgttgtagtggtagagtctgctacaaaggcaaaggtcattcagggatatctaggtgatatgtttgaagtgattcctagttatggtcatgtacgggacttggctgctaggtctggatctgttcggcctgatgatgaatttagtatggtgtgggaagtaccttctgctgcctggactcatcttacgagcataaaggttgcgcttagcgggtacgaattttcatcttttttaatgtgagattaatcaacctgaagtgacaataaggacatgatgtttatagtatactcagggccatttttacaattaagctgtggaaaattttgtggatgctaatatataaaatgctaaaattaaatgttttatctcataaaaaaagatcaactaaaactttgggatgtgttgttgagggacaattccttttgtttagctaattcctaattgtaagaaaaaaatactgattactctagaaggttaaccaacattttttttattgtatgttttcattcattttcttttctttctctaatcaattttgatgaaatgtttctgaaaattctcatttttctttctttgcattgctcctcatcagagcagaaaatcttattcttgcatcggatcctgatcgagaaggagaggctattgcttggcacatatttgagatgttgcaacaacagggtgccttacgtcaaaatatttcagtatcaagagttgtttttcatgaaataactgaaccatccattaaaaaagcactgctatctccaagagaaattgatgcaaacttggttcatgcctaccttgcacgacgagctcttgattatctgattgggtttaatatttcaccattattatg

SEQ ID NO: 243803 - DNA, 1560 bp, Cannabis indica
cttatacacgtgataagtaattatttgaactttatttttggtactataaattatttagaatttttctaaaatttacaaataattataaatagttacaacgtatgtaattatgaaaaaaaaatagactaattttttttaatactgtcttagcagcaataatctatcatgtttgggtcgataaatgttataaatagaataaataaaaaatttcaaattcgatagggtgctgttagaatgtacatacaagtctattatgattcataaaaaaataaaaaaaactttttttatgccaaaacaattaaaaatctacccaatacaccatttgatttactagtgtgtgatctaggttacaatcttatatacttttctatatattttactctaaatttaaatatgagataaatggcacaatattatttttactcttgtctatgaaaaattattaattaaagaagcatatttattatatagaacttgtttgctaatactaattattaggccttatttaattaactataagttatatatgtagagataatattatagctaggttaccaattattaggccttataattaattaatttagaactttaattaagaactcatgtaattacacggtggccatttccatatttggattagttgagcaatatatatattttgatattccctcaataaaaatatatatattgatattcaataatatataatttttttataaacaataatatataattagtgtacatatatatatggacagctcagtggttgtattttaattagtgtctgcatatataattataagaagaagtactattaattattatctctatctatggcttaattattagcaattacaatttaatttaatttaatcaaaatatagctagattaatttatatgtgcctaattggaaaaagtgacaatcaatcaacaaaaggaacaaaaataaaaacaaaacatctcataattttagagagagacacaccaagacaatttagacatatatatatattggaagtggtccataccataaataaatttatatgtgataaatattaaattcagaaaattcaaacattaaaaatttaaataataggaaattaatttaaggaagctcacaaacaaaacctagctaccaaattttattcagatatatatgtttgaaattgaatattgtaataatgattaaggattattggtatagatgtcttcagatgagttttttgcccaatttataaaatatatttcattaattaattttaggagaattttcatttttatggttattaaagattagtttgcaacaatatgattttcttctcaaaaaaaattattttataaaaaaatttcaaaaaaaatttaaaatataggaaaaaaaacagcataagatatgattagcttcttatagtatctgttacctttgattacttttacttaatttttctattttttttaactttttattcgattttcttataaaataacatttttgaaaaaaaaaactttaattttgcataaaaaaatattaaaacccatagaatttgtaatttttttct

SEQ ID NO: 243804 - DNA, 2365 bp, Cannabis indica
ctttaaatatagtacaatttaaaaaatataaaaatactaattaaagtattattaaaaaacacaagataccaaaatatatatatttttcataaaaaatacaaacatactaaaaaggtatattccttatacagtaattttattgtagagttgttttggataaggttggctcacatattaattcacgatcaattaacagttgtaataataacataggtaataatatactctttctacttatcttcaaatagtataattttttttttttaggaccgtcattaaaattacacataattaaataaagcaataatttataattgacggagacacttcctcgaattaggatagttcatcatctaactgaagggcatgctttgttaaaccatgtgaatatattgataataagttctcacgtacgtaagactaacatttctcgaagaagacataagtgtgaatatattgattatgaccttccgaacgaagaaattaaataagtctctcaattaaacttggcccgatccaatccccaacatgggtagtgattttaaaaaaaaatacactattcaagattatattatttaaggttgcgttattataacgtgacatctaatataatacatacaatgaaaattatatatacaaatatatatatgtgtggataatataaatataatccattgcttcagcataatcctaccgtcatcttcatgatcataattaatttctacattatatcttatatattgggttaattaaagttttctgaaatttatgtaaattcaaaaggataataattgtgtaaagagccaaagaaaggtttcattatactctcattttataacttttctcatatctatatctaaataattgaaatatttgtgctcctaatagttcttcccacaactaaaaggggtgctactttttaatggtctagatacatatgctctctcatctccaataatatcactctttatatatatacatagaaatatatttatatttatatttatatatatgattgatctcattccctccattattgtattttagtgggtttctttaaaatcccacattaagttgcagatgttacctgccctcatgactgatagaataacaattattaacaaatttaatcataccatagacataataatttagtaggtcaaccccacaattaattttaactatattttattgtactgcataagttaaatatatttggtatatatgtatataacatgtaactgcaatgaatatcaatggaaaatttgagtttgaatacctcaagtgtgagattttataaaataaaaaatatctcatattttgtcactatcttaaatatgtcaatctttcaatcttttttaaaatatcccttttataattcactccattctatttctctttcttttgatctctttctctattctctttccctcatcaaccatccaccatcactataaatgatcaccacaaaatttatcaaaatatctattatatatcagctcacttaccatactcattgtttaattttatgtaatttttcattttctttttctctacctccatttttgttctcaatattttcattacatctttatagatgttacacaaaaatgaccaaataaaaaatattggttatttagaacttaagttcatcttaaatatcaattaaaaaaaataatgtatgtatttaagctaatataaatacaaatatatatatatatacctatatatacattattcaagtttttttggaattctttcagatgacatagttcgaaaagaactcgatgcccagctcaacgaggtcttaaaaatcaatattttcataaaaaaatttgctaaatgaaacttaataagaacttgataagtgcttaatgttattcttaaacaaaagtataatttttcatttaggtgaccatttgaatgtaatttttttgaatttagatatttttttccaagatctaaacgttcgtatgtgtacatatataatttagaaatttacaacttgaaaacataccaaatttcaataaatatacactttttcaggtggttttaagtttcacactttttaaacatatatatacacatcaccaatgtgtagatcattaaaaaatgcccaaattcaaaaaaaataaaaataaataatacttcatacaaagactatagtaaaagttatgcattttttaagaattgacattaagctcacatcaaggagctatctagttcctattaagtttcatccaaaaatatagtttttgtataaaaattttgatgtttaagaccccgcttacttggacatcaagtttccatataattctataaaatttctgcatatttcaacattcactactacaaatatcataat

SEQ ID NO: 243805 - DNA, 1369 bp, Cannabis indica
gggttgcttggcatttttctatatatatatatatatatttgtactgcaaataacgagagacttgccatttaactctaagaatgtaatatttgtgccattttcaaagaagatatatattttgtttaatttgattatttcaagcataatattgttactatatattataggggaattttatagagttgatactagttatttcatgaagtctaatcatcatttggcattggcccaataataataaaataaaaataaaagtaaaagaggggttttatttctctcaaatagcagtgtagtaattggattaatgaattttcctcaaactcataataaccacaaacaaagtgagaaatacacatatatatatgccaataattaaattgtgcaaaaattaagtaacaataattctattttctataagataaagcatcagtttcaaatttataaatagaaccaactaaattgacattaattgtatatataatattcaacatcatatttagaatattataatcgttcccactaattttagggttttttcttttttctttttagaaaacattccttatgtcctatagaacttaattatatattatatagtcctttccatcatcataattaatgattaattaaggtggatataaatatatatgattaatttatatatttaattagtttgttgaatcaaaaaaagatgaataattatacagtgcttaattagttacaatcaatcttatcaatagactagagctgtcatctcaatctaggcagaagaagttgttcaatttaaaagctatccttattaagtttgcatttatactaattagtgaaattgaaagtcatgatctaattggattgaagtaataatttaagctaattacacaatttaatatgtttaattccactacaattgtgtaatttgaggtaattaaagagttttaattacattcttcaattctcatatagatttgagtgtaactacactgtaaaattactaaaaattttctatttaaaatattaactataaaaaaatactatttaattactaattatttgctaaaaaaatattagaaattcatatataattactatatttaaatacattatattttaaaatataatgtaattactagatgtaatcactacttacactacaaaaaacggttactttaagtgacaaatttttagtcataacataaattttttgtgattaaatgtgatttttagtcacaacaaaaaattacttgcgactaaaacatagattttagatacaagttgtcactaatttacttttagtcacaacaagtattgtaactaaaagcacatttagtcacaataaattgtaatttttataactaatacttttaatcac

SEQ ID NO: 243806 - DNA, 1257 bp, Cannabis indica
gaggtccctctgccaccttcagccttatatttccccaactgcaaccaacacattggtcaactgttgaccaatgaaattgatcacgggagagaggaggcatccttccttaactgatgcaattgagtgatcaattgcgacataattaagtgatcaattattgttgtcagaacactgaaagtatgagaaaagtcgatgggattgggtaggttttgaaaaaatttaaacaacatatttgttggttgatcacaaccaccaaggatgcttgcactattttctcagctaaccccctcgaaggcatcaaatcaattcattttgattgtcttctctaattcgaatttaggataggccattttctctgttatttcctctccccccaagctccctctgcaaccttctttcttactctcttgcttcctctctcgctcttcatcgctgccaagctccctccaccaccttcagccctatatttccccaatcaccacccttctctcttgctctctcttttcacagttgttagcgacgattgtctcttatccattctctctattcagccatctctgtccaccgtgatcaaagccacattcgccacctccatccagtaaaatatttataatatattatgggcatgtttgatgcattttataaagggaaatttgattatttatgcatactaatggggggaattaattccctaaatttatacatttcaaaattttaaaaataggtccactttacattaaatccaaaaatacacttgagctcgtgcgtttcaagggttttagggtggttgaacttgtggttttcgtcgctctagggtggagacggtgaaagttagagagagataatgagagagtgaggataaccaatggtggacgagggatgctgtgctgaagagtgagagagttagagagttggagagagagagaattttgttgacatgaaagggtattttcgggagtatgagatattgaaagtatagatagtatacttttaattgggtagtatattaagggttcatgctatacatttaagcatggtacctcaaattttcctaatattataggaagttatttttgtatggttggagcttaatttttcaaaattcactttctattttaattaaaaaatatacttagagagcatggttagaaatggtcttacaaactatcaaatcttttgaaatacactatatttattcttaaaaatggttttatttttatgtgtattattatactattattatattgtattattatg

SEQ ID NO: 243807 - DNA, 4851 bp, Cannabis indica
agagagagagagagtgagctgcttgagagagtgggtcaatgtgtgtgtgttgtgttttcggtggtgtgtgtgttttgggttcatttttatactatttttttattaatgaaggatgaaaggggaagtttatggaatgaaaggaattaaaatgtataggggacattattttgatatgggtttttttttattaagaagatagtgaaattttcctatatggtggtggttgttttgtgtttattctaagaatgtcgtgaagttatagtgacacatgacctgttctgcagttagtaaagatattttcttcataatataatatttcagaatatttttgtttaaataaaattattattttaatattaccattaagtagtgtgctaattaaattttacatattttatataggtatatttttattttactcacttggtcaagatgcaaggatctcaaaagataagttttattacaattctctttctttaaaattttactatattattaatttatatgacataattttaaatttttattttaacgtctatttatgaagttactaaatttatttatttgatatttttggtctaggtattaacttttctagcaatagttcttgctttcttggttggattaagatggactcaaggaaatctcacaattattcaggcggaagttgtagctctaataataattgcattggattggttactagaattaaacttcctctcaattcttttgagcctgattgtttagacttaatctctacattttttgagaaattttttctccataatgatttaaactctctttttgatgtttttttagtttactgtccaattttcctaaggcgtcccttattcatacaaattattcggccaatataagtatgtatgaattagttgcgaacgcacttagggtggatggtgaactaatttagatggaggatctttaatattttctttatgatgtactccacgttaatttttttcccggtcaaattttgttcattgtctccttaatgcatataacctgccagctaggtttatttcttgggtgatgacttgtatgagagctacttcctactctataatgatgaatgacagagtgcaaggaagtttcaaaggcaagaaaggtctgagacaaggtgacccccttcccctctcttatttgtcttgatcatgaagtaccttactaggaggctacagttggctgtctaccaatctacttacaggttccatcccatgtgtaagagcctaaagattgtaaattgatgctttgttgatgatctgatgttgtttaacaagggaaacatacagtcaatataggttctcaaggaaatcctggatgaattcactgctaccacatggcttgtaatcaataccaataaatctcaattttattttagagggattggagaagtggaaagacagttaatcttgacagagatggtcctcttataaggcaattttcctcttaaatatctgggagttcctttgaggcccaccaaatggagagctgaagactatggagtgattgtaaagaaaataaaacaaaggcttcacaaataggctagcagacacctttcttttgcaagaagagctcaacttattcattcagtgtttacttggtctgcgtaattactggatgagaatattcattcttagtgttactaaggaaataaaaaaactttgtagaggatttctctggggctggaatgggaacaaaagcaagttacatgtggcagcctgggagaagttttgcctctaaaaaacctatggaggattagggttcaaagatgggatcaaatggaatcaagctattctcgctaaatatctttgggccatatcatccgaaagtgacttactttgggtgaaatggatcaataatatttattaaagaataactccatttggtcttatgatctcaagaatgattcgagctggtattgaagaaacttatgccacttgagagacaaatgtgctagcactgaaatccataaggcaagggttgtgggaagattcaagacaaactggctatataacagccggctgcctcaagttcagtttgagttcaacaagagtatatggagctccttaaacatgtcgaagcaccattttattctttggcaagctgtcaatgcccaactcttaactcttgataaattcatgcaatttcatattgcattggtttgcattttatgccctgtttgtggagttgtagcaaaatcaaaccagcatcttttcttcgaatgttgctcctctcaaagggttgctaatctgattttcaattggttaggctcaagagcttggtcaactgaatacgagggttggaggaactagttagtgttgaacaaggtgaacaggaagcaaatagtgcacacatcagtcatggcagccgtgatttacagcttgtggatcaacaattgcatttttaacaattacttgagcacaaatttgactattgttcatggaatacagaaaatagtttattattaattacaaatagttaaaaatagaagccttaatagccatgagaggatttatgtagagaaattatgttgtaattagtgaggagccttgactgtgtaagttgttttgctaatgttgtaattgtttgtgattaatgaaaaataaaccaaaaaaaaaaaaaattattcattttgtttttttttttgacaaacctgaagttttcattacacaagaaggaagaacaaagtcaacaggtgaaattggaaggcaaacaaccattccaaacgcaatcgctaagaagcctgagaccgactttagcatgatcatgagccaacatgttatggctcctatgaacatacctaacaactagtccagggctttgagctagcaaggctttaatacaattaattacatcacttaaaatagaattattacaaaagacattattaattttgtccactactaatttacagtctgaaagaagaatagaaaccgacagtttagtagcttgtaaccattgaaccgcagccaaaatagcttttgcctcagcaacatccggaggaagcactccttgaattggaatcataaatcctgctttaatgatcccacattaatctgtgacaattgaagctaagcttgtcatttgagagaccacatcaatagttgcatcagtgttaacttgccaggtacctacaaccggggcagggattggatcttgacactctggacttgatgtaccctgattgaagttattggaaaattacaagcagactagaaaatatcttgaggccgaggccttttatgattatgaaacactttattcctataattccaaagtgcccaaacaaaacaaaaaaggtatagcaatctgttgtgaatcaaagatctcaaaagcagcaacaaaaaaactatccatggagttattcaaattactattataaaagctaataaaattcgaatatttccaggcttttctagcatacttacagtccaagatggcatgtttcactgtctccgtgatttgatgacagatcgggcaggcaggggaaggaatgatgtgacgaaaaaataaagaggaagcaacagggattgagtgggacaaaactctccaaatcaagtgtttaactttaggaggaacatttgaagaccaaactttagtccaaaacaacttactactatcaaaggaggagcctgaagctatactacggtctgtcaaagcaaggtgataagcactcttcacactcaaaattcctgaagattcttggcccaaaatcagactatccgagccacatgcaccagaaattggaacattgaggatatgggttaccgttgaggagtcaaaatgctgattaagcctatctaaatcccaaccacccgatgatgaaagaaagtaagaaagagtcgagtcaggaggaggaggggaggcatagaatttataacgaaggccagggatccagtgatcttgaatcgcatgaatattcaagccatcgccaagtttccaaattaaccctttcttcattagatcacgcccccaaaggagactacgccaggaataagaaggattaaaaccagggccagcttcaaggactgaagaatgaggaaaatacctagctttcagggtttgactaagcaaagagttaggacacataagaacccgccaggcctgtttagcaagcattgcctgattaaagtgaataaaagatctgaatcccaacccccccaacaaacttagatttacaaactgctacccaatttttccaatgaagtttcgaattatcccccgaggaaccccaccaaaatttagaaattagagactcaatttccttgcaaagtttagttggtaatctaaaacaggacatggaaaaagtaggaatggcttggaggacagctttaatgagagtttccttaccaaccctcgaaaaccatttatgatgccagcaatgaacaatggtggagattcgatctttaagaaaggcaaaagctggatatttggacctagacagacactgaggcaaacccaggtatttggtgataaacggcctatcctccaaatgaaatgtgtgaaaaaagagatctttaatttcagaatgggtattgggcgaaaataaaatagaggatatgccaaaattgatcatttgtccagacgctttagaataaagagtaagagcttgattaagagcagtgcaagaagtaggatcagcagaacaaaaaaggatgctatcatctgcaaataaaaggtgagaaatagaaggggcattcctagagatggcaagtcctctaagaaggcctcgattttgataattgctaagaatagcagagaggccctcagaacagagaatgaacagatagggtgacaagggatccccttgacgtaaacccctagtaggct

SEQ ID NO: 243808 - DNA, 2129 bp, Cannabis indica
acagctgtgtcaaactggcccataatagataatgggttatcaatacagggaatatccctttaataaaaaaaaataaaagaaaaaggaatatgtcaagtatagagggcaatattgagaaagaaatggttggttcatttatgtaaaatagggttagctttaggtaggagtaagggagaaggagttaaaaaggaggctaatggtaatgttgcaatgcaaccctaattatgaaactattcattattcacctcacctacccacattaacaattaacaattaaataactctgaaaatcacgtaagttcccaactttcaacaatgaaacgcgtttatcaattattattattattaattttgtaaataaaataaaagcatatggataataagaaatccaaacaaatgaaagctggctattggttttggcagtggccagtaaaaacttcaaatcaaaatataatataaggtcaaagtaaggtagcaactgtgtcgttttgtccacgtaggcaatttcctcgtgctgtctgaccggctatttccggtttacttacttctttgcagttggatatgcaattgggaaacttgtatctcttctttccctataaatagaaactgctctacttatgttcctttttttcctttcctctcctcctattatgtacttataaatacttttctcaaagccgacttttctccagccaagcctgccattttccgatcactcgccggataatttcttccttctttctcgccattctcgctctcctctaaggtcgaagctgttcactgtttttcttcttctctttcttctctgtaatctaatccttttgaagttttctttgcgaaaagccacacagatctgctttctgttgatacagatttattttttctttctgataaaagtctgatttagtctgctccggtttcattttcatactggctgatcttgatctaccattattgtattataatatcctttataaaattctcaaggttaatttcgtaattccgtccagaaagtttagccgttcgattatttttattattattattttcagattctgattttccgggtttctgaacttttcctacagatttactaaaaccattcagtaaattatttaatgattttaaaccctttttctttttaattttttactacactgtttttgttttcatcttagttgttgttgttttttctttcctatttatttatttattttttattttatccattttaagttgaaaagttgacttttgaaattactccaaagtctccggtgtttagagaagttaatagtctttttttttttttttttttattcttcttctttaatttctgtcaaaataaaaattaccctaattattttaattttgtacaagaaggaaagtggtagttgttgtgtttattaattcttttataatgagaagtttggtgcttttaaacgctcagatttcggtagcgagagattattgggagagacatggatggagccaacagagaaacggggctaagaaacgtgggctctcattgctccatctctgatatggatgactacgatctctctcggcttctcgacaagcccaggatcaacattgaaaggaagaggtctttcgacgagaggtcactcagcgagctctctgttggtctcggcaaaatgggattggacaacttggatagctcctcacctggttaccgctctggttttgacactccggcttcctctgctcgtaactccttcgagccacatccaatggtggctgaggcatgggatgccctccgccgttctctggtccactttcgtgaccaaccggttggtaccattgctgcgtatgatcatgcttcggaggaagttttgaactatgatcaggtcttctctctgaacgatttcttttaccttacctttacaaatattgtttagtttgatggtactttaagatccaatatagctatataatttctgatgtgtatataaaattggttgaatttgttgtttgaacattaaagacgcccactgtgactgtactaatctgtaataaaacgaattgtaaagatactaatggataatagtttgggcaagaatgttaagatattgaataagggaaagttggttttttgttttaaaaaaaaaaat

SEQ ID NO: 243809 - DNA, 2933 bp, Cannabis indica
tgtgcggaccaatttttctcagagatctcttcttcagacatcaagcgaacattgagtaagttctctcttccattatttgcatgaatcttttaattttaaagtttatgttctgcaaatttatgggtttgatgctctttgttcttggatcttgaatccttattttgatcggccacaatataaattatgtcgtctgttaagggtcggcctggctcaagctttccatgtatttcattttttatcattctacccccaatctgaggtaccttatgaaattaggttttgaaaacttaaaaaaccctttcctcaaaaaattccatcgaaaaaaatatgaaatctttcgggttgaatctaattttctctctagtctgagtgttggagaagtttttcttaaaaagcattctctaaactgtttggtgcatcacctctctatccttcttgttttgtagatgaacccaacttaattatgggaagatgatcatcaagtagacgacgaccttcttggattactctttaaggactactcgatgctctgtgcaactatagcccatcctcgtctacaaaatgagcctttgttttcttctgaatcctctgagggaggatttttgagtgactctttagattccgattcccataaccatcactacaccgactaggttagaggagatagctacaattggcatatttgggagttgaacaaaagttaacggtagttcttactggctgcgtggacatatattgtccggcctaacgtccaggatacccttcccgctgggcatcccactccacccagaagacaatccattccaaaaaagttattcgtttatgttgctcaacacacatctaaacctacccctcctaccaggctaaagctcactcagacgaagaaaaccacctaagcaatgttggcttcagatcctcatattaggtaattgaaggagacccaagcacaaaatgaaccagagttacaggaaagttccgaggaggaagttgaagaggaaatggaggaggtctgtcccccttatattgatggggactataaaactgacttggaatccctatcgccttctacatgaaaacttaaggctagggtggactatgctgaggaggaactctccgaagctatgcccgtccctaggaaatctaacaggccccaacccaaatggtaatctccttcgtctaggctgagagtaaagaggttgaacaacctctgtgctacttgtttgtttaatgaagtggtggtctccctccagcatgatggcgaactggaaaatagacttgggagggcctggacctcatgccgagcaggtgccatttttttaggattttatgctctaaaatcaagtatttaatggacaatatattatagaatatattaaatacaattataagataaataaatatgttaattatagaagtataattaaataaattaataaatatctgaaaattttatattcaaatagaaacgatatgatcttgtaagggagtacaagagaattaaaatcatacaatatgaataaaataagtcggtagtgtattaaagtatggaatatttaatatagaattaccaagtacgatttattatgcacaatactctagtgtgtataattttaattcgaatcacgtatgtggatagacatgtggtaaaagtactgtgtataattgttatgcccatattttgagcactgaatatgaacatgacacatgtcatataagtctaaaagaatgaagaaaataataaaatgtgaggaatgaataaatatcccgcctcgggataagctacggttaaaaagatgtgataacctcgcgtggcactatcaatgcaataacttacggagataacaggatttcgaaacttgaccgagatgaacaaggcatgtgaatagcatgaaagaatgagttaagtggaaagggtagataactacttcttttaagagcttgcaactcattgacccacatacttatgggtatgttgaatgattaaggaaaataagcacatataatacaaataatttcaaaagactaagtctaaaagttgatctagaaaggttatggtgaggacaaacattttaactagcatctcgcaaaatacaacaagctatccctgaacaccgtcgaataatgcgagccatagctggaatgtgtcatctcagtaaaggctaactactttcggataaggacaaaaacatagttactagtagttatttcattttatccacatgttaattgaaacatggagattgtctacattttattaacggttaattagataagatcaaaggagaataaatgttattcctaaattctctataaatagggacaaaatctaaggggaaagggattgatcaatttgggaaagtgagaacctatgagattgagtgacgtttcatagttattcctctatattcgaagtatattttcaataaatactcaaaaataataatgactcgtgaagtatgtagattttaactacaaaatcacgcaaaaattcttgagtattttatatacatagtaattataagtattaattctttatttacaagacttcatttattgttaacaaaaatttgagttaacagtttggtgctttcattgagagcctttgtaaaaaaataactcaaaaacacatctccccattatttcattacatcatggaaaatactcaacatgacgtgccattcatggaagaacagacaacacgtcgaccagtaaaatagcccaaggggcataaactcaaactaaccaaggaagaggtcctactaagaggaactccaagagaagtgaccccgaggaagaaattcctaaaaaaaaggagttagatgcgtatggccccacaaaatacatccccactattgagttaaaaaatcaaaaaactctatcaaaacgatgcacttccagtgctagacgagcagcctgcacaacgaccgcaaggg

SEQ ID NO: 243810 - DNA, 2532 bp, Cannabis indica
ttgtgttgaggtgatgactgttttaggttaggcttcattcttgattttctatcaaaggcaacactgattggatttatggctggagtagccatccttgtgtcactccagcagcttcaaggattgcttggattaactcgctccactaatgagatgcaactacttcctgtaatctccactctcttcaaatatagaaatgaggtgcttcaatttctttattacttaataatattaattgtttcctaattattttctttttttgggcctaataataaaaatgtttatgatttttcagtggtctggccaaatcatcataatgggtttctgtttcctgacatttctactaggagcaaaacgaattgtaagtaatgatgtagttactatttatattcatattattgctcagagcaagtgtaaatactttattatacatttgaatatctttatatatttataaataccagagcgcaaaatggccaaagttcttctgggtttcagcagctgcaccattggcttctgttgttttttcaactctcgtggcatttatcctccaaacgaaattcaaacatgttcctaaggcaagtaagaatacgttatactcctccaattaatatttaaccttgctcacaacgttactgataaaatgactgaactaactcaacaagatcttaaatatacacttaattatatttatgcagatacttgtatacttgtattaaatatactataaatagtgataaaattttgaccccatttagtttattggttaattattgtcataagcagattggtaagcttccaaatggtatcaaccctccttcagcaaacttattgtacttcaaaattgatccatacatgggtcgtgctatcgaaataggcattttagccggcatattatctctcgcagtacgttccactcttttattcctataattataatgtttttgtatattaatacataatattagatcatatgctcaaccatttggaagtactggttccaaatgagggtccatttgttggtatgttcttttgatgagattaaatggccaagaatcattaattatatattgagatttttcacaaatatatactattttttatcttagtggtataaactctaaactttctattttgttggctgtttggattggattcaatcaataggaaggaattgcagttggaagaacatttgcttcattgcaaaactatcaaattgatgggaagtagagaaatgttggcacttggccttatgaatatagctggtgcttgctgttcatgcttgtaacaacaggtgataatacaatataattctatatatatatatatatatgaagatatgtactcaaagtttttaatcatatccattatcaaatttgatgttagaatgtggaagtatggttaaaaagtaaataggatgagatgtatggtaacaactataaggttccgtctcaaaattaattgggagtgtgtatagattatgtatcatgcatattatatatgatattaaattaccacacattatcaatgtgggtctttttaaatcaaaaatcttgacaattatatcaggttcattctcgcggtctgcggtgaattacgatgtaggaggaagaacacaactctcaaatactatgacaggaatagttgtgcttgtgactatgctatttctcatgcaactgtttattcacacaccagatgtgacattagctgcaattatcataacggctgttgttggactgatcgatgttaaggctatggtcaatctttggaggcttgacaagcttgatttcttggcttgttcttgttcattttttggtgttctattcgtctctgtacagactggccttcttgttgctgtaataattctacattgtcttactctctttaaaatatagtagttatcaaacaaaatttttcattactttctttgatatctaactgttctgttttgggatttgtagattggagcttcagtgttcaaagtaattttacacttggcaaggccaaacactatagttttgggaaacataccaggaactcaaatctacaatagtctttatcgttacacagataccaaaagagttccttccttcctcattttgggaattgaatctcccatctactttctgaactcaacttacctccaagagaggttagtacttagtaatagtaatttcttcccttccttccaacttttccaactatagtaatatactctcttacacttgtgattattcatcatatagaatttgctgtctacaaactacaaagttttttttcttcgcgtatatggtaaattttgaaattgtatttgacatttgactcgttttatttcttctaggatattaagatggattcgagatgaagaagaaaggattctaagagacaatgagttacctttgaaatgtttaatcattgatatgaccggtaatgtaattatgtattcatattaaatttttgttatttacctgttagttatacaaccaaatattaccattgattcatttttgcgtgtacatttttcagctgtaacag

SEQ ID NO: 243811 - DNA, 2004 bp, Cannabis indica
ctcatttcgtattcctgtctaaatcgatccgattcatctgtttgttgatagtactcattgccaaatcgcccatctgatgaaagtgttttggaacaacaactagtggttaccaaggagcactatgcacatagattagtgaaatagaaaaagaaagaatatttgattgacaaacgtcatttacaagataaggtttaagaaaaatggtgacctgaggttgaatcaaatttgattcctgtataagaagtggttgaagctgtccaaccaccatgttcagctcggttagctccatttgatgaagaagaaccatctggtatagcttcaatcctctctttaatcgttaaaaccaaatcatttcgagcctcaacctcttcatttgaaagccctttaaccttataattcaccaagtgtatgctcctttgattattatttattagaaatttaaaggagaaatgctaaatggcatttacctatgtattaatatcgctcaattaaatattaaattttatataatttaatgtaataaattttaaaaaatataactaattaattgtaaaatgaataatgcttgacaaatattaattctcaaatttaaagtggaccaaagaaaagaaaaatgactcccaaaaggcaaaaccggccacatcccatgtcatgtcatgtcaggtgatttttaatccccgatgcctaacatagaattaaatcaataaacactctttaattatttactatgcataatacatatttattgggaacaaaacctttttaaaagcaagcctttgcaatttgggaagttcctccagcaaacgagccttggttcttctaatctcggcgttcatagcaaccgcactagccctgttcttctctgttgccgcagcctcccatttctaatattattcaaaaataaataaataaataataacaataataacaacaaaaaaaaggttaagtttttgaagcatgaaattaaaaacgattagaatttggctattcaaaagtaactgttccatataaaatccaatacccatatagcataaaaattggtttttttttctacttaaattttcagggaaagcaatggaagagaaagaaagatagaagacctggagggcagagtcgagttcggcctcaacgacgccgtatagacgagagaaagcatcgtcgccaccatgaagattctgagcttgatctttacgcttctccaaatcgtacttgtcgtatttattacaaatcacgttgaccctcgtcaataaatctctcacactcatcttctgcactctctcttttctctgtttttgttttcagtttagaaatgaaaaaaatctacatgtcagaagaactcagaacagagctctttccaagaaaaaccaaaaaagtcaaaaggacagtgacgaccgccccaggtgatagtgataatcaaaaaaaaaaaaacacagaaacaattaaaaaaagtgttttgaaagaaagggcgaagattttaatgtacgtggttgtgaatggttggttgggttgtatttgtatgaataaaactatgtataatacaaaataaaggaatcgccatgcacaagccaacacgtccaatatagaaggctggtttcgacagtttccatttggcgaaattctataagttgttttggaaaacctacctacatctacggcggtcgttgtcgttttccttgggaacgagaggtcaattttgtaattttattctgaacgacaaaaacgacttgtcgtcctttactggtatctatctagctagttcttttgactatgtatataatatctatttttttcccactttttgagaaaagtacagtgtatccgtgctcaaactaatttgttgtaataatttatactattgtgtcttcagaattttaactttgtgggggtttatttattattaaaaaatatttatacttatattataattactcttactagatttatttaattttatgggggtttttctattattttagtctataattatcaattaaaaaaattaca

SEQ ID NO: 243812 - DNA, 2209 bp, Cannabis indica
tttttaagtaaaaaaattctaacatggatgaaagttcaagcggcatgatttagtacatatcaaagtttgaggggcatgatttggtagatatacaaaggtttggggagcattggttttgtacataaacaatcactgaaacagtaaaattgaatgaaattagacaaagttcttaaatttaacaatctcaatagttcaagggaaatttctaacgaccaaaaaaggtttagggggcacaattgagttgatattgttttgaatattgcaattaggtcattgttttatttatttttcattgctttgtagttacttttttttttgttgtttgtatgatgtttgttaagttattttagaattatttttagtttatttttttattttattttattgaaacacaatatatttataattttgaaattttaacataatatttttaaaaacttgctataataaacatataaaaataacaaaaaaaaatatttttgtaagatcccaaaacgttttctccaaacacaattttagctcttttgtagaaggtgcaaatggggactaaaagaataataaagtaaaagtttagggcaataacaagattaatgaaaaataatatagttaggaaaattctatttgcatcctataaataataattacactccattattaaaaaaataaacttaaataatttttaaaaattatacttaatattttttaatttttttttctatgttaattttaatatttattttttatatattttttaaaattatgtatgtatatattttattttttgtaagaaagttatatataatttttttataatatttaaaatattatttatttttatttaataagtatattttttaaaaacataaattataagaaataaattaaaaaaatattaaaaatataaatttatataaaataaaaaaattattaaaatttccaaaattttcaagcgtaaataaattttttatatttcaaccgataaaaaaaaaaaaaagctattttgggcaaaactgaaggagaactagaagagctttcattgcgaggcttaattaagcttaattttccgatccacaccagcaacaccacgatcaaaattccacctttggaaaaggggaagaattttttggctaaagaaggaagaggaggtgggaaaccatgataggggtcgggaaagccaagcagtactcgaatgttcttgacaagcctctcagcaagggaaaacaagaggtcccttctgtacttctgagctgaaatttttctgggtttttgttacttgattcgtttgtggcttttctatttttctttatggggtttagtgtacatttttatcggctttcgtttatatgggatttttagagtaattggtttgtgtagtttggatctctctaatttgaggctattttatgttaatggcgatctgggcaattttcatttgagtttgtctgtataattagtgagagtatttttgacatcaaatgatgatttcaggtcagcttgagtgcttttgcgttcttgttttcagagcttgtgcagtacaatcagactcaagttgataacattgctgagttagaacggaggtgatttgcatttgtcacattttctgattcatagtttgtttgttgatcttagttacatacttataaatactcagaataacattcacccaaacatagtttatacattttacttatatttcaataacaaataactgagatttcgataccttcactgttgattcttaaacttagtgatattttgtgaaatatggatcaggcttgaggatgcaggctattctgttggtgctcgagttttagaactcctttgccatagagataaggtataatattctgttggtgctctactcaaaattcacataagcaactaatgacttatagctcatcatgtgatgagactctacattttacaaagcagtggaaattagttttaagctacaaaattgagttgtttaaatgattttaatttcacatgacttttcatgtttggagcatgaatttatcatttgattacagaaatctactcctggtctgaactcattttaaaattgtattcgcatgcttgcatgaatggacaattctgtcctgatagtgaaagtagaaagaggaaagttgtgcatgaatgaatcattatacacctaaaatacttaactgagtagtggaggacaattaagcaattatattctaatttgtta

SEQ ID NO: 243813 - DNA, 1669 bp, Cannabis indica
agcgaaggtccccgaaaaaaatcatttttaggatcgtaaattttaatatttgtagtagcgttaccactatcacggggccaaacttctataacaaatttgtattcttattgcttaattattattattaattgtttctaattgctttaattgactcattgtcattagctaaaagcaaagtcaaatgagtggttagtgtaaagtgtttgtggtgattaaaaaaagagatttctcttcataaattcctctcttacaatctctctattcttgtgcttgcattgaagacattagtgtgtgcgaggtatgttttagtactcattaatatgccctaaataaaatattacatcttgggtcttggctgatgtttatgagcattgatgattattatttaatctgtggaataattatgctcatatttataatatttttagagatatactaattataaaagatactagtagtgtcagtatatttttatgtgttaatatcgttattgatctaactaagtatcacgtcctatataatttaatgtaataatttttaaagagtattgctagacattcgcaagataatatgtttagaagtgttaaacactactgatacctaataataatactcttttcaataatactaaataccactagtaatttatagcaatactcatttaatattttctaaatgtgaatttcatttttattattaattacctttttatatatgtattataaattattatacatgaacgaaaaatatatcgaatattacaaattacaaatttttaaaacctacgtaattcatctcaaatggtttttataattagagctatttccgactaacgtgaagatgtgattttctccatgttctcttatttaaatatttagaaagtgaacaaacaattaagcatggatagtttaggaagattttataataccttttttaataaaatgttttgataaactcttatttatttctacatttaatagagttatagtttaattttagtgtgttataattattgaaactatctgtaatttttttaaaaaaattatttatattttacagaaaataaaatttaaatttttgttgcccgtatgattttttttttttcggcattataaatatgtaatgtaacttgtaagtaattatttaaatactaatttatatcattttttttttttttttgagtaaagtttatatcaaagaattaagaactacatcacttcaaaaataattatttttagtgacaattttttagtcatgggataaattttttgtgactaaatgtgatttttagtaacaacaaaaaattattcgtaactaaaacatagtatttaactataagttgtcactaatttaattttagtcataattaatattgtaactaaaaatacatttggtaaaaagctgttgcccctgattttgcccaatatacgtggaccaaccaaacaaggacacgtagatcaagcaatgtacaatccaaaaatatttgctaagtctttatgccgtaaggtggcttccaggacgtagctcccggagaaggcatatggaaccccatatgctcccggaagctcgaagtaacgttaaggcatctccgcgaagtgtcaggtttctcctgagcaatcaagtcgcatttaatgccgcatgggaggaagcgtgttgggactgctacacg

SEQ ID NO: 243814 - DNA, 3428 bp, Cannabis indica
ggatatgtgttcattgatacgattggggggtagccaaagggtatgaagcccttcaggttttttgaggcctgggctagagagcgttcgtgtggggacataatcaagcaggcttggggtttaagaggaagcaggaaagaggctatctgtggtaagttaagtgatactcgaagagcacttcagaaatggaaaaaggggacatttggtgattgtgatggtctgataaaagaagctgaggagagaattggatggattcaaaaacagcctctgtccgaagacttaatgcgagaggaatcctcccttcaagcaagaattgcagaattgtggattcgcaaagagtctatgtggagacaaaaatctaaggagctgtggttgaaagttggtgataggaactctaagttttttcatgcatccaccatcatcaggagacgaaggaatgagatatctgcaattaaaaatgatgtgggtggttgggaaacagaggctcgaagaattgggtatgtatttaatggtttctttcatgacttgtataactcggacggagtggatttagatgagtctttttttgaactcttctccctatccgtaacaagagaagagaacgataggataaaagccattcctgagaaagaagaaatatggaacgcagtggctgcgatgcatcctttgaaggcccctgggcctgatggcatgccaggatgtttttataggcgatattgggacgtagtgggaagtgaagtcactaccatggtccaattgtttttctctacgggatctttggagagacaattgaattacacttatatttgtttgatacccaaggaggagaatgcaagttcagtggatagattccgaccgattagtctgtgcaactttgcttacaaaattattttcaagattatagctacaaggctaagggaggccattgacaagctcatctctccattccaatcggcattcgtgccaggtagatggatcgctgagtgctctattttaacccaggagttggttcacacgatcaaaagaaagaaaggcaaagggggtctcatggcgctgaagcttgatatgctcaaggcatatgatagaattgagtggaatttcctccacgaagttctcaagggcaacaggtttgattcccgggtttgtgagcttataatggaatgtgtgagaacggtttcctattccgtgctaataaatggagtgccgcaaaagaaatttcagcctaggaggggcctccgacagggtgacccactatccccgtttctttttctcttgtgtcatgaggtactctccaaattgatcaccaagcagcaaactagaggccatcttaatggcataaaaatatcgagatcggccccggctattagccacttgatgtttgctgacgacactattttatttgttcgggctaacaaaagaatggcctcaaatctcttggaatgcatccataaatatgagtcgtggtcgggtcagaaatgtagtttgatgaagtctagtgttttgttctcggggaatgtgggaggggcgctcaagagcaacattctcaaatctttgaatgtgaaggaatgtaatggtgaagaaaaacatcttggaaatccctttgtgttcaagagaaggaagagagaagagtacatgtttttaaaagagaaggtcatgaagaggattgaagggtggaaagcaaaattgctttccttcgcagggcgtactactttggtgaaatctgttgcactttcgataccgctctatgtgatgtcgacaaacaagatcccagtttccacttgccgagacattgaaagagcaataaggaagtattggtggactgggaataaggagaaggatcggtttatggccttggtgggatgggacggactttgctctcccatggccgctaggggcttgggatttcggaagttggaggatatgaacaacgccttgatggccaaattggcttggcagtgtgcttcacagacagacagaccgtgggtaacctgtctaactgagaagtactgcaagaaggattctttctggggtactagtgtgagagcaactgactcgaccttttggaaaggtattttgcacactagagatgtaattaggaaaggctgcatgacgttggtgggaagaggggactcggtggacatatggaagcaaccatggataccatggctggagtatatggagtttattgagcttcttaatcaggtgagaccaagattccccaattttaaaactgtagaagacttaacaaatgagaatgggagttggaacattgagttgcttaaagaaatgtttggagaatccctcggtcaaagaattggagagataaagcgcctgcctccagaccaaaaggatactctggtttggaaggacgctgctgatggcacctttacagttaaaagggggtactttgcgatgctgcaaggtaattctggtgaagataaaacattttggagacaagtatggggaaagtacatacacccaagacactccatgatgatttgaagagtgatcatgggttgtgtacctactagagacaagctgggatttgtgggagatcaatcttgccccatctgtgatgactctctcgaaacggcctttcatcttttttgggagtgtccttgtgcgagagccttgtggttcagtggaccgtttcccatgtgctttggggaaggtaatggtgattctccaaaaggaagacttagttggattctatcctctatgcctccagaccttgttacccagattatcacattcataggttgtttgtttgaaggcatttggaacgccagaaatgaattcttaattaaagggaaaagtgtcgatattgaaggtgttagatgcttcatcttgaaaaggtacactgaatctctgcttactgccaatgaggactgcgattgggttcacatataaacaccagcagagttgcagagaagggggataggctcgaatgtcgaagccttttgtgtgactgatgcttcgtggaaggatggtgttgcggggctggcagttggtgttctggagagacggaccaacacgtcctggtggtttgcgagaaacacaacagcttcgtcggctgctgaagcagagctcctcactgtccagtgggcactgcaggtggcagatcaaaaaggtttcaaagttgtggcgtgcgcttcagatgcaaaggttctagtttcagctctcaataaccggaaatgcccgccgttgtggactctcaagccgttagctctagaagtcctaaatttatgtaattgttttgatagctgtaagttttattttatctctcgaaatgacaatgtcgattgtgatgccttagctagatgggcaagagtaaacaagctttgtaatggctgtattaatagggaggggtcccctgttgtgattcccactttcttactacaatgaactacacatagttctttcaaaaaaaa

SEQ ID NO: 243815 - DNA, 5962 bp, Cannabis indica
tagctccctctagtattggacactcttgagatgatgcatgcacacttgacggtcgctgttgtttcaaatgattttcactttctacagtcaaggatttctttctcataaagctatgcataaagttattttctatatgtgttgttcattcattcaacaatatccaagcatgcaattttttgatcacattacacagtaggcttgaactttaaacaccagacctcaaagactgctcccattaatctcattaaccaaatcttccacttgtgctgcaacaacccaatattcttaatagctgttcccaagaacgaaacaaactaatgaaataacaaaacaaagtaaaattagccattttacacaagtttcacagtcaaaatggtagtatatacatatgtgtatatgtaactgtatgtatatatataaggttggatatatatatcacattagaaaacttgatttttaatacaattgctctcctcattctttcccaaaccctacgccaagtttctctattttcttaacaagaaaataaagagagaagcttaattagcttatttgataataatgtccttttccttattatcatatatattgtttttttattaattttatagagttttaaattataatcttacagcattaacattgctttcctgttaattggtcaataattatctaacagtttagtcctacttcgaacttacgcattctaaaataaataaaataaatgtactttgtagattatttttttattatgaagaataatattacgtaggaatactgcaactttgtcgaaactaccacaaacaaattattcaaggaaaaatggacagtccaattatatgcggacctatatagaataaagtgcagaatacaaacattacactgttgtctttgcgaaaataaaagaagattaaaactcaattaagagtattttatttttcttttctacaatttttagatagatattatcttaaattatcaataatttagaaattattttttaattttacacaattttaagttgtgtttccttcaaaatttgaacattaattttgttttatttttgaattaatttaaaaacaatttgcagttacatatcaagatttcttcaagtgttgtataaaagagagttagttataaccgttattggttatctgttttaggcatagtcagttagttaggattggggtttatctgtacatgtctgttatacctgttgtaactaatggtgtgtataaaaatcagcttcttactctgtttcaaacagagcttcacaattcattctttcattctcctttctccacttcatttcataacatggtatcagatgcttaggcttatggcgtccaaagaaacccagtccactgcatgtagtgatacaccagaagctctctcagttaaagctgcaataccacaaattcttcccaacaacaatctccttccactcaatcttcgattagatcgatccaactacaccttttggcgttcgcttgttcttgctgccgttcgtgcatacaatctcgatggattcattctcggcacaactcctcaaccacctccacttcttgccggtaattctcccaaccctgcttatcaccattggctacgtcttgatcaattcttgatgcactggctcatgaattccattactgaacccatgcttggttatgtgatcaattgtaacacttcgtcggagatctggaccgttttcgctcaactttttgctactacatctctagcaagacttctccaagtccgtggtcttcttcaatccaccaagaaaggatcttctacccttgatgaatatgtccttaagatgaagggatatgcagacaaccttgctgctgctggccaacccctctccgatgaagatcttgctctttacattcttggcggtcttggttcagagtatgagtcgatcgtggtgaatcttacctccagatctgaaccattgacacttcaagaaatccaattcatgttacatagccatgaagtttgtcttcaacagttctctacatcggctttgcaaactgtccaagccaacatggctaatctttctgtaaatggctctagccgtggtcgtggataccgtggcccatatcgtggaggcagaggccaatccacaaatcgaggtggtcgtggaaataggcctaattgtaaactctgtggacgtgcgggtcacacagcacaaaagtgctaccatcgatttgatattaccttcactggaccacaagcttctggtgcttcgagttctacttcgactaatgacaatcctcaagctcatattacagaatctgcaatttctgaagagtcccctgtcacctggtatcttgacactggtgcaaccaatcacctcacagctgatgttcaacagcttcaaaacacaactgactacaaaggaaaggcaaaggtgactgtaggtaatggccaaactatccctatttttcatgttggttctaacagttttcctaccaatatccccaccaaatctttacagctcaaagacattcttcatgtcccaaacatcactaaaaaatttgctaagtatttctcagttcactaaagataatgatgtggttctcctatttgactctctttgttgtctcattaaggacaagacaacgaaccaagttcttctcaagggttccctcagtgatggactctatcaacttcacattccatctcagtctgcttcaagtccttcaggaactcagcagtcaactacttaagttccttacaattctgcatttaattacagtacatctagtaataatgtctttgataaatccaagataaatactatatggcattgtaggcttggtcatccagccaagccaattttatctcaagttttatctcaagttagtcctaaatctaagtgtaaagatttacctttctgtgatgcttgccaattaggcaagatgcatcaattcactttcaagtccactgttaataaaacgatttccccttttgaaataatacatacagatgtttagggtccttctttttacacttctcgagatggatataaatactaccttagttatgttgatgattacacaagatttgtttggatctatcccatgcaatctaagtctgaggttactgttttgtttacacacttcaaaaactttgttgaaagaatgtttgaaactaagataaaaagtgtgcaaactgatttaggcaaagaatacttacccttatacaacctgtttcatgatcttggcataaaattgagacaatcttgtgctcacacacatcaacaacaaggccgtgttgaaagaaaacacagacatgttgttgatgtgggtctcacattattggctcaagctcaaatgcctttgagtttttggtgggaagcttatacctctgctacctatcttatcaatagactccccactcctctgcttaataatgtgtccccatttgaaaaactgtacaatcgaaaaccagattacacacttcttaaggtattcggttgtgcttattttcctttgttaacaccttacaactctcacaaggtggtttttcgatcaagcaaatgtctattttggggttacaataacactcaaaaaggatatcgatgcttgcatcctagtggccgtgtctatgttgcccggagtgtcaattttaatgaagctgaatttccctataatgagctattctctgtgtcaacttcccctccaactccacctgtctttaccaacacaaactgctatacagtaccaaactctcctaatattcaggctactccttcaacctctccccccacaaaccaatctatatccatacaggccacaaacaacaccactcctgcatctcagtccccacctcttgctgtatctccctcacatagcccccaccctaatcaacatagctcgagtcacagcatctccacagactcttccctaccctaccctcttcctactcacagatctgagtcaactcaaagtgtcacccacaattcaccacctgcccctacaaacaacactcactcgatggtcacccggtccaaagctggggtgtttaaaccaaaaagctacttcactcaaattcacaatctgttagcaccaactaatgtcaaacaggcccttgcaaatccacattagaacaatgctatgaatcaagaatttcatgctcttaagaacaagaaaacttggatacttgttcctcctacaccagaaatgaaaattatcactaacaaatggttgtttagaatcaaatataatgcagatgggtcagttgacatgttaaaagcaagacttgtggctcgcggatttcaacaaacaccaggtctagactttattgagacattcagccctgtgataaagccctgtactatcagcattatcttctctcttgctgctacttatggctgggataatcaacagataaacataaataatgcctttctaaatggagacctcaaagaagatgtgtttatgcaacaacctcaaggctttgtagaccctgaatttcccactcatgtatgcaagttaaacaaagctatatatgggctaaagcaagccccccgggcctggttcgatactctcaaaacaactttactgcaatggggctttcacaactccacctctgacacaagtttatttttctccaagaaagatagcaagatggttttggtgttggtttatgtggacgatatcttagttacaggggactgtccaacacaaataaacaatgtcattacagcattacataacaagttttcactcaaaattctaggatcggttcattacttcctgggttttgaagtttttcgtgattctaatgccatctacttaactcagaggaaatatattcatgatcttcttgtcaagaccaacatgcttgatgccaaaccaatgccaacaccaatgtgtgcctcagccaagctctcgtcgacatcaggcacacctcttactgatgctacacaatatcgaagtgttatcggtgcacttcagtacttactcatgacacggccagatatttcatttgctgtaaacaagttgagtcaataccttcaagctcccacaaccgatcactggggtgcctgtaaacgcatccttcgttacctggctagtacttccaacattggtttatcctttactgcctcctccaatttcagtcttcacggatattcagatgctgactgggctggatgtagtgatgacagaaaatccacaccgggctattgcatgttcttaggctctaatctaataagctgttgttccaaaaagcaatctgtagtagctcgatccagtactgagtccgaatatcgcgctcttgctcttgccacatctgagttaatttggctggaatccatactccaagaactgtccattggcactgtcactactcctattctatggtgtgataatttaggagctggctcctattctgtggttatctgtttcaggcatagtcagttagttaggattgaggtttatctgtaactttttgttatacctgttgtaactaactgtgtgtataaatatcagcttcttactctgtttcaaacagagcttcacaattcattctttcattcccctttctccacttcatttcataacaagtgtcatacaaattcataaatcaaaatcattaatatattgcattcagtatttacttttaataatttgtagcatacgtatattcattaattgaatatacgtaaaaataatttcaaacaataattaaaaatatttttcaattatttattgtattattttaaataagtaaaaaatacttaacataaaactgtgtcttgcacgtagctttcttctagtctatatatatatatatacatataattctaaataaacctaaacctaattatatttgacaaaactctcatatttttaccgtccacctctccctctctacgtttttttttttcgtgtgtgttgtttgtactaaaactcccactctacttactttggtgtctctacgagtcaagatcact

SEQ ID NO: 243816 - DNA, 1239 bp, Cannabis indica
cccctcttaacatgagtgataattactccaaagaaattggacaatattacacaaaccgcaaagacaatattcatgtggcacaattattagaaaaaaaaatattcatgtggcacagaagtgccatagttgacgtccatggttacagagaaccgtcacaaacaataactttcaacttataattactattgacatgtatatattgttcaaaatgaccaaaaataatattttcataattattgtaaacaatgatcattatataagactgaaacaccataaatgaggttgattatcatatatagcaggtacatttcatttttttttccttcataccaatgccaatacaattgcaaattcttaatgttgtatggtataatcaaagaaattgaaaaataagtagataaggatgaatttatcagatcagggttatttacaaaataacgttttacatttatcaaaatgggggttggtggtcaaacatgagagtactcaaaaagaaagaaaaaggagtaattgggttgaatggtcaaaagtagaagactgtttaaagtgaaagagcaagaaaaaaggtatattttaatataaattgtaaataatttacattataataatactatcacacaaccagaggaggggccttcttcttcctctcctcctctttcggtgtgtggttttgactgactgtctcctctctttttctttctttctatctctctctatctttactttaaccacaatctctctctccaagacccaaactttgccgatctattctctactccggatccatcttcttctgggttatgaattttactttctgtttgatcaagtttcttactacaaccttggtaattgttctattatttttcttaaaaatgttctttttatgtatttattgtttggatcaggttttattctctttgtatttcattgttctcctcccaacttgagttgatctgcctatatggatccttctagggtttgaaaatgaaaaatctttgtcttttatctcctctgattttcgttttgttgtgcttgccgttacccagttatcgtagcaatttgatttttatttacaagtttctatttttcatcttgtgggatctattaatgggaaccatacacgattgtttgttctctaaagagaaaatggggtttttttttttttttgagaaatagtttgtttggatggtgggcacattttatgtttgtgttagaatatatcaatatttatttggagaa

SEQ ID NO: 243817 - DNA, 1556 bp, Cannabis indica
tgatttttgtaattaatatctttaacctacaaatcttttaatgacaatataataataattaataattagctaaaacattataactaaaagtaaaaaaatttatagtgattatatgatttttggtggtcattttgtgttaaatttatcatgaactatttctattaattgatcataatttcacttgatataattcattttatattgtcatattgtcacaatcatgataatacaaataactaattatggtatatctaggaaacctttaggtaagggcaccattacttttgtcactattgtataggagcattttttgtttttgataaatagataaattataaatttattcccttttttatatgaaaatacacattataattatagtagacattctcgtattttaaatttttttaaataatctacaatattaaaaaataaaattttaataatgcatttcactcgtgcctattttattttacacacgacaactaactattttaaactccgtaaattatgagactataatgtaaattgatatatgaaaaaattgggatataatttctttaggtaccgaaaataaaaaatgacatttttaacccctaactaagaaactcccctatatatataataaagttgcatatgttatattatgttattgttaatgaattataataaacaattaatgatgaattgacagacatatcatacaaataaagcaaaagtggtatttttgaagcaaaggcgttcttctcaacaaggtgatcatgtacaccaactcaacaatattaataataacaaggaatacaaatgcatcatctgccataggactttgcaggacaattctcgatattgcagtatagcttgcaaggtatatatacatattatatatataaccctctaatcataataacattattaattaatgttcattaatttgataatatatatatatatatatgtgtgtgtataggtgttggctatacatggagatcatgaggttaagagtaggagaaaaataagctgtaataataataaggagaaagaagatcagttgcttattacagctttatcatttccaaataagaggcaaaacttaagaagaaaaggagttcctctaagggctcctttcttctgacaaatatatatatatatatatttatatatagccattttctatcgtgcatgtataaattttaataaggctagaacttaattaattatatatatatatatatatcatgtattgtaattatatatgtattagtgtgcatgcacgtacgtatgtactaccttatatatacatatttgcattatatatatatgatctatcatatcatttaaaatttggtaaatcatgagaagaatttcatcgcacaccaaacaacaaatacagattaaacttttttacaattataatcaactaatctactaaattaaaccaacaaataagtctgctttactaattttcttcattttaaagttagagaattttttattatctactataaaaatacaagatctctgtgtctgtgctaaatcaaatctaaatttagtacgga

SEQ ID NO: 243818 - DNA, 2333 bp, Cannabis indica
aacccacccgaagggtaccgggttgaacccaacccgcccgaaactttttaaatttttttttttagttcgggtttctactagttcgggttcgggcgggttgctcgggttcgggtcgaaacccgttcaaaatgttcagccctacccgcaaacatatggtatcatcaaaattctgttgttggaagtaatagaattatatacttccaataaggattttgggcatttgaaggtattgttgcattgaatatttattcgcagcaatttcgtttgattagtttgcttagagggtttactcccaataccgaaactcgaatgggaggttattcgagggagattgcggttggcatactgtcatgattgggaagatgaaactaagaaatcatatgctttagttgtatgggaattggttgatgagaatagagatgacaaagtgataacttggaaatatgtgcattttcataagaaaatagttttgaagtttgaatgtagtatactcactatgcatcttgatgatggagatgtgttcttcttctcaaattatgatgaggagaatactattgagattttccaatgtggaattcttggcaagaatcatattcatgttgaaactcttggtcatatgaatgttttcaagcttggcaagatgatataagtgttaagagcccttcctcttatacatccttggtggcctacaaaaatttcagctatttaatttattaatttcgttgaataataatcatttttttttcttttctcattttattttatgcttataattatgtattttgttgttgattttatttgcacataatccatctcattcatttcaaatctttcaaatcaaaagttaaatacaagatcctataattcctatctgaaatcagaatatgagttttccttaaaaagaaaaacttgattttgttcaatagtaaacaaacaagcaaacaaactcattagttgacataacaaactgaacagaaactgcattaaacggcccgaaaccgagctaaaaattaacacccgaaaccttcgaaacagctacaacaaagcatacattctactactcactaatgtcatcgtctaatgtcactacacgctctctctctcgcctattgaggagtcgaagacttgtattcgagcatttcgttcttgtatctctccttgtcttttacccctttctcttgataaacctgtttaggtataaaataagtgagaaaagattttaattgaagagagtcgtgagttgagctaagctaacatacttgtttttcagcttcggttaggttattccacaaagccccgatcttcttgctaatcgccttttcttgcccgaagtaggtaggtttaagccttgtgtaatgctcagcaaagagaagttgtaaccgctcctgtttgattttgggccgagatggatctttttaacgacaacttggatttctttctgtttcggtgatgattatggtgatgatgagtgtctgaaataagaactttgagatgtgcggttagggacgtgatataagacaccattaagctgttcagaacctaatttaatggtaacaagatatccgttgtcaaattttccatcaatgactccggtaactgagcaaccgagctgcaattccatattctctgcaaataaatcaaaataagacaacgggcgatctaaaagtttcaagctttttaaacaaactaatcgaaacacttaccttgaccgacttgtaactggtttctattagcatcatcttcatcaggggttctgaattcattgacaagattcctacttgcagggtctacagcatcaaacaacagaaaagaaaaagcacacacattatttataccatctttaccgaagagattgtgaaacgaagaagaacccaagaaacatgtttcgaatgattaccattcgttgtgattgaaggggcttttttatggaaataatacacctgctcaaagtgataaagcaaggaaatatagtacttccttaacacatatgaagcgcttgtaattgttgccgggaaattaaaagctacaacaacttccttccattttcgatctgtaataacctatataacaatagaagaatcaaaagtgagtagccaattggaattaaaacaaattctaatcgaagaaacaaaccttttcaagaccacctcggcttgttacttcaacaaaaaggagatgtaaatcaagagcctttcctccaacagtgggaatcctattatgaggaaaaacagccaaagaatgtaaatttatgtttcaatccatgttttcgtaaaatttgactataatggtaacagaaaaaggttcattctccaactcaaaaattacaacccaga

SEQ ID NO: 243819 - DNA, 3695 bp, Cannabis indica
aaaatatataggataaaccgcccaaaccgaccgatgtacaaccctattatgtatacgtcggttttgattttttttggtaaaaaaaaaaaaaaaaaatttgaccgttcaatggcggttttaaccattaccggtttattcagttttcggttccaccggttcggggttccaacagtgttcgacaggtcagtttaaataatttttttaatttctaggattccattctcagccctaatgatttcttcaagagataatacctttttttataaatttaaatctaatcactacactcctcagtcatactcaccctcaatcatcaaacaaattaaaaaaaatctaaattactccctcatatataatatatagtgtgattgtataaccgtaagagcaaaaataaaaaatttaacacaatataatacatagtgtgactatgtaattgtaagaaaaagaatatgtagaagaagaaagtgagggcggctgctgtaattaggttaggctttctttaaaaaatcttttatattaaaaaaaatcaggttggataatttttttttaacaaactcgtacccagtcgaaatgcatccgcgttttactgaaatccgatccaaaatttgtaaaaccaaaatttcaagttttttgggtacgagtcggccgagttttcaagtccaaatatgcagccctaattgaagtagaggaaaagatggtaaagttgaatgtaataccaatgtttgccacatgttacacaatcaaaacaataaagtaaatgaacacagaattcacagaggctcgacccccttagttagtgggtaatgacctactctccttttagttgtattgataccgagagataatactactcaaatactatagtgatgggatctaaagtagctctctaaaagttacaatgtaggaatcagagttagcaattcttaatatgaatatagcagcgggtgtgtgagaaagagacgagttatcggacttagagctagggttttagtcacatagaatttagagcttaacacttaggattttagggtttgattaaggcactttatatagtagagcctagacccttcagttctcttaagaacaggtcaaataagccattatttacatattaaattagtaaaatataaatgactaaaatgccccttgaaaatagatattttctctctgctttcgtgggttgttaaagcccaattcgcagtcaagcttgctattcacgtgtgaagctgtgcaccaaaatcttgtaaggccaaaaactggtcggccattcacctgcaggatgcatgctggtcggccatgagatgttaagacccaattgagcttcaaacaagtcatttagtgtggtgtcagccattacccacacactcgagaactctcacacagaagagcccaagagatttaagttaaaacagtgaagcagcagacagggccgaccttgagttgaaatggtcaaaggcaaaaaaaaaataaaaaatcggggccttaatataaagagaaatggtatttttaaaagttactaaaaaaatatttatattttttaaataggtaatttttttattcgagcccctaaaatgagtaggccctaagcgcgggcgtaacccgcttatgctcaggatcggtcctgacaacaaataatcttagaaactaactagtaataaatggtaagctaatgcccgagaagaatagcttccacactcttccaaaagaagttaagaagaatagcttccacactcttccaaaagaagttaagctcttaagaaagttgcctcaatatcctttgagaatcaactcaatcctttccccaaatcaataatacaaaaaagaattttatttgtaccctaaaaatttttaaatgcacctcgttttaataatttttatttatataatatatatttaattatattagatttttataattttttttttcaattcatattcttcaaaaatatacctatcaaataaaaataaattatatttcaaatattataataaaacaattaaaataaatatatacataatttaaaaaaaaaattataaaaataaaattaaaataagtattaaaattaacataaaataatatgaaatttttttaaaaaaaaatattacgagtgatttttaaaaattatattaaaattaattttttaaaatattaatatgcacttatcatttttaagtgcaaatataattttcttaataaaaaatgagtataacattgtaagaactattctaataagtaaaataataatgattagaatagacaagcattacaaaagattcaaagacaaaacaaacaataaaatgaaacttttgattccattacagccttcattccctcaaagcaaacatgcagttaatgaaaattcatggaggagaaggtccaaaatgttgaaagtactcccacatggtttgatgttgggcattcatagtgtttaaattggtattaagagaagcgagttgtccatctatagtgttgaaacgttgatccataagtgtgaaaaggcgattaaaagccttctcaatattgaaggaggaagaggaatgagcacgaagaggcgtatcctcttcctctccaagcatatgatcatcacccccgccaacctccattgctcggtcaacatcgcgaggaggagccataggatcgtttttcgatatccacactccattttgaacatgaaaacccatccggtttaaagaaacatggttatatgtgtcatttagagttggcttatacacatcattttcactttctaaatgaacattaaaatattggaagattttggttaagagcatgccatatggtaaagtaatcacttgttttttgtaagttttgatagcatgtttcatgtgattaatgataagagctcccaaattgataaaacaacctttgaaaatgttatcaagaaggtaaaggtcaaattgggtaagtgtacacctattgccacctctaggaactatattaaaagtaagaaaatggtgaatgacctttgcttgaatggtgagatctttactttggggttttaagtgaaaactttggttaatgcaaattctagaacaagcattagaaagtgaaaaatcctctaaatctagttcacaaggatcaaagacaattcctttattgggtacacctagaatgtggttcaaagtagcaacatcaaaagatatggtcttgtttttcaaagtacactctaaccctagtttatcttccattggaacaattgaagcatagaaggctcttactaatctagggtacataggaagattcaaagagataaaggaattccaccctaacttagagaaaatatcttcaaaatgaatgctttgcatttctgtaaagtttattactttaccaaaaataatattccttgagcaaaaagtagtggaatacctttctttgattttagggtgtttgatgagtgggatatcatcattgttcttcttagctctcttctcttgatgattatgctcatcaagtctcttctctttactctttgaagaaccagtccttgttgatgtcattgagttagggtttggacttgggagagtgaagtgaagtttggaaagtaagtgagaatgtctgaaaatataaaaaagaactgtaataaatttcataagcagaggcaaaatggtaatttcataagtaagaaatgtttaattgggtattgagccattgactgtatcttggaagatttcaagtt

SEQ ID NO: 243820 - DNA, 2780 bp, Cannabis indica
cctattatatgatccttctctttcactctctctttctatctctatctttgtttttgatgtgattctccactattattatctccaaaaacccatcaaccttttacaaaagatcagaaagaaagaaagaattaaagagagaaagcataatatagagagaatacaatggttttttcttctcttccagcttatcatgatccagccaactggcaacaggtaattcattcatttataattaataattagggttttcttgttcatgaattaattactttctttcttttcttcaaaaaagcaaataatattttcccaaaagccaaatattccaacatctctttactttaatttctttttgtgttctatctaatccatctatcccttgaatataccaaatatttgatctttcttttcttttgatttcttatttacagcaaccaaatcatccaaatataattcccagcagtagtagtgctggcatgagcagtggttctcatcaacttctaccaccaccagctgcgcctacttcgctaccactgccaccgccaccaccacccttgcagcctcatggaggaggaggtggggccgggtcgatcagacctggttcaatggctgatcgagcaaggatggccaacattccaatgccggaaaccgcattaaaatgccctcgctgcgaatcggccaacacaaagttttgctattttaacaactacagtctctctcagccgagacacttttgcaagacctgcaggaggtactggaccagaggtggcgccttgagaaacgtccccgtaggaggtggttgccggaggaacaagcgcacgaaagggagtagtggcggcggaggaggctcctccaagtccccagtaagcagctccgataataatcgacacactggaggaagtatgactacctccggttcttctggcgcagtaccctctggtaataatgacatattaggcttggcccaccaagtccctccggggctccgtttcatgacccctttacatcatcagctcactcatcatcacgacttcgtcgccgccgccagcagtgatcataatttgggtttcaactacggaggcctcaactacggcgctatgtcaggaccaatgggaggaggagcagacttgaattttcatatcggcagctcagctttaagcgggccgagtaataattcgctcttaactggattcgaacaatggcgtatgcaacaacctccgcagtttccgttcttggcctccgggttggatccagcttctgcgggtttgttcgagagcgacgggtcgggttatcagccacggccaaagcagtcgagttccggaattactcatcagatggcttcggtaaaaatggaagacaataaccatcatcatcagcagcagcatgagcttaatttatcaaggcagttaatgggaaacgatcagtactggagtggcggaggtgggggtggtgctaattctggtaacaatgcttggacgacggatccttctggatttagttcgtcttccacaactagcaatcaactgtgaacactactgtagctactgatcaattaatctctcttatataacctttcaatatgtggtgatcgatattgaagcttcatcattcaaatttcataggtgattaatttgaacaaaagaaaatattgtacgagatatagctcagctgaacgttactgatccataacataaattatcttttacagccagatcttgaccgagatcgatgatgatcatgatcatgaaacaatcatcatggccctctttcataaaccctagctagacatatggtaggttcttttttatttttagtttttaccatttttttttatatatgggtttaattgcaagagtgtaggattttccccccctcttcttattaatttctttgtttctttagcttaaaaaagaatgaaattaatgtattttcagtttgtttctcgacaatgagtgtaagaatatttcttaatttggttgtagttttgagttaaaagatattaatgatcatcaaattagctgtactataccattactataccattactatatacatgtgtatctatcaaagtttattctatatgttattgcatgggtatttatatttgatcaggttttttggtactctaacgacatcttacgatcgaatcaatttgtttaacagcttttgtgtcggcaatttgctcaaattttgttctaattataattacatatatatatatgttgttttacacacacacatatacatatttattaaatctcagccgaaatcctatatgtaattaactttggtgatatataatatacatatatataatagttttgggattttgcatgtccatgttgtatgaaattggatgtataaatactgcaaaatgagattaatttaatgtacgtatatctgatctgatttaatgtacttagatttttaatgattgataattaccctatctctgttgaataatgcgtgtcaatctagcttgttctatataaatgtgtgtcaaaatgtaatatgtctgccaatctaatgaatgtccatcctcaatgaataaaatctagttctatataaatttgtgccaatatattgtttccagacatatatataattagtatatatatatatttatttttttaggttattagtttggagccataaccatgcatatgtgtgtttggtaataatctagataatatttttttttggcattcattattttcttcttatatatacattatcataaattgcgcgcaattggtaccagaggtttgcccagtaattatgct

SEQ ID NO: 243821 - DNA, 3133 bp, Cannabis indica
taaacaaaaaaaaaattaaaaaacaaaaagaaaaaaacacacttatggggctggctatgaatcttagcatcataatttaattaagacggagtacttccaatccacagcaactacgcaaccaaaagttctataagaagacatgtacataggtaataaattatagcagccagtatacatatcacatgcataaagtttgccaggatacaagtacagcataaacgttttagtgaaataattcctaaaacaaacgtgaatataaaagtaaacaatctatatcaggttacgctggtaactttagacgtaaataaaacgttttagtgaaataattcctaaaacaaacgtgaatataaaactaaacaatctatatcactggtaactttaaaaaactcacccttgaaactgctttctgtcgaagtttttcaagctctggttgaacatcttttagagcttttgacattttaaccatctgatccacttctacgaacttcaatttcttgctaagaatctcaagagttctcatatactcatcattgacctggtgtacaaatgaaatcgagtgcgttaaaagctgtagaatgtcagggtcagattaagttccacaataataaaacaaccagaaaataaatgtacaattcatcgtctatggacatgttcaatgtaactgcatttaagaatttaatgacttcttaataaaaaaaacaacaaaaaaaaaaaaaaacaaaaattctgtggaaagatcaaaaggccgtataaaggagttagaacaccactaatgtctgagcattctaataaaacaattaaaatggtgaacatagagaaaaaaaatgcgaaaactgacaatttaacaagaactttcagacaaggaaaatacaaccaaaattaatcaacataaatatcttcttcttcttcttcttttttttttttggaatttggccctgccattcgactgggagacctcccagtggccccaagttttttcagagtacttaaatttttttgacctccataggatattccaaaaaaaaaaaaagaagattgcactaaacaataaggaatatatatatatatatatttatatattgtaatacccattaagagtgcacccatatatgtatatgtatctaatattgtaaatgtctatataaatacacacacatacacaccactagatatgtaactacagcatacattatacctatgtgcacatgcgtggttggaagtggataggtaatgcatatatacctctccatcaataataatgtccaccatccttggagggactataatatcctcaacaaaatttgccaattttgactcagccacctgttaagaaaatataaaccaatcacatacagaaggatgtgaaaaataagaaactaatcaagtttttttttttctttttgaaaaatagacaggttacacttgtcttagactgacctcctcccaatctagaaattaatcaattatttatattaatatgtaagaaccacatgaaggaaagtgagaagcacaattttaagcaatatcaattattttcaggaattcaaaatggcatattattgcacacaacataatatctaagagccacagcaacagaacaagcaataaacagcttgaaacttgtgtgccaaaagatttgtacttttaaacctcaagaaaagaaacattacaaaagatcctaccttgcgattcttaagcttcaaacccatgtccattgatttctcctggagtatttttatatctgaacttatcgaaccaatttcagtctggagaaaagtcactgaagtattagtcataactcatgataataacactacccttaaaatgaggaaaaacggttcagtagggtataaagaaaaagtattgtggaaaattgaggggaaatgattaaagaagctaacttaagagcaagcaaacattatatgacgtgttgatatagctttaacaaaagacaataagaactgaataagaaaccttataacaaatgaataaacagattgccaaaacaaaaataaaaaaaagtaaattcggaagaagcacctatgaagtttgggattctatatcctaaaatgaaaggctgaaatttattgatattacattcataaatagatgcacatatgttgattgggattcaatatcctaaaataaaaaggctaaatcttatggacattacatatataaatagttcctctagcaaattatacagaaacaaccaagccagacagacaaaaaaaataccaaacatgaggcaaactacctgaaacccactgagaagtgtttccatctgtgacaaaatgttatcacaatcacgaatttggtcatgaagagaaaccaaattgtcactctcttgtatataatcctgcaataaaattgttaagatataaataaacaatggtattgtgttaggaatatgccacaaacatagacaaagaaatccatgaaatcaacaattttacaaggctctcaaataacatcctaaagctagtgactcataatgcatttgtaatgctattcataaaacttatgggggatggcttatgagtcttagcatcatagttcatagtgcatgtgaagcttaaacgtactgtcagccatctttaatgtgatgaagcaaatttctggtgctaactaatgtgaacgtacagcacagtccaccagctgaatgatactcttcaactaacccaaatccaaaaaatctaaaatacatatatatatatctatataattttgcttttccatcaattcttggggaaaatattccattaattttccaatatccataaatgaagttgcattgggaacactgaaagcaccatgcagcagaaaatcaagggatgggctcataacatgcgtggcaaagcactacttttttataacagaaaatttaagacagtgtgagaattcgggtagccaattggctgttcaatgagaaagattttaagaacgtgcctttctctgatctaggtagagatttgcaacatttgatgtacatgtttcttttctcaaggtcttggtttttatattctaggaacatattttttgttatatgtttttcttgttattgatgggtagtaagcttcgggtacaccccatatcacttgtattatttctcatattaatagttcaagttctg

SEQ ID NO: 243822 - DNA, 2900 bp, Cannabis indica
aatagacatttttcatcttacaaagagttagagaaagcggcagttcactgcgggtaccatgccatacagggtcaagcccaaatggatatgtaggcgcactttgatcaaacccattgtagtagaatctctacaaaagaagcatacacaaaaaaattagagagagaggagagggatcatatggtggggataaaccgtataaatgaacaaacttcaaataccatacccgcaagaaagatcacggcaagcatatgccgagcgaccaaacagttccaatgggacagagaagaactcattgtaaatcaaacctgtgtagatcgagaaaatcgacatcatcaaaatgacatatctaccaccaaaggtcatctccgtgatgtctccaagcttctgtaaacccataatcacatttttattagattctatcgatgagaaagtgattctaacgatataaaataagtcatgaacttgcatagtaacaaaatacagcaacacactatcctagtccagaaccgtcaaggcatgaccttgatgacgaaaaatgaatgtgattattattacaagcaacagtaatcttagtaatgtgatgaagcaattaaacattgccacgcgttctaagtgaagaacagacatgatccaggattaatatataagtactaaagccaattcaaaaccacaaaattattacctgactagaaagtttcttttccctgattataaaatacagtgttgccagtaacaagcatattccatggccccaatcaccgaacatgaccgcaaaaagaaatggaaatgtaacaattgtatatacaccagggatttgcttcttggtactttgccaccctgcaatgacattacataatgatgttcaggaaatcgggtgacttggacaaaatacagataagagcaacaaggactctttcaagtcatagcactattaaaattttacaaaccttacaaatacaatctaacaaacctaaaattattttatttctatgcacgcacatcccagagaacataagggcagaaatttaatagttcaccatgtcaaaggaagtaattttggtaaagtcaagactacaagaagaatggctgggatgaacataatactgtctttacacatcctactccagaattatgacaaaggcatggatgttagttctttctcaaatcttttgaactttttttaaaaaagaagtgattaatgaaaatgtgatagcatgtctggattgaagaaatttagtagtttggcatattgtgtactataattttgattacaggctgcttttactgaatcaaagcaattaagccatattttagctagctttcccaattcctcttgttaaaggaagttggctgcagatttttcatgaatcatcatccatataaatgaacgtaatgtggggtttatacggacatcaaaagacttcgagggtgtcctcttaacagccagcaatacttttcctcaaatagtaataaagaagaaaagaattgtcaatgttcagagcaaaactgacccgtatgcatcaacgatttcctgaaaagcagtagtgaacttgtttgtgcgaaaataagttggtggtgactcttttgtatgcaaaacctggaatatagctccgacttgtgagttggagtcataggcaccccgctctaaggcatcttggatctgcaattatcaactccaagctataagaattccaaatatatattttcacttgtaccatcacagctaagaactataattcatctatgttttctgtgttgaaattgtaaaagcagctggaaaaagaatattacctgctttgtggcaaatattggactcacccctctgcaacaagacatttttttgttacatcaaggctgagcatgtttagagtgtgatatatggatttctccttcctcaccttcacaagttcaagaatccccattaaacagggaagcattgtagcaacatagcaaaaaaacaaatttatgatcaaatcgaagtctataaaaaagaatcttaaacagaccacaaggttccaccgctcaaattgatctccaatagtctgtaataaattgccacgatgcagcagtccagcatctatagtagtcttcagctctgagagtcttgctgaaacctgaaatttgagcaaatgatttatgaggaagaagagaggtaaacggcactttgcagagaacaagtgatattgacagtgatgaaccaattacaaacaataatttgtggtgtttatattacacttagtagctaccaagccttaaccccatgatagggttatggtaattggataaatgctatgttttgtgtgatttaaaaaaaaaaaaaaaacaattacaaacaaatccgggaggaaaagtaattgccaggtaatgtgatctaaaccttaatcctcctcttgcattgggataaacctttgttaacttttttcacaccatacataaactatgctcttgcaaaattcaattgagggtagactacaaacaataagtacgtgtttataatctggaaactaatactataatagtttctatgtaggtgcctagaagtgacttaaacctccagactttgcgagcgaaccatgtatctgtccattcgagcaatctctcttgagtccaattatttaacctgaactttgagttaaattcaaattgtacttatagatgagacctttatggctgttactaccacacagcatgtttctaattaaaataatctcatacttttgatgcttgttgcctattcaatttacctactaactcattcaattgtaatcaacatagtaagcattctcagtgaaagcattgcatcaacaagtatagaagctttctaagccaagaaatcaagtcagccaataaccacgacagtaacaattcttagttttaaagaaaatgaaagcctaagtcaa

SEQ ID NO: 243823 - DNA, 3306 bp, Cannabis indica
gcggttcaaccaagataacaatgtgttatcctgtctactccacggccagaacagcctctaagggctagtgaattttattgaacagtttgagagagagaatacacacaccaatctgtccaagattgcagctagatcactcaattgaagccttgcttcattacaacttgatctcacaatgagaggagtagatcagacacactagtctctctttaacatcccaccaaactctcaaacatttttcttatcttaactaagcctttctcttctatttctacctatcctaatgaaagtgaacacacacacacacatatatatgtataggtgtaggataagttgtaggataggaataacaagttgtctcaagtgtttagccaaacacagaggtataccttgcaaagaggaaaaaaatgtacaaggcccaaattgttgtcattcggatttaagagaaaattaaaatatagaacattcaagagcttatatttctaaagaaagaaatggtaaaccttctcataatcagttttacacactacagtggagtagatgttttaaacaatcttcacagccaccaaaagaaatagatctatgttacatattcacacagatgagctatttggtctttcacttgagggaaagttaaaaaaaaaaggtaaagctcatataattcaaggaaaaattattgcaactttacaactatgcaagatatatcatccttgcttttcctattaacagcctccccaatcaaatgctttgctgctgcctgggcatcctttatatgtttgatggagtccactgcttcttgattcgacagaacctattcgacataattgaacttgtaaggtaccaaatgaagataaatgttcatgaagaaaaaaataaacataaaaagaagagaaaagaaggcaaagcaaccgattcttttcataaagtaatagtcaattatctttatgacaataatgttaacaggaaaatgtatgaacataatttaaaatgcaaaccttccatatcccgtcgcttgctaagattaagaactctacatcttcgcctataggcaggatagaaacatcaggttctgaactcaggtgtatcttcaagctcttatctccaaatgctcttgctacagccagctgtccgtcgacacgtggaacatcccctgtaaaaatttacaagttagaactcaacaggaaatattttcaactaaaaagttctgtttaccgtacaagagtagcaaaagtaaaaatgccacagccaaattagaattactgattcagagaaatctgaaatacactattgaaaaataggcctagaatagtgtttaattagaaatgatatgtagaaatatatattttttttgacaagtgaagactcacattaacattaagaatgaaaaaaaagtggagggagtgcttttaaccaaaaagctaattgttagccttagagtatagaaagtcaaaatatgagttgctaaaagacaaagcgacagatatcagtcaaaatctataacagtaaaatttcaaataagccacttagtcttaaaagaaggcttaaaaatgaagacaatgatcaataactaagataagctcagcctgatgaaagcctgaaactgagacttttaataaagaaatgttgagtacctggaaggttggatacaaaaccaccacggctctcaatcagcctcttttccttgcttggttcatgatccacagataattgtagcgccacgccatttttgcatataacagcccgagagtctcctacatttgctactatgagcttccttccatctttcagtattgcagttactgcagttgaccctccttttcccaatgaaaaacttttgtccaatatctcatcatccgttctacgataagcatttttaattgagctttctgtatcaacccagatgccaggctgcttaaaaccgaaacaaaaaaaagtataaaagaaaatcctaaaacaataaaagattaaagcataacctcaaaagaagaacaaagaaaagaataaattagtatctttacctccttcaaaatattttcaaagaggtggttttgcaagtaatttgcaacatcatggcctaaatgaccatcaaagattgcaaataatcccaactcaacattattttgttgcttgaattcagaaactaagtagtcttccatggcatgctttgattttccctttaccatgtggaatccatgtgtgatatgctttgaccttttgcttttgccttttcctgtatcaagagcagatgagcccagcccagtcttctcctaaaaccaatataaaagaacaaaatttcattgttgttcatagtaaatgaaagtgtgccagtgagtgccttcttcaagcaattgttctaaaaaggttatagctagaaaaacataactatcatgaaaatatggcttaaggtcatgcatcaacaccagtttgcttagcaaatattgtgtcaacaatgaattaaatccagctatgtctacaccataatgtaaaattttgagtcatatattggcttcttggaaatgaacataatctatataaatcatacatacattccctggacatgttaaaccctgcattgctctcaccgcaactaactttttcaaaactaggattcccgcctaaccttacaatatttgtcaaccagaaaattcaaacagttgctatgtaggtgtccattagggtctccaacctcagaccttgcgggggagcaaactatatgcatggccttttgagctactctttttgggtgttttattactctttctttaatttttactactacttcataaattagttaacaaaaagtattcctatgtcttatgaaaaactctttgacatgattaaaagacaaaaatgtgtatgaaattcactacagagaacaagcaatgcagtttaatggttgaacattttggtcgttgtttgcagtgaacaaaaaaaagaaaaaaaaaagtcatcaccaaaaaattacatataatggaaaggaagaaaggtcagcaccaaaaaaccagttgagtagaagtgttgatgtatcacttagttttacatttctaagcataattaattaggtaataataacagaaaagtgcagattctgcaacattttcttatcagtatgttagctttgacaagttaatacaagacaaagactagtgatttcacacaccacgctaatatatttatccaaattcaaatacaaccctctacttaagaaacttgcttagaagttaaaaacaaattaatatagtcattttaatcttaaaactgttcaatttacatgggatccctctccttgcatataaatatacagtt

SEQ ID NO: 243824 - DNA, 2918 bp, Cannabis indica
cttaattgtgaagaaaatagattctacgtcttatttattgattgagagactttattatgtctaattaataaatatactaaatgacaattttatttgataattatttttaattattaagtaattagttttggcatttaaattgttagaattagaaaaatggcatttttgagaaaataaggaaaaattgtcaaaagtgaaaaaattcccaagtggggcccatcactatggccgaccacttaagtggtattttccagttaattgttctattattttaatgcctaataaatcctaacctaaacctagatggttgcctataaatagatagtgatggctcatacttaaagatgatgaaaaattcaccttcagtcaaatttttttgagccttctattctattaatttcgaaccaaccacttctctttccttcttcataattttataccttgagtgatagagtgagtgcccacacacatcaagtggtatctaaatcatagtgtgtaaggctgtgaagaatccagaatcaagagaaggacattcgggcttagatcttggtgatactctgctacaaaaaggataaaagggttagagatctgagtggaaggagccattaatattccgctgtacccaatgtaaggtttcctaaactttatatgtgtttatttacattgttttagaaattcatatttaggatgttaattaacatacatggtagtaaatctagatcatggtaaaataaatccaacaccaccacctgtggattcgctggatcaaccacgcccctacgagtctgtaccaccatcatacttgtgattaaatttggaatgaaaagcgatccttgattcttctctctcaatgaaagcaccaaaatgttgacctcgcttttagccaacgacagtgagtctagttttataagcaacaagtagtttaatacgattgaaatattgtaaagcaaataaggacacaagaattttatagaggttcagccccgagtagttcggtaatagcctaatcctcgttatttgtattgacttaagaacaaggagaatagtttcttttcctaaagctcttacaacagtatctctgaatatgaattcttagacaaaatctttccacctcttgcccagtgaatacgagtcactatttatagggctataagcttggagagaaagtactttccttctagtttcaaaaagattgcatagtaaatacagaatacactaatcgtgggatttggacagcttgtcatatctctgtaatctgatcccaaagttatagggatttccttgatgactcacgaagctgaatttgctaagtgttggcgttctgcgaggattgcccactgctcggtcttgaggacttcgtccgagcgaatgtatgaggtgtcctgttcggcctatgtcttgtgagcagatacccggagtcgattccacgtgtcaccatcgagtgatgccacgtccgagtgcaaaaattgggataacaatggtgttgtttaataaattgtatagaaaaaaaatcaaaatcattttattttgtttacataattaggaaaaataattaaaatgctaaaatttgactttattaaaaagtgtaatattttttttatagtttttgaaaggatatatttatcttttgaattttaaattaataaaattaaaatatagataaagtaagttatgaaaatgaaaatattctctataaacatgagagaagaacctttatttttctttttcacttttaatttaagtgggctacactaatcgatggtatacacttaattcccattctcatcaagttgacatgcctattagcgagatattgtttggagggtattcaccaatgaccacattacacgcgttttataactataaatagtcatgcccacctattacatttttcaccaactatcttacaaaaccttcaaaacgatggcgtccttatcttcttctcccactatcctcctcttctccttctgtctcatctccattctagtctctctctccagtgctactacagccaaaacagtaccatcgcccaaggcccttgtcctacgcgttacaaaggacgctaaaactctccagtacataacacaaataacccaaagaacccctgcagtacaggccaaagttgtgttagatgttgggggtgagttcctttgggttgactgtgaaaagggttataaatcctcaacaaaaaaggctgtcccttgtggctcacccacttgcgtcctgagcttgtctgggggttgtactacctatggaaattcaactgaacagttttgtagtgtgacaccagctagcctatatgcaggcgccacaactgctgatttatacacagacatcttctatatccaatccaccaacggattcaaccccgcaaaatctgtttccgtacccaatctccctttcgtttgtgctccaaactttcttttgaaaggtcttgcacgtggagctgtgggtatggttggccttggaaggaacaaagttgctcttccttctttgctctcatcggcttttaactttccaagaaagtttggcatttgtttgtccggtcattcaaacggtgtcgttttctttggaaaggagcctttggtgcttcacggtgttcaagtcactgatccaatctccttgatttacactccgttaattcgtaacccaagaagccttgtaaccacttctctaggaaatccatcaaccgaatacttcattggactcaagtccattaatatcgaagataagccagttaaattcaatactacactactaaccttcaagaacaaaggtggttatggaggaaccaagataagcaccgttgatccatacacaacattggaaacttccatatacaaagccgttgttgctgcatacattaaagctgtaaagattccaacagtaaaagccgtggctccattcggtgcttgcta

SEQ ID NO: 243825 - DNA, 4047 bp, Cannabis indica
acacaataacctgcgattgaccttctatcgtcaggacaacatgcccaatccgcgtctgagtatcccacaagacttaaatgatcactaaaaccgatgtggagaccatgatgaatagttccctttaagtatctcaacactctcttcatagcattccaatgacttgtagttggagcttgcaaaaactgacttagcttattcacggcaaaggctatgtctggtcttgtatggcacaggtattgcaaagctcctatggcactcctgtagatagtgggatttgataaggcttctccatcaaactttgacaacggcttccctgcaacaatgggagttgggcatggttttgtgttgagcatgtcatatttctgcaacaagtctgatatgtacttggattgtgtcaaatatagtcctgtgttgtctcgacagacttcaattcctaagaagaaatgaagttgtcccaaatccttgagtgcaaaggctttattcagcttggaagtgaactcatttagttttctttcatcattccctgttataatgatgtcatctacatatatcaacaccatgagaatggtttgatctgtcatgtagatgaagagagaagagtcggcctttgaattggtgaagttccattgcattagagttccttttagctgatcaaaccatgttcttggtgcttgtttcaagccatatagtgacttgtggagtttgcatacatgatttggtttttctggatcctcaaagcctggtggttgaaccatataaacatcttcttctagctgtccatttaagaacgcgttgttaacatctaattgtttgatcttccaaccctttgacactgctatggtgagaacaattctcattgttgaagcttttatcacagggctgaaagtttcataaaaatcaacaccaggcctttgatgaaagccttttgcaaccagccttgccttgtacctttcgactgaaccatctgcatttcttttgatcctatgaacccacttattaccaaccacattgtagctgtccatcctgggcacaagtgtccaagtcttgttatttttgagggctgtaatctctgagttcatagcaggattccacacaggtgagttgagtgcttcttcaagagtttttggttcttcatgtactggattccattgagcctgccccaagtacactttcggtttgaatatcccagcctttgatcgtgttatcattggatgggattgcctcggagcttcagcagaaacattttcatgctcctgttctggtgcttgctggtctgcaacatcagattctaagtcgaaaatataagtgttatcattagctacatttgtatgatcactaacctcttgctgatgttgtgtggcagatggggctccaagggaaaattgagaggcagaaacctgttcagcatcagcagaaattggatgttttggttgtgtgtgtttagtgaactgtataacagggagctgagaccattcagagttgtgaattattatctctttttctggtgcataattgttaagaaaaccagctttgaaaggaaattcctcttcattaaatgttacattcctagagatataaactctcccagttgaacttaaacacttgtagcctttgtgagagtcactataccctagattaacacattttaatgagtgaaactgaaacttactggtttgataaggtcttagacatgggaaacaagatgaaccaaatactttaagaaaagcataatcaggtttcttgttaaagagtgtctcaaagggtgatttatgatgcaatatgggagttggcagcctatttatgagataaaccgctgtttgaaaagcatctacccaatatttcaatggcatactagcttgagccaagagggttaaccccatttcaactatgtgtctgtgctttcgctcagctctaccattttgagctgatgtgtgaggacatgaatgaacaaattggattccatgttctatgacaatgtcagagaatgcttgatattccccaccccagtcagttctaagtgtcttaatggtttcttcaaactgattttcaacaagaattttgaactgtaaaaatgcttctaaggcttcggatttggctctaagaggatataaccatgtgtatctactaaaatcatcgacaaagtgtatataatacttatagtttgtgttagataacaccggtgatggtccccaaagatcggtatggacaagttctaataccttagtagcacgattagtggacaatttaaatggtagagcatgagacttaccaaattgacaagcatcacaaaacttaacattttcatttcttgcaatggatacattttgagtggctaagacttgtttcaacactctaagtgaaggatgtccaagtcttctatgccatacatcattttttgaaataaaaggcttaaaactacacggctgagacacatttcctttggttaaaacagacacaccagtaaaaggtttggactggtttttgacagatttctttgattgtaagttggctgtggtgacaagttgatacaggccatctctaagtttcccttggagcagcaccttccttgttgttttgtccttcacaaagcaaaatgaagagtcaaattcaacaacaacactattatcagcagttagtttagatacacttattagattcttagcaatcttaggaacatgtagcaattcatttaacaccagagacttctcagtattagtagataaattgctagaaccaatgtgggaaatagctacttgatttccatcaccaacggtcagcttttccttaccattgtaatcggacttttggttcagattagacacagcagaagtgatgtggttgctagcaccactatcggcataccacacatcactatcaaccacttcaggagtagcaacataggcagagtgtccaccattgttaccacttgagttttgtgttgtttgagctcgaggatcctgtcccatgtatgattcatcataccggttgtagcaatatgctgcagaatgaccatacttgccacacacttggcaagttggtttgggattattattggatcgaccacgacctcctcctcttgcacctcctctgttactgtactgagaagtgcctcctcggtgtgagttgtaatttcctcgaccacggcttgagttgggattgtgactggtttttgttcccatgttagcagtagccatgttggctgtaggactcaaaccagatccagctgaggagtttccagacttgttattgttcatcccttgcaaccgttcaagcttgatgtcaaaacttaacaacatatcttgaagttcctgccaagagatgttaggttttgcctcaacttgcacaacaatagatagatattcgataccaaggccagatgtaacattggataccaaatgagcttctggatatggatctccggcaagagctaacatatcggaccacattttcttttgtctcaaatagtcggtcataggagtcatacctttgcgagtggtctgaataagcgttcgatactcgtccattttagccctggaatgtgctccaaagagattctccaatgcgcgccaaagtgcagcagaggtagcacaacccatgacctctgttgcgattgtctctgtcatggagctatagatccaacccatgagtagctgatcactaacaacccagtgttcatactctggattgagagtaacttcagttccttggtctccttcagctgcattttctgtttgtatgaactcgggtggacacggtctggtaccattcacgaatccgtcgagtctgtgaccacgtattatggttgataccattgttttccatagtgtgaagttatttctgtcaagcttaagggaaaaaggttggtttaaggtgttgaagggctgagtgtaattgttggtcaggttttgagaggagcttccattccctgtgccgattgacatctaagcagcaggatttcgatttgttggtggtggagtgaggggagactgagattgttcggtggacatggaggagatctggtatctgctctgataccaagataaaaaa

SEQ ID NO: 243826 - DNA, 2405 bp, Cannabis indica
gaaaaacgcgcttccgtcccccccccccccgcccccgagcaacaaacccaaaatgttgctatatacattcttaatatctagttgatgcaaaagccaatcataagtagctgccgtcgaaataaataagcaaacagaggtcaattttgtaacaacaaaaaatgtattagtatagtccagtccattggtgtagcccttaacaacacgacaggattttagattgaccttaattggaaacacccatttgcttcgaattgctgagctgcagtcaagatgctcaaaggactgcaacattgttttggtggtgacatattctggtggacgaccttagagttgagatttgtaatagtagtttcattgattcagttctagcaaagccaactcaacagttcactttctaaccaaatccatttcttataaggattctgcttttagctttcttcatagactgataccatatctcaactttatctgatgatatgctcttatccttagtttgtaatatgaggatcaagaatttttattatgatagcataactagaggaattctcttgtccaaattgatctccaacatgtctactcccatcatatgtgggccacaataaatttcccagattacaatttgttttaccctgtaaccataacagttagtgttgaccccagattctaaaatcatgaaaatttagttcaatatatttcacttctaaaaggaaaaacatagtcatttctcatcataataatttacttcagctcctagtgaaggtagctaggacaattcttttgaaaccttagtactttctacaatcgaaacaattgttctatatgcaatcactctctccatgatttcagctttgtcttttttgcctttctcgtgccatggcaacctcttttcgttcgcttcttccacaagctgaagtcagtattttaatcaagtcaatcaacttcgagcgtagtagttaccatattgatcgaaccaagaacctagttttgataccagtttgttgcagcaacgaaatctaaaccagagaattaaataagaagacttaaacaacagaataattgcaatcaacagtaatatggttgagctgtgagcctacattcaagagagtgccaactcagcattgcacagccgtggcattcctcatacatgttcatatatttaacaaattgattcaacacagtgaaaaacaacacagctgaagttgtaccaaaaaagtgaggcagagcagaacatagagaaacaaagatattttttttagaaaaaccctgcagttcttattggggttgacatagattagagataaaaattttatcattattgttttagaaactttacatactagcaaacaggtatgttgaaattgatctacataagctaccataaagacagattaatacagttaactacctggaaaacttttcatgtcaaataatctttatatgtgttctgtaattatatgggatatttgtaaagtagtttttatgagtaaactaatctctataatttgaaaattaaactgaatgcatactcagattgaagttcagaataatgacactacctattgattacaaaaataaataattatatgttcacatacaagaaagattacacattttctatggtgctttacaataaaagcaaacttgtaccaaaaatgtagtaatgaaattttgtaatgattatgttggaactttgtgaaatgttaaaaaatgatgtgtgtgagtaggagtcccacatgagatagaaacacttcatttgaagtgtataactagtgcaagtttgagatatgggtttgggccccaaggggtacccagttttgtgcgcatgggtgaggactcacacaccggaccaccacacgcgcgcaccgccgccgccgtccgaccgaccgtgccgagctggcgggcagaattaaaaacgtgtttgattaattagtaaacagagatgcttcctgattttttgcatcgtttacacgatcccatgttccaacgttcctccagtaatgtatttcttcccgttactactatcagcgcattgcctatataatgcgactgaatagtgggagaaaaacacaacttttcattctgaaaaattatacgatatatacacactatatttatattttttgcttcgagcagtagtcggttttgggtgttcaatttcgacggttctctatcgtgcaatagagttccgatacagtgtgttcagctgggctgttttatcctggggacgacgaggctgatagtctgcttgcacaaatctgagcagtaccgcgaacgtcttaaagagagcgacatagtccgcgactcaacccagattctatttcagtaacttcgtcccttttattttctacaacaactagtttctaacaattttaacacgtttagtttctgttgggttttatacccta

SEQ ID NO: 243827 - DNA, 2956 bp, Cannabis indica
tttaaataaaaaaaaaataaaaatacattttaaaatcatattttttttcttattcatcttcttcatgaacccagccagccatgagagtttgatcggagcaccaccatgggattttgaggcctgaagagaccattcatggccttcatcttgagactaataatagtcataaaattatttatttatttatttatttctttttcaccctcactgcccagaaaccatgcatataaaaaatccagcacccacaaccaccatacaacagtttacgattcccatttaaataaataaataattcaatcaataatgattgatgatgaagatgaaaatgaatcctaacaatctcaacattagcatgatatatctttatacacaaaattgtagtttctataaaaaaaaaaccaacttatattcactcttagcttcttcaacgaatgctaaactcacttgagggtcagtcgcacatcagtaccactgcatgaaccaccattaatggaaccttcacttccttcaacttctcaattaaatactcaatcatcactctcaaaagcttcacaacagcctaggctttcctctatacttcatcagatttcgatcagtcagcaatttcttctcctcaatcctaaccaatttgggcatcaatcctcaatcgataccacacttagggttgaattttttttagctaattgattcaaaatttgaggaattggttgtttgggttttgatttctcgctgattttacacacgggcacgaccaaagcagcgccgtcgaagcccttcggatcaggaaggtggattaagagacgaatcactcctcccatagattccccgtagagaaaattaggggttttttgaaaccctaatttttaagattggaggttttgattttgatgtttcttaatgaaattaaacaatcaaaggaaatatgcgatgactatatcaaggaggagaaaggatttcagaatgtcagactgttgtggccttagagattgagagtgaagcatgcatagtcattttgagtgaggaagatcagcgtggcttggaagattcagatgtggttcggagaaatttatgttagttggaatgccaaccatagatgtagttcttattgaagaaaaatcgtaggagacgaagaaagctatgatttgaagaagaagaagaaggaggaaaatcgggtgggtggtgggtggggtttgggattaattataagttttaattttaatttttagataaattttttaattttaataaaagaaaagagaaatttaacaggaattattaaaattttttaaatttttaattatttaaattgttttagtttataaataatttattttggttttttatttaaaattattttaaattaaaaatatgatttggaccaataagttgttgacacgtggtaattttaattagtaaatgaatctgttagaaagagggaccaacaaacttacagaaaacatgacattggggactattaccattaatttttgaggttgaggagtaatctgcattaaccctaagttttttaggacttttgctgcaattatcacaaaaaaatattgacaaaaaagtgaatattttttaaaaacagaatcaaaacaacattttgatgttcttgttaggattatttttattgtcattttttagagtatttttatgcatttttagagtctattttagtatgtattttagtagtttttatttattttggttcaggtttacgctcgttttctttttgtttaaggttttaatagtcaaatgtatcatgtgggttaaaatgagagaaaatatgccaaataatatgaatattatggatttagcatggattttagagttgtaagatacaattggtaaaaaattttaagttctggatgctgaacacgctctatttgtggctgaaaataaagtctgaagcttcaagacaatttttaactataatccattcacttcaaggaaaaattttctgaaagaaagttctagatttctctttcagcttttcgaaacatattgaatcgtccaattctgagctatatcgagagagttaaggccaaaatattattagtcgccgcattaagaaattagaaaatgagagattcacgactattgcaaaaaaaaaaaaaaggaaaacttcccaaattttgtctataaaatgagttgcagctaggtttcctttatcattcgagcttggagaccaattttaggcattccgagattttgggaaaccttactaattgtatatttaaaggggctgagagcttagatctaacatcattcgaaaatttagaaaaattctaagcatagaaggaaggctatgagcggaagacatcgttggaggactccaaatatcgttttatctcctttatctctatcttttatgtttttaattgaatttttattgttttagaatgacttctagtagataattttcttaaggattattatatgaaccacttgaatttattttatggattaatgtaattgttcaattttatttttttcttttaattcaattttatacaatctattttaattttgtaattatttactggtcatctagctataattgttatctatgaatttgaataataattctgaaaggtgagatttgaatatgctctaattgttatggatacaaattaatttaggacgaaagtacctaagttatttgtatgattttattagttttttttgcttaatgctatctttgtgattaaactttactataagaatatataaagttttcacatagattgggtttataagtcttaaccagattataaactacttaactcaacttgtcaactgaataggaagaagggaaactgggtaattgcattagtaagtaaaataaaggatagttggagatcataataatacttgtcttatttctttaatttctaattattgtcttgctttatttactttttttccaataatttttattaatcaaatagaa

SEQ ID NO: 243828 - DNA, 2055 bp, Cannabis indica
gttaatttttaattgaataatactatatatatatatatataaaaaaaaaaattaacacacttttgtgtacattatttttttatctcctgattattcaaaatcattccatctgtagtcacgttgctactatctcacacagccaattaaaaaaagaatcacatatgacataattaaaaaataagacatatgacaaaaccgaatatagttgaaattatgctctttggataataaacttatatacatataatcatatagcttcagtgatcataataagtatatggcgattaactatgtttgagtgtttgattaactctgctatttggagtctcttgattttgagtcagcttataacacacctccttctcttcaacaacaatcagactgcctcttgtaactggaaagagtgagacatatataaaaatagtactaatatttgagtgctaataattaacacaactcaaaacttttctcacttcttgtaaacaatgaaaccaattgtttgataaatctagaattaaacaatgctctgcgttttaaaaaaagaaaagaaaagcagtgctcaccacttaattatagagctacttaatatatataataaataaatatagcatttatttattatctttttatattgatattttttattgattaagtggtaatatatataaatatagcattatgatgtttgattaactatgaaaaaaaattacaattttgaatttagaaatacaatttgttattttaaaatatgtagaataatgtggttatttatcataagtaaagaaaacaataaaatttacatagattctgtaagtatttacaaaaaaaaagagagagagagagagagagagaatacattgaaacacaaaaatatatatgctagcacaatacaatatcattaaaacttcatacaatatcattaacttcaaaagtttttaaaccatgaagtagaaaaaagattagatcttagcaatgccttagtatataaagaagtaaagaacaaagacaccacaaattaaaacgaaaaagtacaatcaaaacaaaataataaaaactctaaggagatgactacacatggtggatagaaagttttagattgtccttggctccttgatgtaaacagaaacaaaaattactttcacatctactaaattctaaaattgtgatatttcaaggaatgctcatgatctagaacacactcgccccctattgacttagcacaactaaaatttagttaaagaattaaaagaaaataaagatctaacacactctaggccaacagtaatttactttcaagtttttgctaatataattagcaggacaatttaaaaaaaaataaataataaataacatttatacgacccttcataaatctcattttgcatctctttggccaacaattcttattgtggccaacaaccaatatttcagtaatattgtgatcaagaagttgttgtagactataacacctaaaaaattcattatgtatttttatgattataaatatatattatatatttgtattttaatagattatagataagatctcacaaagatctttagatgttcataagagggataagtaaactgtacaaaagctaacgacaatccaactctttatagattgttagcatcaattttatttctcaactcatatatggattctatatataaccaaatatatataccctaaaatgtgtagtaatttatgtatatgtatattacatataatatagtaaaattttgttacataacatgttaatttaaattttgtgagctaattcttatcacattttaacacaataattcactttcaagtctaaggtaccataattagccgaacaatttattcaaaaaaaccccttaccatcatccttcataattctcattctatgtatagcatgaaagaaagagatcataatgtaatgtatgcgcctaccttttagactaacaacagtggctgcctctgtacagctactgcttctctccctctctttgagaattttccactccaagaccaataatatttttccccataacaactttagcaaccac

SEQ ID NO: 243829 - DNA, 6362 bp, Cannabis indica
aagtttccatgattggagttgttaggcatggagtatcttggaaagacctgctgcatatgaaaagcaagatttcaattaaagtttgcagcatagtttgcttccagtgattcgaattcaagagaggaaatctgagaactgatgtcaccttctttgtctgatttttcaattcttgatttagaggcaagcagtaacgactcgatctcagctacactgtaggtttcaagtccggtattttcggatatgacaaaagtgtcatattcacttggtagacctttaaagatagctggaacatggtctcgagcagtgtagactttaccaactgaagtaagaagatcaaccagatgcttgactttgagcaaataatctgacagagtcaaagagcctttcttcaaattctacagtttggttcaaaactccagcaccttggcagaaacatgcagggtgaagtattgctcaagtttggaccaggtctacttcgaagtgtcacaaccaaccatacgagtgagtaggctttcagacattgacgaaagtagacaggacatgagtaattggtcatgaacttcccagtcaagataggcaggatcaaaagttttggagagatgatcttgttcagtaagaaattgaggaggaggatcattggtgatgtaagattggagacgatttccacgaatggcagccataacttgttgtttccacagtaaaacattatgatcatttaaacaaattgaaagattatgagataaatagattggagagaactcatttgaattctacattcttgaacgatgcagaggtgggtggtcgctgattctgagtgcttaagttaccaacagtgtctccagctccattgtgatccctcgaactaggaacttgaggtcctccagaagccatattggccgacaagggaggaaaaatctctgataccatgttaaaccttttagccattgataagcttcaaccaagaaacagagaaagattgaaaagacagagaaagaaagagtaattgtattacattgaattggaacagtacaagcttatatacaatcgagagatagagagggagtgaataatagaaatgtaacaattataacagaatccctaactaactcttaacagaaaagaagctaatcaccacttaacagacttactaactttagctgtcctaatacaattgaagaaggacattacaattctatttcaatataatacaaagaccaataataggaaagttctttaaacaagcattatattgtatagttggaggtgtctaggttttcaaattgaagatgttattaggatgtaaagttgttgtttaggagtaataaagaaattaaataaatattataacaacatatactactctatatatatatgtgctgacgtagtttttcgtcatctgatctatgaagatcgtaaataataagaggattgcgataaattaatttaactaaataaaaccgcaataaataaaacggacaccagagatttattgtagttcatcccccatgtcgtgatagtaatggggctacgtctaattttgtttttattaattagatccgacacatcagagttatgttctcaagagtatgtggaaaaaaaatacaaaaatagatttttaagtagaatctatatcgagacttataaacacaaagctcatgggagatccgatattcacaaatctgataaatatggtagttgtgaggtccttgagaataacaaaccaataagagtaaaacaaaagaatggtccctattcttggaaacagtgtatatcaatggtgtttggatcaaggagacttagtgttgacaaagtatggaggacttaggaaaaaggtgaaggaaggagatacgattctcccttttaccttagcctattactctctttatataggttttagggtttgttagtgatctcccacatgttggggtgtcccactaacaaatctcgtttctcatccttaataatgaataaaaaactacaaataaataaatatccccacatgtcggggtgttgaccatggtgttggggacagatgagtatggtggtcgggtttgagccatgggttacggcaccacccagaccagatatttcaacacaccacgccctaaaagaaaaaaacacatatgggtcgaacaagacatcatcagatttggagagacatgtccctgagacagaggaaagcaacagatagttggaggagaaagtggatgagctcattcgtctattttgttcccagtatagcagggtttgggtacatcccatgtgtcttgttttggtgctggaggaacatcgaatgaacaagcccatgctgaccttgccttcgatctcgtagcataaccatcaggtcctgccaatatctcttctccacaagatcttgtagcacaaccattgagtgctgccaatatttctactccatcaccactgcgtttcaagaaggtttatgctccagcaccgccatcaccaccacctactagtggtagtttagaagaggtaatcttaatgttattttatgaatttatctaatgaaaaattataaatatgatcaatttacaaactgaattgttgtttgtttgatttggatatgcactgtgttggatgcactgttggttggaacctagtgggatggtactgaaggttgcttcggggcacattatgaaggataaatatttgaaagatagaaagttcttgattcacaatgatgaatacatatacaatgattatcctcgggtattcatcgaagaagtcaatgtggagaatgcacttcttccgtgttccatagcccaagatgcattcacaacagttggttaagctataaaaagttacatagcatggctgaaagactatcttacactgttggaaaatacttaatatttcttaatttatttacttaacttattgtgtttactgattaatgaaatttttattaactttattatttttttccatatatatatataaacaccgccaccaataagcaacttcagatacaaactgtgaggagaacagacaagcctctgaagatttattcgatcctcgaacatagcttccaaaacaccctaagaggccgagtaagccaacagaccatggtcgttatatatatccagccacgacaaactacctcacccattaccttctagaactcggtgaaaaagtagtcgaagtcatccataatctaattccatgttgcttatgatttatttggggtcgaaaaatgactccatttggtttcttaaaaatggcattcatgaattgtgtaccatgcaatacttgggagcccaaccgataacagtttggtgcaagtatgatttctaactcttaaaataaacttgataattttcttttgacagtgatagttattaattatgtgtttttatcaggcacgtgaaagaatgaatgttggacatcaatcggctaaacagagtacatgaatttctaaattcgtgtgtgattgccatcgaagtaggagttgatagtaaccgttgtcaagcactagtcactcgtatgactaggatgaccaatccagattaataggttatttccctctacaacaatcggtataagtatatttaaaatgaataattttataatttataactcttcataatatatattattatgtattaacagttttacacatatttgttcacgtagctagggaaatgtttcactagatgcttgtactaatccaactaagtaagcagacgatggcgtacttagatttcggtaatagagacataccaaatgatttgaaattcatcatttttatgtaggttctatatccaacatcccaatatgtaagcgtattttatatttataaatttatatatgctaagtttactttttgtgtagatcgttcaccatttacaatcaaatgataagaaggactgatagacctatctagaggataactcttatctgtcatggacaaccaaacaataaataatgtggatactacatcatgaaattcattgaaattttcatgatcgtagaagatccaataccagaattgatacacctaatgaaacaattaataaatattattttttattaaataacatatcataatagatctttactaattaatatatacatttgttttacagggtaagttctccactctggacacaaataacaagataaatattatgtgtgatcggtggattctatacgtgaaagcagaagcagagcaacaatggttgccttgttgattagtgtatatatatctcaatttattgttactagataaatttataaatatatttaaatgattattagcattaatttaatattattattactctataaatttttaaatatatttagatgatattagggttagtttaattattattactatataaatttctaaatatatttagataataatagcgttagtttaattattgtgactatataaatttgtaaaaattagaagaactgactgtggaggagaaggactcattgtggttagagagaaatatgatataagtgagaaacataaacaagacaaagggcctactagttaaaacgaccatggtaatcagacgtaattcaaactagggaaattctacaattactgcaagaaagaagggcattacaagtctaagtgttacgtgctcaagaataagaacagtagggataacaagtcaaaaaatgatgaagcaaagatatttagcaatggctatgagtctagagatgttctggttgtgggaaaagaagtttctggttagaattgggtgttaaattcaagatggccttcaacatgtgtcccaataagcaattggcttacaatttaaaatatatcttaaagggttcagtgcttttcggaacaataaggcatgcaaagcttgagaaatcagataaatttcaattaagatgcatgatgggatcgctaaagaaatccaaaatgccaggtatgatcctgaattgagaagaaattcaatttacattagaattcttgctaaaaatggttgcgtggtaaaatttttgaaagactcaatgaaggtacttaaggttgccatgatggtaatgagaggtgaatataacggtggactctattatttagttggggagtccataacaagtgttgtagaagtagcctcaagtgtcaaagaatcagatgctacaaaatctttgacaccaaaggctagaacacatcagtgagaaaaggcattagtgagctcatgaaacaaggcctactcagagacaaattgaatggaaatctcaacttctgtgaagaatgtgctcttggaaaaagttgtaaagttaaatttggtattggtaagcacatttctactaagcatcttgcatatgtgcattcttatttattggggccatctagaataccaactttgggtggagcaatctatttcatgagcaatattgatgaattttcatactggtgaagtcaaaagatcaagctttggaaagtttcatcacatagagaaaactaatggaaaatcagcttgaaaagaaggtgaaaaagttaataacagaaaatggattggagtactattctaatgactttgctagatagtgcaagaaaaaggaatagctaggcacaatacagttagggacacacctaatcagaatggaattgtagagagaatgaataaatgtctgctttagaaggtaagatgctcgcttgtaggtgctggtttagaaaaaaaaaaaattagggtgaggctgtcaatacaattgcctatttaatcaacaggtatccctacgtgcctttgaaatttaaaacacctcaagaagattgggaacaaaactatgtatgaacatttaaaggtgtctagttgtattgtctatactcacataaggcaagacacgttgcaatatagagctataacgtgcatgtttattggatatcctaatggtgttaaaggacataaaatgtggtgcctcgaaccaagtttcagaagatacataattagtagagatgtcatcttcaaggaagatgaaatgcgaatgagaaaagcaaaggatctgagctcaactcaagtttcaaatagaccacatgttgaggtggaaaatattaatgagactgaacaattcaaaccgcctacaactgatgctcaagacacgccagatgaaactcaagctgaccttgacaattattagctagcatgccagagataggactagaagagtaaccagaacccccaacagattgggatatgatgatttcattgcatatgccctatctgtagctaaagaagaaatcatataagatccaaaaacttataatgaagccataattagacatgagagcaaagaatggaataaggcaataaatgaagaaatacaatccctaaagaagaataagacctgaatcattgttaaaagaccatccgataaaa

SEQ ID NO: 243830 - DNA, 2341 bp, Cannabis indica
tttttttattttttaaaattttggagaatgttttaacgtaataaaaaatttaattaaataattattttggatagcaaaataaatatgtaaattgtatttaccaatactattttgtagtttgtggaagatattaatcttttattttattaaataataatttgattttatttttattttttaaaactagtacaaatcagcaccacaaaactaagtaatttttctgttttgttagtgttataaattatttaagttttttatattaaaagaaaattattaaaaattaagcttgtaatcatttataaaagtagaaagattcaatttatgttgaataaaataaaatggtattaattgtttaattaattaagtttgtgattgtgtgtggtaggttgtatgggaagctaaggtacgttagcagacttgattacctatgggaacaggtgaggaggaatgagatagagatacctgagtttgtgtatgatcatgatgaggatttggagcaccgtccgatgatggattatggattggagagtgatcatccgagggtgtacgatgtaccagcagccgattcacctgtgtctatgtactcaatgaggtgtattttgtagaaaaacgcgcctagttttaagttaaattttgtacatatacgaatgggctgggctttgttgttttcttgttgtttgggcttgagctttgggttttggttgggcctgttttaggagatgtggcccaatttgtatatagaagaaaaagatgggttcttttttttttttttggggaagtaggttttttaattgtttttgtatgtgtgtttttgcaagtgcaactcaaagagatgaatgaagcatttacatatttttagcataaaatgaagtgttaaaaggtattgtgaatggaggaaatgtataatgagattaagaaaatggtatagagcaaagttaaaatgaattgttgttgttgttgttaaacaaaaatctctattataatgtgaatttgattaaagatattagggagaagggaagtctaaaaattccatttatataaccttaaaaattcatttaaatttagctaaaaaattgattttttgcaacttccaacttatagtgtcactgtctcatatacttacaactttattttattggccacaatattgttcatgaatttcaagttcctctacaaatggaatattaatgtgttatcggaggaatttagacaataccaaatactgcgaatattcaaacaaatcagaatatttactaacaattatgcgagtacttacttagaatagtgagtactcaaagtataagctattaaatagataaaaacgaaagcaaaaataaagagaagacaagagatagtgtacagtcagaacttggtctgcttaatccacttttggtaatgatttcagcttagtttatttgatttggatcacccctttatatagaaagcaagtatctattaggtttacataactggtcaattcaaactgtttttgcaataaatgatagtattaaatcaaaataaacgtttaaagaataaatgaagaacactttcctccaacccccttctcttaatcttggaattttctgggtttttatttttgttcaggggtttatagtgcgatttcaaattcgaaatcgattgatatagttatctaattttagatttgccatttgggatttctatttttggatttttttttctaatttttgttgatttagtataataatggtggtaacagtgtggtggtgtttgtggtggcggcagtgatgtggcggtggtggtggtagtaagagttgggtggtgttggttggtggtggcagtgatgtggtgacgacaatggtaacagttgggttgggcgacaatgcaatggtgaggtggtaaacgctaagaaggagaaaaaaaaaaagaaaaataaacaaaaaaaaatattttataatatttaaataaataaaatgatgtggactaataaaatcatgtcacgtgtacaacatgcagatttatttaatatttaacagtcaaaaattaacgaaaaagtaaagaacaaaataattgtgtattttggggagttctgctcctaaaatttcagtaaaagaattgatggtgccaaaatccataatttaagaagtttaggcgtaaattactttaaaataaggctaattgggattttcgtcccataaattttgacatgtaccaaatcatgtcccctgaacttttaaggtcgttaaaaatgcccctgaactattgagattgttagatttaaggacttttgtctaatttcattcaatttttactatttcagtgattgtttatgtactaaaccatgctccccagactttgatat

SEQ ID NO: 243831 - DNA, 2748 bp, Cannabis indica
accactcaaactcaaggacaaagctccacctatgtccctccccctcaaaactggaatcctttccagaactccctcaattcctctcttacagttcgactcgatcgatcaaattttttggcatggaaatcacaagttgtacctacagtcatcggacacggccttgatgaccttctgttcaccggaatcgctcctgcagaaagactggtaacaggggttatcaatcccgagttcacagcatggacaagaaaagaccagttgcttctcagctggcttcgttcttccatggcagaatccattcttggatctctcgccaatcatcaatcttctcacactctctggcaagctttagaacagcgattcgcatctcaatctaaggctcgaattttacaggtaaaatcccaactctctatgatacagaagagaaacttgtcaattgcagactattttgacaaaattaaagttcttggtgataccttatctgtagccggccatcctcttgatgagagtgatctcataatgcatttgttaaatggtcttggccctgaatatgatccagtggttgttcatgtcactagtctcgttgacaatctttcttttgattcaattcaatctttacttcttactcatgaaagtcgactagagagacatttcactgtccatgattccatcccaaaaccctcagccaacctctcggttaactcatcaagaaactatactggaccaagaaccaacagctacaatggcaggggcactaattttggtggtccacatcgaaatggtccaagattctcaggtcgtggctattccacaaatcgattagtgtgccaagtctgctataaacttggtcacactgcatcggtttgtcattaccggtttgataagaattttcaacctcccaagactggtgaaaatcaggcattccttactgaaattgaggaagatgaccctcaagcctattacaccaacactcttcctgattttgctcatgatcatgagtggtatgctgatactggtgccaataatcacatagccactggtatggaacatctggaccaagaaactccttacatgggatcagactctgtagctgtgggaaatggcaaacaactcaacatctccaatctaggtaatacttctattcctacttccaattctcccttacaactaaattctgtccttagagttccccaaatcactaagaatcttgtcagtgtatggaaacttactaaagacaatagtgtttaccttgaatttcactcaacttgttgctttgtgaaggacaagatcacagggagagttttgcttaaaggacgagtcaaaaatggtctctacttgctgactcaaccacactcaagcacaccagtccaaatacaatgtcaacttgccactaaggagtcacaaccagtgtctgtctctaatagtaatagtgcatactgtaataatgagactactgatgtagtctccaccagttgtaatcctttacctatcaataaagattcaacttcttttaatactagtgtgccttatactgttttcaatgttcatactacccaagatattaatatgtggcattccaaattggggcatcctggccctcatactcttgccaaaatcttgcctttagttagttatacagggactctcaatcaattaaaggtctgtgatgcttgcaaaattggcaaaagtcacaagcttccatatccaatctcctctagcagagcctcttgtcctttagaactcattcatactgacctatggggtccaagtcatgtcccatctaaggaaggctataggtactacatacactttctagatgactatagtaggtttacctggatttttcctctaaccctcaagtctcaggcctataccacctttctacatttcaaaacacttgctgaaaaacagttttctcttcccataaaaaagtacagtctgattggggtggagagtacaggagttttgcctcatttcttgcagctcatggagttcattttcagcattcatgccctcatgatcatgagcaaaatggtagggctgaacgcaagcatagacacatcaatgaaacaggaatgacattacttgctcaagctggtttagacttatcatattggtggtttgcctttcaacattccacttatgttattaatcgactccctacaccagttcttgataatatctcaccatatcaatgtctattccacaaagttccagattacacatacttaaaaatatttggatgcacctgttttccccatctcaggccctatcattcccacaaaatgactatgaaatccgaaaagtgtatttttgtgggttactctcttcagcacaaagggtacatgtgtgagagtcacacaggaaaaatatatatcacacgacatgttactttcaatgaggaagagtttccagccttaatcaacactgccacattgcaggtaccctctttaccaattcaaaatttttcctctgcaacttttactacagcacctaatattaattttccttgtgataatgctgcacctgacatcaacaccgtgcctcctggaccaagtgctgtccctgtcaccactgtgccacctactacatgccccactgtgccacctgctacatgcacaactgtgccacctgctccttgcaccaatttacctactgtgtcatcaactactcccacaactgtcccttccatacctacagaacccaattgcccacctcccaccactcaatcaaccaatatacaccatatgc

SEQ ID NO: 243832 - DNA, 3928 bp, Cannabis indica
caccagcatatatatccacagctacaatgaaagagaggagactaggtttagaaacagtaggagcagtacgagataaaaaaaacctgaaatcaacataacataaactttgtttgctaccaggaaggttaaattcataaatcacttggaaagccaagtcaaaattcttttccacaagagtctctgcaattttgcatctcctcctgcaaaggaaagaacacataaatctcgttacataatatctcagaaaaccaggtgaccaggaaagaagatactaaagcaacagtaccacaaactaagaaataacagcaacaaaagaaatatgtgcaccagctccactagcccctctcaaaaagaagaaatatggggagaattttcttgtatatacattatgtaggcacgttaaaccttaaatttcttaaaaaacatagttcctgtttaattaattggttcagatgaaagccgtatatcctcatatcacacttctacagtgcaccccttaataaaaggtgtatcctttcatgttcccgatatttgaatagttataatcttaatttttccatatgatggtgtacaatgtagttagttagaacatcttgtaaatttttgaaaaattcattataatttacaatgttgaaaacatgttcaaatagtctatttcatgcgtataaaacaaaaatagcacacaagcaatagacttcgtatctaaatcccaaaaatttatagtatgtcagaaataatgtatatcggctaaattataacaatttacattctaaaaacacaacggggatgggatggggctgcactgttgtacccctttttaaggggtgcactttagaattttcctatattttataagaaacaaacttctatctgaccatcctcgataaaagccaaaaatacaaactaaagcaaaaagaagaaacaaaatgaaactaagagggcagaaaagagtttccagccaagagtatttatttaaaggaagcggtaaatctactttagcagcagtttctaatctacagtagccttgctttattttctcattaacacaagaattgttttatttaaaaaaaaaaaatcacttatttctcccaataagtagcacatccaactctattacatagaagatacagttgtttcttttcaatttgttttccttcacaaaatactccctgactaaacaagattgtgtcatcgaacacttctctcaatctaattacccagaatcttcggaattgtcttacataagcctgttactagaataatgggtctgaagtcactcacattaatgtccttatatggtttatataaaataaaaatattgatatgtaaatataaactgagatcattttctctacggctcccatactcccaagtatgacgaaatggtttattgaataagaatggcacacctgaatgtctcggggtcatttgggttaccaaagagtgagtatagccattgtggcccatcaacatcattgtaggacttcactacttcgacctacaggttatccacatgaaaatgtataaaaaccaatgaatgaatgaagatgttataattcatggaaaaaaaggaagccaatggaatatgtgtgaaacttggacattttgatctcattataaagatagatcagggccaagtacagaacacacccaacttgtgaaagcatgtatgagaaaatgagcaagctacgtaataaacaggcagaaaatttgattcatgccaatttacctgaattgaaacccgagcagaaaacttcacgagtccttcttcagtaagcttctcagatgcactttttcccctgacaccctttgtgacaagcttagtagaatcacctttatatcgagctgacaacccttcatcgaaatgcatctacaacaaaaagattgttttacagatgaatatataatattatttgttgcttttaaaaaatcttctcttgagtttcgtgttcttccctaatactattcataagagaaatactattcataagagaaatactattcataagattgcaataagcatgatgatttagcaacgatctacaccaagaagcatcaaggcaacctcatagttctattccagattctaaattttatcagtccacaaatcagctttcccaacctaaaaatatacaacattcctatccccttaccaaacctggaatctttacaccattctaccttaccaaacaaagggcatcttgtaactacgtaaggaaaaacatatccaagagtaacaacaggttataccttagcatgttccaaatgtttaatagcctcctctagcaaattagaatttaagaacaattgaacgcaacaaagtccagcagcaacatggtctttcttgataacctgaaaaattatacaacttctaagtagtcccacattaaagaaaatgaaaacaaacagtgcactgacatgaagattcaagtaccagtaagattaatagtggtttagaaaaacaatgaggaaatagtcaaatactttattcgcagcatctgtgacaattaaaaaaatccaccttaaatccaccttaactttttctctcgttttttttttttttattgaagggagggttgtgcgtggagaaggaaaacataaggattgctaattaacatgaaaggtgtgaaaagccaaatttgatctaaaacctgcaagtcaaaaattacctgaaaatactagggtctaactcaaatgatagggtgtgtgttgtgtgtaagaggtttggggttcaaatctcagctgggtaactacaaactgtttcttatcccaaaaacacttacctgaaattggtacagaaaattgaaatgcttatgcgtttcacagtatagacaaattcgggcaagtgctgcagctgtatactggctcactgcttcgtcttgtggctctgtagctgacattcttgctgatatcacttcctccaaaacaggcattgcgccataactaacgcacagatcacacagctcatcaatggtcccataatcagtcgccaaattatcttgtctttgaggggatgaagaagatgttgccattcccaccattgatggttgaggaggaagagggacagcatttggggggaaaaacaacatgcaggcatcattgaattgaccatgcttaaacataaattcaagcaatttctgaacataaattcaagcaatttctgtcgtgcatactgaaaaaaaaaaaaaaaaaaatagaagtttgcatatagagatatccaatatccttgagaaaaggggctaaatgatagagataatttactatttgggttttcttgtttttgaaggaggatttctggttctcctgttctttattttattaaaaaaatatcaatttagtaacaaaaattgcttacagttataaatgtttagaacaaatgtaataggaattatcttcttaaagaacacactaaccaagaaaaagagacaggcttatcttttaaattggtttgcacagttctaggttatcaattcaaaacaattggcaaataataaaaactaaaaccatagagcacagtttgattacctatcaacattgtaaaagtctgtcaacaagaatgaaacaagcaaactaaaacagtcaaagcgataaggaatgaatttaagatatgaatgaaatcttacttcttgcaaatagttcacacactcgttatagcgattgtagtccaagttgctgcgaggtccatcttcaaattctgaaccatatgtagaattatcattcgcatattctggaaatggtcttgatttttcagaacgtggaaaagtggatggcatgtacagcacattgagatacgaatcagctgaaagagaatcatctaagattgttggagcactcttagccaaatgttcatacctgaagaagtattggtcacacattagattctgtggtacttttttttctgaaaaagagaagagatcctcttgtctta

SEQ ID NO: 243833 - DNA, 1359 bp, Cannabis indica
tatatggctaaattttctaccatttattctatgtgggactaatgttccacaacattccctcttcaagatgatggctattttttgctcatcaatcttgaactatcagatggacatggtcactatctgtataggtgcggatcggataggatcacttgcccgtaagggatatggctctgataccatgttgagaattatggagttccatctcaaaactaattggctatgagtggagtagcccatgttcttatatatggctcaattctctaccatttattctatgtgggacaatgtccacaacatgtcctaacaccactgcagaaagaatttcgttcaatgtaatttgtaccagataaatgatgaggttaaagcacaaacaataaaactggataaaaaaaagtgaagctccattttgttgagtatactgttgaataacagaaattagttaggtatttattaagtcttagttagttatgcaagtttttttttttttttgttctattttggctacttcgttctctgttcttaactgctactactataaataacagcttcaattgtaagttgattcattcagaaaattcaataaagaaaagtcatttttaaatttacaccctcttaacttggtatcagacgctgaaggttcttccgtggtttcctccggtaataatgcttcaaccgacacttttgttgttcccacaataatgtttctccctctacttggctaatgtctttcatttctgaaactatgctgggtcatgttgtcaattccacctctactcatgagctatgacacactcttaaacaactgtttggaacaacatcacgagcctcgtcttagactatgagtgaaaaacagaccaaggaagaggaagaacaaagcaaaatactctgtgaaacaattttattatactctgaatgaatttacaatacaaaggaggagtatatatatagtgtaagctgagttagttagggaataactaactcagctgaacataaccgaaaattaagaacagaaccaagaaatggttcaatgatattggtgtgaagagataggggcaatatcgtaatagcccccctcaagctataatgtagatattcgaaatgctcagcttggagacaatgttgttgaatgatgttggtagcagagcctttgtaaagatgtcaaccaggttattttgggattgaacgtgaagcaacttgaggaatataaatgtgtgttctaaatgttaataaaaatataaatgtgtaaatagatatatatatatatgtattttaaaattatgcaaatagatattaagggtgactatctaatagttacatttttactgtaaccatcatggttacatttttctttgacct

SEQ ID NO: 243834 - DNA, 1565 bp, Cannabis indica
aaatgaaaattttagggattttgctgcaatttatcctttaaaaaaacaaaattttcctgccctctcgctctatgtcgttgcctctagctgaaatacaacttaagtgttcgtcattttctatcgataaaaaaatatacttaagtgttaagatatcaaagtatgtattgatatttattattgaaaaaagagatgggtcatccttgtatatgcaagacatagcttagaagagaaatgattaaagaacattaacaccctacatgcatagaaaaatctactattacaccatgtgttgtgtggtgtaatagtagagaagcttttattggcatccttgcttgcgtggattaattgttcgaattttacaacaacttctcattaagagagattatgtttagctctttgaaaagttaacttaaaagtggaaaagagatttataccatgtgatctctttttattttcagaaaatatccctacacgcataggaagctgtgtcaatttagatgtagagtaatctatgttaaaattttgcaccataaaaggtatttatatatatatatttatacattaattcatgttagttgctagaatataatttttctttgaataacttttagtgtatgtgataccatcacacttctactgcaccagtttaatcataataaaaaactaacaatggaagcaagagaggtgttggacattcgctcaggtatacaaaatgccgccacaagctctcatacagtgtacaagcctaccaacattcaaagccacttgtgaggatttcagcactatccatggcagttttattatttccaccttgagtaaaaggtgagactttgaattaaggggtgttgattgacagacccccacgcacctacatttttacactttggaaggcttatggaagggaccagtagagaataattagttgtaaagcttggggaaattgtcacttgtgtatgggtttggtattgtagtcctgaggtgcagggagcacttggtgcactgcttacttcttagtgggtagaataaataccaaaaaggaactaaatgtaacgaaaaagaaattggtacggttgtaaacattttggatgggagaatcaaaatcctgagtaatttcaatatagggattctgactttttacttccatttattctatgtttgctctgtactaccccatttgtcagtaaatacctatcatcttcatactatatggcatttgttattgttactaatctacccaatgttgagatttcacaattgaggaagaaatgaagcaatttcttccttccacaaataatagatgaataaagattaaaactttcaacatatcttattagtaaaataaagatgattattcaaaaagaaagtaatcaagctatctttgttccaaatcttgttcagaattggtagtgtattgtgtaacctgttttacaattttgccatccctgaagatgttgtttagcggttttttcttttcatttttttttaaatcaagaaaaaaaaagaattgcattaattaactgagaagattacaaacaaacaatcaaacaaaggctaacacaacagcc

SEQ ID NO: 243835 - DNA, 1975 bp, Cannabis indica
ggtaacctagtttggtatcgtgcaccagagctgctccgttggggcaagcattatacaagtgctgttcggtacctctacaactacctaaatttcaatttttattattagcaggcatatacagcaagatactagatacaaaattgacttaaaagatagttgttatttgctctagtcttaacatttttgtttgtgctatgctttatcagctacacacacaaaaacacccatgtgtagcttgtgcatttgtgcatatagaatttcctgtatgttggattctaaaatatatcaaagaaataaaggcttctagtgttgcactaaataaacactatatctttatttagatatgtgggctgttggatgcatttttgctgagcttttgactttgaagccactgtttcaaggagctgaagtcaaagctaccccaaatccgtttcaggtcttctttcttctttcttttctcagtgtccttaaccgactttgatgttttgatatagtgatgtactcatgagatttatttaatttttttttttcagcttgatcaacttgacaagatattcaaggtcttaggtacttatctcagactagtaagctcttatttgttccctttatgtttaggatcgttattgtatattgttatttcatcaggtcatcccactatagagaagtggccaacacttgcaaatcttccgcattggcaaaatgatttacagcatattcaaggccacaagtagtatgtttttgatacatataatattttgaacatactgtttatagtggtcaccgtaaaagataatttattttattcttcactgtgaccatcctttacaaacctctcttttgccgtgttctgattttattcatgttttgttttgctttctgcgtattctttttttacagtgacaatcacgggcttcatggttttgtccacatctctccaaaaagtcctgcgtttgacctcttatctaagatgcttgagtatgtatacctctttaaattgcgtgaactacattttatatttgtatgttagtggattgtttgttcattgatttatgaactttgtacattgtaacaatagtgggcttcatatattattatttatattgttattattgttgttgttgtagaggacatcttgttattaatgtttactgattaaagcataaatttttcatttaaccaagaagagaaagttacaaattcaacttagcaagatgtcctcaacactaaatatgcacaaggaaaaattagttttattttgttacttttatagtcaaatttatttcatagtagaaaagaagaaaaaaaatccttgaaggagaaatacccattcattctttcctatgttcctgggcctgagaactattttaaaaaatctttttattattgtccaaccataataagtatgaagtttccacaaaagcactcccaatagctattctactctatccttcaaaatacatcaccaaaactcaattttttttaccttaagttttacattacaccatatatcaacttctttaaaatacatcatcgaaactctaattttttcaaatttaatatattttatccatttgaaatatataatgttaatatttacacatatccccatataaaaagaaaaattaaaaccccagacaattaataaaatatgtttagagcaataaatagagttgtataaatgtagaccataaacattgaattttaaagaagctttaaaataaagaatgagtttagagcatctgatgtagcgtgtttttagtttatatcttattttagagaatctctatttcaaagcatctgatgtgagtgctcagtagctttgatagacacattgtttgtctttccagtaaaaatcaatttctacaaacctatcattttctcaggaatcatattttccaaactaaccttgtaagagtcaaaaccacaattaaagctgaattattgtttctttcttttgctttattgaaatcacatc

SEQ ID NO: 243836 - DNA, 1643 bp, Cannabis indica
taataaaaatataaaattttgagaaaatagaaaaggttaatgaaataaaatgtagattgtcacttaacatctctaatgctttcctttatatatagatatagatatagatatagatagtcattatccacgtgtcacttttttaatagtatatttaaattaatttttaaataaaataaaattttaataatctggaccaatcagagactattaagtggacgttgacttacacttaacggtcaggtacctatgtatgtttcagaattataaattaagtattaatactattaaaaattaaagtaaagtatttatttacaattaaaagttaaatttaagtatttataaattattttattttttttaataaacaaatttagagcatttttattataggattttttaggcttgctaaatggtgggtaaaatggtaagtagaattagccattcgataaagacggatccaactcaacctgaagaaagtccaatttatctatctacattcaatttttttccctaaaaatgaggttattgctggtaaatgttttgaaaatgttagtgggaattgggaaatcaatcctcgaggcaccaagacattggccaaatttccactgtacgaaacacacgcattcataaatgttaatttcaaagagatttgaacaaagtgttgaaacgttgtgaatatcaataatcacgttgtattacttgcttgagagccataacaattgtttcattttacattcaaaagtgttttgagagctatacattaattagcccatcataaatgtgcttttttttttttatttccgcatgtctgtcatcataaatgtgcttgaaattgactttgtattatagagcattaggcatcactaatgtttttgatttttctaaatgtattattttacgatttattagtaatattttttaatatttaatacttaattaaattaatgaaaatattacaatttaaaggatattaattaagagtaatcaattaggcaccatacattacattgacaaatgctaaaacacactattagtattttccaccctcgtcagtatcatactcatatcgtgcaattaagtatcacatctcatataacttagtataataacttttaagaaatatcaccaaccaatcataaagcaccagacactactaatatttaataacaatactcaattatattatcatttcgtaagtgctcaattaagacgatatgagacaaaaccaaattaagtgacatggcaagtaaaaaagttaaagcattgacgtcaaacatttcaaatgctctaatagtagagaaaaaggataatgtcaaataagatattttattctttcaaaaaaaaatataagtaaataaaataaagtattttgtattaattttttaattgcttaaaatttctgcctaaactaattggaggttacaaaatttataagttaatgcctaaaagttctttagataataacatattctaataagagaaaaaatgatacctacagtgtaagcatattagagtctcacattggttacaaatgtattcttgatccatttaataaggtgagggcaatccttgagtacaatccaattttgttagggtgagatatacatcctaagtttcctaatatattatcagagcgggttcaa

SEQ ID NO: 243837 - DNA, 2078 bp, Cannabis indica
gtttttttttttttgaataacaaaacaccgtaacttgccttaacatttctatttccttcccccctttctcccatactaaacaaccttctttttttgcttctctccaaattttctccaaaattgtctttcccccatttttctttaccttacaaaggttagtgttggttgtataattgtatttcacgttattgtttaaaatgttactaatttaaaaagagcaaaaaataaaaataaaaataaaacatctgaagatctgaatttgtctaagcaaaatgaggttcatgtatgtacagatttaaatttgagaagaccatacgaatcccaataaattaacagaaataagtcccatgtgataggtttaggttataatatataagctcagctataaatttgagcccctttgaaaataaaaataaaaataattaaaagataactagaaatttgaacatgtggagtttaatgccttgccaagttgccatcaatggagggcttacccttttaaaattatcttgtattctggtattgggcgcccttaatccttgtcccccaatgcactgtggaaactttatacaatattatctataataagattgtacctagtacaatgtgtgtgcatttaactttggtcaacactgattccattccacttattgatatgaattcctagccatttagctctcatcataggttaactggtttattatgtaattttccagatcccatattggtcaattaaatgggtcaaagtttggtttgcagattaggatcaaaaccactaaataataaaaaatgtatgtacccaatttaatatcttaattataatattatgtttaagaactctacctagagagttttgatgagatgttttccaatcccctattcttgtaacatagcaaggcattgacttggttatgttaggcagagttgaagaaaaggccaaaaaaattggctgaagtagttgagggactaagttgcaagattcgaagtctcagttcacaaaccatatatcatatataatgatataaaccaactatttcacacattattgagtaattttaaattattttccaaggtaaagtttttttcaccttcgttatattaatatatatgatatattatgtataaaatatttgtagaagtatattatatataggcaaaaatttctaaaactaattaggagcttctctctcttgcatataacttaatttgtaaatgactactttttttttgaggttgttgaagtggggagtggttcttatttggctgaagggaacaaatacaaatcgaaggccctgaagtgtttttgtagctgttaaccacagcacaataattggtttaggtgatatgaaaaataatatcctcttttttgtttggtttccatcaaacaaaactttattaaataataatatatattatatataggatttttcattataattagaggaccctccactttctgcattaaacaattccaatttaataataacaattcctatttaatattaaacaataaattgagaaaaagaaaggtattactgaattggtcaagaagctctaccaaatttttaaaagcaagatgaatgaataataaaaggaaatattattataaataattattatgatttcgatgtagtagttagatattctctatcctgttaagttttttttttctttttaatttttcttttttttctggatctgttaattgtatttgcacttttcataaaatagtttcaatattgtattgtcttattttcttgattcgtttaattttaaaacttttatgttaaatgtgatgtaatgttcgatagggcaaagaaaagccacattgaaaaaatattttggtgtatcaaaagaatttaaatgatatatttgttacaagtttcgtcttttgagtagttagttgtcctttcaaatagcagttcgaaaaaattagttgtctttccagatagaggtttcaggaagctagttgtcttttcggaaagcttagttactacaaaggaaagaattttaggaaagcttgtcaacttctagaaagcttgttccattaagcttgttgctcatccgaacatccctcg

SEQ ID NO: 243838 - DNA, 4837 bp, Cannabis indica
tggccaaccttggtgatggccagtcttttagtggggccagcctttgtaggtggaggccaacctttgtaggtagaggccaacctttgtacaccttttccttgcagaggttaggcttccttggccgaacggacccttccttagtctgaaagtcaccttttggctgaccagttcttgcccaatctcggctggccatataagcgcatcttggctggcttatatgctccccttcgttggcatggtggtacaactccttaacggctcgcttaactcctttcacttgttgcttgacaattttgtcataccttgtaaggagactttgttctgttattggcaaggctgtatttcatgtgtacttggtcatggcttacgtggacatgccacgtcaggtggataaaatttcagataacatgattggaagttagattttccccattggcatcagagaatctctgttaaacccttatagttgtattgggcaagatgacaaattagtcttagtgaatccaattacctaaaaagtgaatttgaacagaatattgatagagcttccattgtcctaagtactctggaaactcttttgttggcaatttgggcttcaattactagagggtcattgtggagaaaatatacgtgcctggcatcctcttcggtaaaagtgataggaaggttcatcattcttgggcactgtgctggtgattgtaccaaggcgcacatctccctttcatgatccaactccttcaaatacctctttttggagtttcgaatgcttcctgcaatgtgcggtcctccaaaaatagtggcaacatgtccatcaatgggtggcagagccaaacctggtggatatgggttccttgaacctggaacaaggaccgttactgcagcatgtgctggcagagcgggtaaagctagaagttatgttctaagagcttgaaggagacctaccccctaagggggatttacagttccttattattctaaagcaagtagctctccatgaactaccccctgtttgggacaaataattaggatccggatccactaacccaggtgttcaacactgactagtgtttcaatttcatctttcaagtgcactcattggtggtgtgtcccacatcacagtgatattcacactctttactttgatctcttttgtgtttccctccttgaggcatcctcggaggctttcgatagtcgaccatattgcatgttgctttgaaaacattttctcgagtattaataagagttgtatacttggagtatttaggtttgtattccttccttggtttctttggagccttgctccaattctgattattctcccctcttttatttcaggaaggactcacatttgattttgaaacttctgcttgttgcttcaattgtttgggagcgataatgcatccagtttgtgccgctccatactcaaagaaatgggtttgcataggtgcgttcccagaggtagcgactccatagacaaccagagagtaatgagttcccaaaagtgtgactactagaactggaacttgtggagtaaaacttggcattgctacaggtggagtcggtgctggagagattctaaaggcttgtaaattagcatcttctaggtgtataattccttatgccttggacatgaattcagatagagtttcaaccatttttctttgcatttcgctccataagaaggggccaactgttagtccagattggagggctacaaatttaatgtcattgctaactttcatctttgtagctgcttccatcatttgctaaatgaagttctttaggctttcaccttattgttgtttaaggtagttcaaggacccgacctccatggcgtagtctctagcaactataaattgctcctattaggcgaattgcaactctttccaactgtgggttgattcgggaattagtcccttccactggtccttaacagacttggtcaatgtcagcgagaaacagaggcattttgcatcatcacttacttttgccacttgcatcattctgttgtacttgaaaaaatgggttatgaggtctgtctggccatcatacagctctatttgtggcattttgaatttttggcaatgaagccttaatgatccgtttgacatacggtttcgggtgttcgtattctgagtctatgatggctccactttactttcgaaccaacttgttaaagcgacaatctgctctttcaaccttttggtgtcactatctgggagatcacgtatgtaaaccttattatttagatgattctggagatcgttcccttagggtctcaccttctcccttttcaccatttcatacttggcgtcaagacatctctaaaggtctatagtagactagctattttcggaaaaaacttcttccaccccattatcctagttaacaaaatcactagggaaattttttcttcccttaggcttcaatacttttgtaccaagccttttgattggcacaatatttccttgtgaagcacaagggcatcccagcccggaggcgttggtggccttctgcgtctggaagggctggatggccgtgttcacattttcttgggaggcaatagggtaggtttagtttgaagttcgcctaccttcgctttccccttgtcctttataggagctgaggttccaacgtcgatagatttgccctattttctttattgacaggttccttcaaaacatcctctttgaaatcttgttctaggtcaccaagttttgctcggaggcaagccatcattttctccattcaacgagagaactcttcttgacatgccaacttttgttgagtttcagctaacttgccgaatactcgaatcaggtcaggatcctgttcatagtagtatccatctttgtagtagtcatctttaatttcaccattatcttcttcttcctcttcctcttcttcctcttcttcagggtttttctcaacagattgttctcgttgtttgtttgtttcagctgttcagccatcagtttcaaacacttctccgtccctcacatggctcggctgagcgtgctttggaggggtggattagcgtcatccatggagacatcctagcctgatggaagaggtttcttgataacgattttcctagtagcgaccattcttatagatgctaggtagctttgtttctttctaagttatcaatgaaagcaccaaaaaatttaccgagatgtttggaaactaaatatttaagagctttaataagttaaacaaacgactaagtgaatgagaaggagatttttacgtggtttaggtgttactaaaccctagtccattgcctttaaggctttaaatttattacatatgaggcattacaactttgagaaccctagttcttgctgtagtattttttcctctaggtttctcttaatgaagaagaaagattaaaatagatctctcagtatgtttctatctgtccccctttcatgaagggataaaggggtttatataggcttacattcaggtctaggcatatctgcgacccgctagggtttctgtgcaaaaattggcctactattgggataaatacattaaatacatgactttgaagctcacaacaaaattttggctcgtggggcggaagtgtccgtacaaaggagagcttgtgcgatctagacaggtgtcacacgtgtgtgcagctacagtagacaagaatgtcatagggtcatcgttggacaaagggatatatctctccttgcgttacccgcactactatatcctgacataggggagaatatctgcttatgtaggcccaggcatcagagagcaaccacgtcaccctataaggccttctggaagcacctcttgggcttcccatctggatatacttcatcgcctgtcccgaggatgccacttgctccttcttctagaaggcccaatgggctccatcttcgcatatttgaaggcttgggccaggcattacgcggatgggatactcctctaaaatatcacgtgttcgtcatctagaaacatggacaacaagaataatttttaattcacttaatatatttattggacagtttgaatttttattaagttatcttaggttatactttttatcggtttattcaatttgatttgagtaatttatttatttcaaaataaaaagaaaaagtttagaaatgttgaatactatttgaaaacaaaaacaaaaaagcattctactctactcagaagtttgattgggatcaaaagaatggaattgtgcctaatcaaaagtacaatttattaacaaaaccaatataaacttgtatttgtgcattaattaataaactatcttcagagaagatatgagtttcaaaaaaaaaaaaaaaaaaaagaaacacatattttaatattgtcttgcgttaagccactaaggctagtttagtagtggaaaaaagatgaaaaaaaagagaagtcatgaattcgaatataagacttttaaactataatttattaattaataattattaaagtatcccgcgtgtgctctctgctagggcttgatcggagttatcattttccctcggcaacgaagggactccggttaaccggactgtgtggaatcacctgccatggaggaattgcttgccaaaactactcaacttcatgtctcagatgaagaagagtgggagatcgacaagagcttgtcttcgacgattgcaagattcaatcttagggggcgtctggtgtcgaaagccgaccatagcagggggtttctcaagaaggttctgggacgtatttggcgactaaaggagacagaatgggatgtaaagattcaggacaaacatgatacaggtatgttcctttctttttcctttgtgtccgaacatactcaatcaagaatact

SEQ ID NO: 243839 - DNA, 2409 bp, Cannabis indica
acaaaaccaatagcaaatggatatataaaaaagaaacattgaagcattaaggccaaagacaaacaggtagttcccaccactatacttcagaggagcatctaaagataaagcaagctttgttaaagaatgagccataacactatttttcatttacaatcagagatggacattgatgaaaaagaattccatacctgataaatgtcttggagaacaatctcaatctcattgttagtgtgatatcagctacaaatagagtaacacacttaaatgcagttcgaatagatgtgaatttgaaggtagccaagtcgaaaacagagcaacatgctttgaagcttctgcaaccacaagattgtaagttgcctttagaggtgtggttgaagaacacaacaccacaccatgacaatcttgaattatccttaatttaatgagcatcttgtcattattaacaccaacatccacaaacaactcaacctcactttctgctagtggagtaagagcaatcgggcaaggtggagttgagctgaggaccacttgttgaactcccataccactcttcagtgcgtcctggtatcgccacaaaaattaagatcccaagcccccaccattgcaatctaacaatttattgtcatgaacatattggttctgcctataccaaattttctaacatagaaccaaaaattctcccacctcatttttctcaagaatatccatatacccaatgagcactttgtgaaaggaagaagcactactcaaactatccaagcctttgagaagccaaccctgactaatattgtaagggaaggcacaaccaaagagcatgaatgctagtctcattattttgaaaacaaattggataaacttgaggtgaagaaagaccatgtttagaaaggtaaccatacgttggcaaaaaattaagagtaacttccaagcaaaatttttaaccttaggaggtagagatagcgaccaaagaaacttcccccatggatattgaccccttaaggacgtcacttgaaaaaaacccaaacgttgtacttcactccaatgcccactttttgcaatatgctagcctatgtcagtgaaattccaaatgagacgatcaaccctttcaaaagttggcatcacgtctcataccctttcaaaagttaacaccaaaatggaaattattgctttgctttccactggattaaacaagtccacaatgagcacagagttccatacacttgaagccaatttaagatcataatcccaagaatattccacacctccacaaaaagagttggtatgccctacaaagtctttagggagaaatcttcctttatactaatagtgtcaccacacccaacaaacccccgagacccaaccttccataaatcacaccccaataacacactatttcaaaggaaagctggtttttggagagctttatggcaactcaagctactccctaagattaagaatttcctttggagaacttggtcaaggtgtctgcctactcgatctcagttgagattaagacatgttcagcttgaaacaaaatatgcctggtgtcaaactactgcagaaacttctctgcatttgtttgtatcttgcccagtagctaaggcgtgttggagtaaaattaatttcgaagcacaagatgaacatttcaccacctttgctgcttggtttcaacatggtttggctaattggaatgctagaacaaggttgaaagtttcaatgatctgttggtctttatggaagcatcggaatgagaaaaatttggaatgctaagtcacctactgtcagcgaaatagttacatcagcaaaactcaccttcacaaattggagtaatgctcagaattgatgtcaaacaactcctatacctcatgagacaggagttagaaccgagcattggaccccctattttccctaagctgacggttaatgttgatggagctctttttcaacaggaaggccgatttggagctggtatggtggcacgcacaggagctggtatggtggcacgcacaggtgctggtttggtgctggaggctcagcagattgcacatcagggtgtggtttcaccaattgttgcaaaagcaataagcataaatgaggcattaagttggataaaaaataaacaatggagtgatgttgtagtggagacagattgcctaaatgttgttattgatattaattctaataaatttatggtatccccatatggtatggctattcatgattgtaaggcattgttagtagaattgcccctagtttcaatttcctttgtaaagcgatccgcgaataaagttgtgcatgctttggcatgtaactctatttacatggctgattgtacattcagtatggcttctttgcctgctgaaatttcattcttagttttagatgatttaagttaatgaagtattttct

SEQ ID NO: 243840 - DNA, 3811 bp, Cannabis indica
ggtagtttatcatgattctcacatcttatattcatgtaccgtcttgatttgcaagagtaaatttaattcaatttttacaacgatcacacatagagtgaaggcacttctaagtgttgcatctataactgttaaggcttttattttattagagtactatactaataagaactttcaaactcagggcacttgcactcgctccattcgtggacagaggattaacatggtttactgtcaaatttaaatttgagtctcagggcaaggtaacaagataaattttatcaggctctctttaagttggtacaattaattatttttcacttctcattttcctttaaacgtttttccaggcttccatggtgattgtttcattctgtttaggacttgcactcttattatttttctctgttacattgctttgggcttgaagttgtatgtcattttttttttctttggggtctaagcagaggggagataacaataaaagaattcatatgtaacgttggtatcattagatttatttcagatgttgtcaatgcctaactcattggtgcttactgcaggtttaatagacatagaattgcagacaaaaattgttgtcttcttggctagctagttacctctatatgttaattgtttcatgtattaaaatagtatggtcatatttgacacattagagttaattgacagaagattgtgtaatatttaaagtatactgtcctggcaatactcaacttggaatacaacatagtttaagaatttttaaagtaatctcttttaaaagtctacctaataggctaatatgcagtattatatgcgtagttttatttactagtgatgtaaaaatatcatttatgaataaattaacaagtgttaaggaaccgattcctataagataatttatgaggactatgggattacgatcttttaaaataccataataaaaagacttacaaaatatcataataaaacgagacacgtttggctgcttcaacagatgatgacgtgttaaaaatgttccaatgaacttgagcaaataaaccttattaaaagaaaaatagaaaagcttaaacgtgaagaagaacaatgctggatttctggtaatcacaatctaatcttgatattttaaaaaatgcacttgaaagaagagaaagattacacatattttatataaatgagcaactgaacaaaatgagaacggatcaatacttcacactgtttttgtagaaatttataaatacaaagattacgacttggataagcaaatttggctaaaaatgtaagagatttcactttgaagattatgataacagggcacttggttaccatcactatagtttattctattaaactaaatagacagtgaaatgaatgcttcagcctcaccggaagctgttgcagttgagtagtggttttaaatcagcatgtagttatttgttttatcacctgaaataatttacataccacgaagtatcaaatttaggtatggaggatggaaatggttgtctcatcactttactttctccactgggaacaatttagagttccttctcaaaccgtccgaaaccattaaagctgtaacgctgaaaccctcccttgggacaagaaaatgtggtttgcttggttggtaacaccttatttccttgttcatcagtgcaaatttccagaccacaagctttgcaaaatgactccacatctgatacctggattacaccagacaggttttggaactcaaaaatctagcaaatacatcatgttaagagatgataagcttagtcaataggggtcctcacctccatcatcaaaagttttgctaggtgtatcagaggatatggatgaagcttgtacgcaccattattgataaaggagagagccaatgctcggaccttatattatcaaaacccaaaaaagtgaggtcaaaaggggtaaaatagatgtagcacaatgtataaaaagttctggaagcgacagaactaaaatgtgagagaatctagtgattctgattacctcgttaacataaggttcaatgatacaatattgaagatatgatgcctcagcagctatagcaattaggaaacgtttataattcccaatcctgaaaaatctgttgtgaaaacaaacccagattacagttctaaacattttcacagtaaagcaaatcaaccgaagaaaagaaagaaaagaaacaacatgaaaccatatttatcatcagagctacaaaatactaaaattaatactgctatatttatgataaccttaaaagatcccgagcaaagcgcatttcctttgaatgaatgattaaggaaggcacatgacgaaaccataaagataatgactcaccctgcaaatcagaaatagctatattgcatgttgttaggacttagcacaaggcatcaattggacattaaaaaagatcaaaaaagaaatgaaatagaaatcaaccatcagttggctctttgaaccaagatgaagaagcacataaaaagaatggaattcagcttcattcccacgagcagaattggaacttcgattggcttcgtacaaatctaatagtgatgtcagagtcttagtgagctgctccatgttaaggtaatgtagtgaagaagcatcttgagaattactacaacttcgaagcttgtaatgtgatataacatggaatttaacctgtacatgggacatttatatcacataaagcaatacaagctcccatgatttataaactgcagacaaattattatacatccaagtttgtataaagatgcaaaagactactccttaagtgaaatttgtaacaactttcatatgagatatattcaaattttaggcatcagtaacttaaaactgaatcctactaagatccatgggtaggtttccccataaaataaagattcaactacacaacataaactctcatgtacaaggtaagaacaacgtcaaatacaagcatgatgctggaaaggaataattaacatcaaatagtatctttcaaagtttatccaatgaaaactcaccatttcctgatacatattgataacttcgccattgacaatattttgcatgcttagatcttgccttatggaccttgtcctatcaaaaacgaagtcatgaataacttcaaaggagcgttctgtagaattcaacaactttagaaggtagttcagtgtctctactaatacaggtagaggccgaatatctgatttatgcatttcctttgtggttatcgttctgcagaactgttcaggaaaataacataagaaaattatattaaaaacaagaaccaaacacttcttttttttggagacaacatcccttacaccaactaaccaaacatacatacacgggatgtgtttgtctcatttggagattggtcatatttgaacataacataacataaaaacttcgtacatacaaatgtgattttgtaaatgtataggtaagtttacacacaattctatatatctcaacagcataacagcgtaattgatgtgcttttttatatttacgagtaaaagtatacacatgtaatgtgtttctaatacaatgtaacaataacaattccataattttgtttgaagggactgcatcaaaagcttttaaaggactttaaccaataactttactagtaaacatgagcccccaatattaaatttcatttctttctccatttctttgatgcaaacagctttttttggtcagattctttgatgcaaacttaatctttaaagaacttattatctaaaactatgtaatatatatagcttatacacatacacaatttaccaatttataactacgttatatatatatatatata

SEQ ID NO: 243841 - DNA, 2187 bp, Cannabis indica
ttctttaagagaaaaaccacaacactttcaaaaagaaaaaataaagccaaagaaaatgtcgtggcaaacttatgtggatgagcatctgatgtgcgacatcgatgggcaagggcagcatctgaccgccgctgccatcatcggccacgacggcagcatttgggcccagagctcttccttccctcaggtcttcatattgtttacattacaatatttcttctcctataataaacattggtattggttatattgatcatgttgtttgtcttttcagttaaaggctcaggagattactgatatcactaaggattttgaggaaccaggccatcttgctcctacaggcttacacctttctggcaccaagtacatggtcattcagggagagcctggagctgtcatccgtggaaaaaaggtaataacaattaattggttgattggctctgtctgtttagatggttttgactgagggaaattatgaattttgattggcaggggtctgggggtgtgaccataaagaaaactggtcaagcactaatttttgggatttatgaagaaccagtaactccaggacagtgcaacatggttgttgagaggttgggtgattaccttgttgatcagggcctctaagctataatgaaatctctattatcatcatcatcatcatcatcattattcaagttatctctttttttcgttataatttttgggatttttttcttttttctttctggtttgggtttctgagtttgcatctctttcatttgaaaaagcttttcaaatgggtatgaagttgttgtagacaataaccatccaagaacacataaaacgcttgtttggtctgtattttttattttttattttttaaattgaattatctcatttatatgatttcttcttattattacgtaacgtttttgcaattttctttcactaaattaatgagttgaaacgtatcttaattatgacattgtaatttcgttaatattgagctggttttcctatatatagtttttgtaaaacagaaagttaaatatattctttaagaaacttaaaatcaaatattatatttgcatttgtttataaatacatatatatttagtatttacacaacaacattgtgctggttttcctatatatggtttttgcaaaacaagaaattattgttgtaacattttaaagagaaaagtttaatatactttttaagaaacttggaatcaaataatatatttacatttgtatatgcacataaacagtatatttacacaccaatatttagctggttttcctatacatggtttttgtaaaacaagaaattattagtgtaacttttcaaaacaaaaagttgaatatattgtttaggaaacttaaaaatcaagtaggataattacatttgtaatatgaatatataatcaaacattgaaatttgcataaatggaatatccagccagaattatttattactttattattatttttcttctggaaaaacatattcagccaacttggcattacaaaggtttttattttgccagctaaagaaagtcaaaaaagcaataatatagattattctccaagcttttttttatttttatttttttagaaaaagattataattaattataacttttaaatatgaggccctcccagacaaagactgctaatctagctatatgactcgaggataagatgcttgagctgctttgtttgccttcccattatatttatacatttacaaagatatattttgccttttctttttcattttctgaaaaagaaaagaaaagaaaattttccttgttcacaaaaaagaaaaagaaaatgaaaaatttatgtaatatgagacgattggaccagactaatttctgaggaataataacaataataataaaaaattggagtggagagaataaataaataggacaagaaaaagatgtttctaattttttatctgagaaaaagattgtttcttttttctttctttctttcattatttttgaaagtagaaaaagatgtttctaatttgaataatttgattttgttttgaagaatttaggggatatgcttgtatcattttacttcatacatcttcattggtgaaatgctagatttttcttttttcttatatataattcattcaattaattaaaaaatgaatcactttatatattattttttaatttttttataatt

SEQ ID NO: 243842 - DNA, 1503 bp, Cannabis indica
cattctacccctctctctctccatctccattcctccttcttcttcctcttcctactcatacccatttcccatctctccattccaaatcccaattctcatcatcatcatcagcaggtgcttccatgtccatggcggcttctacagaaacagacacagacactaaacccttctctgttctctttgtgtgtctgggcaacatttgccgtagcccagctgccgaaggagtcttcaccgatttggtcaagaaaaggggtttggaatccaagttcaagattgactcagccggcaccattaatttccacgagggaagccaagcagaccccagaatgaggggaaccgctaagagccgagggattcgcataacttcattgtcaagaccaatccgaccctctgattttgtcgactttgatttgattctcgccatggataaccagaataaaggttgccttttgattttatatgattgtcgtttctggttatttattgtcgttttggactaaaaaggaatgaactttgtggttttgtgtagatgatataattgaagcttttaataggtggaagtttaaagaccctttgcctgaggatgctcataacaaggtcttcttctttttcttaactcaaactttgctctttttatttttattttaattgaattgaatttaggagtggaaatttgtgtttgtgtcgtttttagtatttaaatgtcaaattcaaaccccgtttaaattatgcataattttgattaatttctcaactcattaacatattttataataagcttaatatgtttacattcttgttataacatattttttatgaatatgtttgtcttattcaactaaaaaaaatgtaatttgtattgtaataaatctactaaatttaagagtgtagactctcgcataggttattatcaaaaataactcaaacttatttgttttgtgcaagtttcgagtctagttatcgtgtctgacccagattgccacctctatttattcaaatttcttaaattgaattgaatgaggttattctagcaaaatttggagtttggtattgttagtttagcaaaattggttggtggatgcaggttaagttaatgtgttcttattgtaagagacatgatgaaacagaagttccagatccttattatggtggacaagaaggctttgacaaggtaatttattttgtattactattgtaatcgaacaaaacaagattattgtgtctaattctattatgtatgtatatataatattgatgagtagttagttagatgagttttggtattaagcattggtattgggcacctccaataccataccgataccgatgtaagggagtgaagaggagaagatttcgttttatggtaaaaaagtcatttctcttgattatttggcacgaagaaaaagaagaaaacaaagggtgtatgttctatgttgtatttcaaatattaagcctcacaaataggatacgaaaactttggattgtaagtgattggcagtttct

SEQ ID NO: 243843 - DNA, 1369 bp, Cannabis indica
aataagttataatataatatctgcactatatattggaattgaagacctataataaagtactgataaagttaaaactatttcaagtgaaaaacctctatagccaagcatgtcatttccaatatttatccatatcaatatttatccatatcaatatactgcaagaattatattgaagtttaagtgaagtttagaaatagttacacttgatggggttccaacttcctccaacttcgtgcatgaattgaaggcttgtctatcttcctggccatactgcaactcatatatgtacacattattattttatgttgaatgtaaaattctagttggtactagttcaaagcatgagaaacaacacctgaatagttccatttcgacgctctctggtcctacattcttcaagatacttcaccttcttgtaagtctacattcaagattaaaaagctcttattagaatgagatcaatccagttgcaaattacacaagcttgttttattctgttgctgaccaagtaagggagcctctttatatactcttttagtccaggaatcttcggacaactttgttggaacggctcgcagatttcctaaccgaaaaaggaaatgatttaggttaaagaggcagcatgaaaaaatatttcactatccaaaaccaatggtgattacttgtatatcaaatggtagaggaaggccttgggccaaaaacagctgatccacttcaaagatacaaagcagaggcaaatcagtagatgttatgatgattttgcttcccaaaccaaaccattttcttcttccaactaaagcaagcaattgggataagtcatccacatcatcgagaacaattagaaccttcttttgacataatctttctcttatcgcagtcacaccttgtgtttcactggctaagctaattttctctccaagtatatcaaaaagaagcttctcttgtaactgaaccataccatttggctcttttgatttctttccaacacctataagaaagctaccaccatcaaaagcctcaacaagtccatcataaatgactttcgccatcatcatcttccccattttagcctctccaacaatccccaccatcacaacatcatctgatcctaagatgcttacatattcatggaaaacatcgtgtcgaagcggatagattgaaacattcagattcaacggaattctcatttgtaaaacatcatctataatcattttgacaagtttagattcaggcctaaaatttgtcaacataacagaatgttaacaaacacaaattgaaatgataatcaatacaagaagaaaaccaaatgataatcaacacatgctgagatgacgttaccttatgccacatgaatcccatccagatagac

SEQ ID NO: 243844 - DNA, 1520 bp, Cannabis indica
ttaaaaaaacacaaagtattaaccgacaatagttttggttttggacaatttcagtagtttttctttaaaatgcttttggatgtttgatttggaaaaatattaattagtctgaagatggaagtgatgaaaatggaattgaaaaaaaaaaatgaagagaaaaataaaaccttttctaacggtgcaagacacaacaacgttagcacttaactttgttacttttgccgttaattttaacggaagcaaattaaaaattgcattgctgttagtaatttcaaaatgagcgtaacctttggcgcgtattttctaagaaagatcccgctaaaaccctagaaccatttcagagtccattttctaccctattttccctttcaccaaacactaaaactcactctaacaaaatcgactgtcaaagccctatctctgctcattcatcttcttccttcaattcgttgaagaaggtatctctctctctctctctgtatatatatatattatatgtatatttatacatacatgcgtgaaattaactcacgaagctttatccccaatttcctttcatcttcttgcatttttcaaatgaattaatgggtaattcaaatggttccattccttgagctagaaatgatacaaagattgagattttggattattacatggatcctctcggtggttggaaatgtggagttttcaattttttctagttgtaataattaagatctttgaaatttgaaatctactgaattattatagaaatagaaatttggtgttctcctctcagcccatttcctttttctgggttaaatgctagttggagtaggcttccaatttttgtctttttcttaactttgctatgctctgttttctgattagtagccctcacggtcatggtatcatgatcattataataatttagatcttttagcataagttcaggtataatgttgagatgggaaattacattattatttgttgttctcttttttggtcataatttatgatgttacatatatccgtttgtacgttgagcatagcattccttcctccattttaagaccttgtattactagactgagaatcaaataagatgaaattacgaaatcatatttttgtgttggtggtgatttcatgaaataagagtattctcaggatcttaagagttgaaatcccgcgagttctgtctgtgctccatatttggttagtgtaatttgatgtctttatgtttcgaattcacttacattattcaatttgttgccgcaatacttttgaattttcagcttccacctcgtttcggagatgtacggcagaaaggcgtgccaactggttagagaattttcaacaggagaaaaaggccagcttacgcccttcaatgtaagtcccaagttatcctcttctttattattattgttattatgatgattttgacaatgggtcgtttccggaaggacttgaatttaaacgtaataggattgaaattttgagattcactcatattgtatggtttatgctaatttataatacgg

SEQ ID NO: 243845 - DNA, 1977 bp, Cannabis indica
gtcgacccccctcttatcctcctgtctaactatattgttcatgtctccaattacacaacacgacaactccgaacgagaacataaagcatgaattagattccgtgtgtcttgccttctattgcgatttgactctctatacagtcccgtgagtctccaattaccaaattgagcaaatttaataacaaagtcaatatgatgatttgagtaacccaacaagaagccatcctctttatttttccataaaaaagcaagcccacccgccaagcctattgcatccacggtaaacacgccatcaaagcccaatagtctagcaagcccatcaacttttagtttttgacattttatttcacataaaaataaaaaattgggtctcttttgagatacaatttctcaaaggaattaaatactccgttggttcctaaggccccgacaattccaacttaagacattcatgactcttggcgggtctggaaaccaaagcctgccccaaataagttttttgagcttgccacatcttccaccataacatccctatcaacaaaattaatttctgtgtcctcttgaacatcttcagctgaaatagtacaacccacatccacatctattacaccacttggcccactagcttggcccatagccttcctccttcttttcgaatcaataaagatcattctgtcattgggatcctccacaatatttaccatgttttcctcccccatattcatatccttgatataagggatttattattattggcaatccctttatctgtggcagcttgattattcttccctgaagtcaagcctgaatttctctcctccattaaatgatcaccgtcacccccaactggcaccagaattacggtttggccgcttttgtggttgtttgaactctcgcctgtacgataaccaaccttaatagctagtcctgaccttaactatcttgaaccatcaacgtaattacgtcgtctcggagccgctttcaactctaatcgtagctcttagtgatctggtcctttggggtatcgaataacctttcacaaaactttttcgagtggccgagaatcccacaaattaataaagaaaaatgttggtaaatcttcatacttgaaacttacatggcacaccggtcctccctgaatttccaatttcttctttttctttaaagggacatctactggaagctttactctaattcgtagataatcacgccacactctagaaaaattatttggatccgatttggtcccaatataattgcccaactcctaataaccttctccgacataaagcatattgtcatgttgtgtaattggacccaaagctcgagtttcgttaacggaactagctggggattcaccccttgtgtgacccgttcaaagattaatggtgctcgatcaaacgtccatgggctaccttcgataaacgctcaatatccacctcgtgataaaactagaataaaaagagatttggatcgagttccttgacatataaacctcttcccgactcccacaaagtggccatcttattctgcatgtcttggaagtcaatagatcggttggttaagaaacgtcccactaatagccatctatcatcgatttctattaaaccatcatcccccgcatcaaacaccaacccttcctcatcataatctttaatcgtgatgttggcatagtcatcaactatgttctggtgttgggattatctttgattcatcatggcagtacaaaagaaaaaacaagcaacacagcacaatcggataatacaaaacttttggaagacacactaaacaaccatgtcaaaagataagacacaaaaaaaaagtatcacttctgatatgcctagttttataagtgagtttttttttattattattattattattgttagagattttattacaatggaagaaaatcaagatattacaactgtattgtaatacaatacaaggaccaacaaagagattaaataaatgtta

SEQ ID NO: 243846 - DNA, 4048 bp, Cannabis indica
gttttcgtttttttttttatttaaatatatatttataaatgtaaaattataaattataatattggacagaacaacttaataatttatatatcaatataataatagaagagctcgattagacttgttttaccttctcaaatatttcgaatgtgttaattaattaattaattaattaactaaatatatcatgacatatatgattgtttttctttaaaaaaaaattcgagtgtgtagctatggtttacattttacagttaataaaactctaaaaaataagctctatataagtctctttatcaacctattacatacagcaacttcaacttcattttaatacattattatgttataaatttataatgaattacaccattaaaaataattttactttttaaatttctagtaattaaataaatattgaaatcatctgattattgaatagatattataattatcaattatcaaaagtacaaaatttattaatgaactaaattattacattaattaagaaagcaaaaaaaccctatcaataataattaaaatgtaaagttaatcttacaaaattattttaatatcactaaagttaatgttaataaattactttaattaatttatttgtactctataaatatttttatttattaaaaagttaaagtacaataatatagtcaaattaataataataataagtataacttatattattattattattattattattattattattattattattattattattgataaatgatgagatgttttctatctttgggttcatcaaaatgggaataattaattatatatttatgtaaatcattgaaaatggcattagcagtgaactcaaatcaatgtgtgttcttgtctaatattgtaatatggaagatctagaatttaaagtaaggggagtgtaatttttctttataaagcatgagcagaagtaaagttaaatgaagtaaatgaatttggtgggatttaaactcttaacttctatcttatatgtaatctaacttaattattataccaaaattaatattatgtctataaatattattttttattacaaatatatgttaactaactaaattacatatacattttttaaagggagcggctgccccatctcacttttatgtgggtccgcccctaggttagttatatcacatactttaatacttattagtagcacagtactaagttaaaaaaaataaaagtagtgttaattacaactacttattataagtttttagttaatttttacgtatgaaatcacatgtcgtaatatattttatagtgatattcgttataattataatattatccatataaattttaaataattttgaataattaacggtaccgaaaataaaattcttgatattctactttattattcgtgttcaaaaaaacttcaaatctattatttttgttttgacaccataaattatacaaaaaaaattacaaaaaaattttacaaaataatattataactattaactataatttaagtcactatttttctttaggttatacaaaaaaaagtataacttcaatatatcaaataaattttattacaaattgtggttcaaaaaaattcaagctaaactctcttaaggcaattcaaatctaaactcccttcaaaagataaacataatcataattattcaataaatagtctttaaaagcttacaaaattacaaaaaccaaaaatattgatacttctattataaggttgaaataacggtattaatttaaaaaaatatacgaaaataataaaaaattataaaaatacagttgtataaaattttaaacacttttataatttttaagattttatttatagaaaaatacagtcttttgatgttttcatattatttttatgttgtgctcttattattttgttgttgattttttattatttatatatttattttatgcagtttggatattatttccctattaattttatgtggttttcttaataattttgtgttgcttttaaataacgtaaaaatattaaaaaaaatatatatttgaacataaaaatttaaattattttttttatcaaaaataatattttgtataaatttcttaaaatagaacctaattaaaagcctcaaaatagtgagaaagatcataatttaatttgtcaaagtgtatacttaaaccatctaactataaaaatagcacaaaacaaatccattttcaataataaaagtgtaaacaacactcccagttttgatttgtgtcttatttatttattttttgaataattgatttgtgtcttattattttctcttgcattatgctattatattattttcttcttttatttatttatttatatacaaatattaaataaataaataaaaattgttgtgtttgttcttccattaggatgtcataatcaaccttgattattctactatttatggtcaatatataatggctaccgaatccattaatatattttctttaattgatgaaatcccaaaaagggtggctgtgttaacattttctttttaaaaaattaatataataaagcaataatattataataaaataatctaaaaagtgatcatattacttaaattaattatattatgcaaacaattaaaacaacaacttgtattgtaatataataaaataaaagagattattaattataattatatatttttcaaaatatttttgctttaaagttaagtcatcatatctcaatgtatttaatttaattataaaaaaaaagttaaaaccaaggtctatatattaatagggaaatgttaatgtttgacttaaattaaaacccatagtatgaggcagatttataggtccacttaagatattgacacttcttcttgttcttcttcttattttaagtacataataaaaagtctttactttaattagtttaatttttattacattaatttcctaattaagtatatataaatacatataattaagagaacaagataacaaaatcaattcccaagtgtaatcaaattcccttagttcaaagcacttaaaagctagtatttttctcaatttttatggagaaattttgtttggataaatttaaggcaataatgtgtaattaatcttaatcatataattaaaagtgatatgatcttacttaaaaatataaatggttaatatttattatatcagtatatacaatttaaatgtatatctagcattactcatatatcattattaatttcatattttttgtttcttttttctgaaaattcatatttttgcttgtgcagaaagatatatgattatttcttcttattcattttcttttgaggtaaatgtattaaaaagcttaggataaaagaaatgttcaaatgtggaccaacagaataaaagaataatttgaataacatattcttattggtaggtatatgtggaaattgaactgaattctatttatttatttatttttctttttacttttttaccctaataattaatgaaaaatatttaaacatgtacaatccttaatttccttttttaagtggctcactcactcaaaacaatcttacataaaacaacaacaaaaaagaaacaaagtgacgaatcacattaacattaaaattattaacatttattttatcaaaaaaagagaaataaattattatcatgtataataattaagaaacataaatgtaatgtttttctcacaagcttagaacgaataaagctacatgggcccaaattatcaaagtaattttttttaaaaaaatttaaataattaaattgaaatagaatataactttttgtacttttttttaccaaataaataaataaaaataatatcaattaattaattaactaaccttggtattttcatttcatttactcttgtttgtgggccatacttaaataatttatacctgataaataagcactagttttatttggcattaatctttgtcatttccaattaaattattacaacctttaatgcttaatgttagtgcttagtgggcctttttttttttatatacaccatgtgtaaatgtgtagatttatt

SEQ ID NO: 243847 - DNA, 2198 bp, Cannabis indica
ctgtattcaattgttgaccaaagacacgatgatagatatcaagtgctctcttaatcgatccacaagatcgttcattttcctgaaagaaaagaagactattatttgcaaatagaaggtgagaaatagttggagaacgatgagacacagccatccccttgagtcgaccaatttgttcctcatactggagtaatcgtgaaagacccttaaaataaattagcaagatatatggagagagcggatcaccttgacgtaagcctcggtgacgaataactgatcctaacactacacctttaatgaggaacgagaaataattagtgtgtagacatgtcataatgagagatatccatcaaatattgaatcccatctttcccataactgctgcaacgaaagaccatttgacccgatcaaaggcttttctcatatcaagcttaagagcagcatatcctttcgaacctcttttcctatgtttcaaattgtgcaccatctcaaaagcaacaagaatattgtttgtaattaatctatttggaaaaaaatacactttaagttttgaaaataactgagtggagaacttccttgaagcgtatggccaaaattttgtaaattatcttgtaagtaacattacataaactgatggggaaaaaatccttcattgtttttggttttttgacttttggaattaaagtgattagtgttttattaaaaacttcagggctaccaccatgattctgaacatttagaacaatttttgttaccaaatttcccacaatatcccaattatgctaataaaacatacctaaattccatcaatacctatggttttgttagaccccatcgttttcaagggtgcaaagacatcagaagctgtaaaatattttaataaaaactcattttgttttgataaaattgttgttggaattgtggataagatatgagataaagcccagtggtcctcttcagtgcagtgaaaagagtagtaacataatcaacaaccatcttagaaactctttccttaaaagttgtgatatttccatcatcatcatgaagagctttgatcttattgtttgaattcgaagctgaagcttttgagtggaaaatttttgtgttacgatattccgactgtagccattctactcttgagcgttgcggccaatattattcttaattggccaataactcatctaaaatagcttcaaccgattaaacagcttgagaatgatcaaggcatgaacttgttgtagaatttagctgctgaactttctgctgagcttgggatatatcctttttcatctattttaacttgccatcctagtaattgttctgcacatctctccaaacacgaaacaagaccaacaaaaagttcatcatcttcattaaaacaccagcaactcgatataatactagaacactccttatcattcaatgaaaatcgttcaaatctaaaccgagaccatctacgaacacattgatcttgtggttgagagaaagcaatttcagccatagaaactaacggagtagcctaaattgcaagtaaaatctgcataacaactcacattgaaactaccggagaaaccaccagggcaacccaaaccgtaaattaaagaaaaagttaaaaaatagtatatggggtaatttctcaaaaaattatgaatggccataagattcaagtaaggttctctaatagtgtagttgcacagtagaggagcctttctttcttttattttttgttttgacttttcaattttcataaggtatgtactctcttaggatttttacacaaattactatttttttttcattttaaacttttttacgatggttaagtttcagtttttatttttagcaattttttaaaccaatatacggttattatttaaaaattttacactttatatggtttggtgatgcaatcaaacaaactgattacacgtttctctcccatgtctccaatcaatcactatacactataaacgtttctctcccagttattcactctctggcccactctctgtatcactctctcattctttccttttttttcgctttttatttgttgcattcgtctcattatcgtcttcttctttttttctctctctttttttttctacgtttttttcttcttttttctttgtttttgagtaatggctattaccgtttgagttcgacttcgttgtcaccttctcctaagaaatccaaaaaaa

SEQ ID NO: 243848 - DNA, 1565 bp, Cannabis indica
tactatatgcaatactaaaaaaattatataacttaattttattattatatatatttttttaaaaaattaatatgtagtaaatgtattcttataatttttattagctaatttattatttttgtccattttgctattttttttttaaaaaaagatatttattaacttagttttttaaatttagaaccactttgcatctaaactctttatttaaagaaaattgctaaaagatattactggtatctagcaccttcctcgatgtcatgccgttgttagtgtaattaagtacggggtgccatataactttaaaaaatagcttttaaataatatcgctaactaattgtgaagcgtcacctataaaaagtgctaggcaccacaattatccaattacaatacacttacataaacgttctcattaattattttatggctagaattggagcacatgaagcaccaactaaatgacaattttaatgcttcaatttattcacgacacatcatgtgatcttaataagattactaaaagcatcaattactccgacattaatttcgatggtactctaaattaattgccctaattttgtcaaatactcttgagtttattttcttccaaacactttctttctcaactcagtttgatggttttgtgtgctaaaatatatatataaatataaatatttactttaatatttgaacatgttgatactgataaattataattgttttgcttgttaatattaacccaaagtgtagacatctgcagagagcgttcagatccaacattaagcatgcttgtctttattaagacaattttacgacaaccttcataattgtagtttatttatcatgattgaatgggaatatattttaataattttagattcttgtattaattaggacctaataatgaataatctacaaatagtataataattaacaacttttatttttatcttatatttaaaagaagttacttatcatcttcatggattgcttcattggattccacattatatggaaatgaatatatagatacaaggtatatcataataagaattttaaacaatataagttgatttactcatcctaattcataaaaatatttaataaatgtgataagtatcagaaattattaataaagcatatacgatcgatatgaaatgcaaaataataaaaatatattgaacatatatgcacaccacgaaaaagattttaatacctccacctatatttgagcttcagtcccagcaatgtttatttggattgggtaattgggcttacaagttttttctgctctctttagatagaatttattattttttacacagaatgagtcagaagcttggagatcgctactctatatttataggtgagatgctccatcagtattagtgccacattaattgttaaaatattttgacaattagtttagaaaataaaatcaggaaaggaaatcgtaatctgaccatatttagaatcttcattcttatcacattttgatttgtaatcatatacagttagcgagataatgtaaaatcaatctcaatgattttatactaatattaaaa

SEQ ID NO: 243849 - DNA, 1866 bp, Cannabis indica
ccattttaagctctcttcaactgtgccagtccccataccctacacagtctcataactcatcctactttcgacctttccccaggcgatgtgggattgcacagcttactcggtacttccccttacggatcacgggactactgactgtcacagtgagcaacaaatatcattattatcctaaaagtctttcaatgaaattagagagaaaatctttgtataatcaatgcattgtttttagtataaccttttgctacaagactgtcttataagttatacatcaccacattaccatttgcatccctcatcatattagtaattatctttatggtatctacatattaaaatgatgacaatcacgctcttaaatcataaattttaatctaaatagaccatataaatttaactcatttatatgatgaccatacatacatttatacatacaattatgaccttgaataaataaatttctgacattctttttatatacattaaagtttattgtttagctttctccagaaatttttgttatgttagttgtaatttgaacgtcgcaactattaattaggctaaacatgtcctacggatataattttttttttaaggatggaagacatcactcctcccatgtgtattggttatctaataaagtgatgttgaaaaataatatatatattcttatatctaaatttaattttataaattatggaaatcttatcatagtaaataattaccacgtttcttaatttccttgtggtaatcgattactactttttttcattggagggtagtaaataaataatttcgaaggccaactccaatggaattgtaaaatctcaagcttgtgaagatttaacacttagtcgaaaaggtttttggaaattataaattttatgagattttatattatttgtgcaaaattatagctttctttttaagaaaataaataatttatgagacaaattctagaaaaagctgaaaaaatataagaaaacaagtagtttaaggtaatcagaagataactagttaccttaaagaggtaataatttttcttatatgttttaacttttttgaaaaaaaaatcatttttttacaagtttatatttaaaaccataaaaatgtactataaaaagaaaaaacaaataaaaaaaggataattacataagacactatttttttttttttacatttttacagttttctatagaaataatattaaaacgacaagaaaattacataagaataacatgaaaataacatctaaataatatcaaaacaacaacaaaaaataacatacagataacattaaaaaacaacaacaaattaacaagagtacaatataaaataaaaagaccgtattttctgtaaataaaattaaaaaaatcgtaaaaatattaaaaattcaataaaactgtattttttgtattttttattttttatttttgtgtatttatgaaataatccaaaaagaaatcacctttcaaacccaactctaaaacctatgtatttataacattttcttaagtggcccattaaatttgatgggcattgtagatcataccaagatcataccaaaacttacttttcatttattaattattttttgtatataataatataacttttaaatatgtgtactttatcatttttaataataataacttaaaaatattatattttattagagaatttaaatttgttaacttatagtgtcaatggtggaattaaaaattaatataatgctaaaataatcaatttttctattttgttcttcaaaatatcttactaaaagtttacttgttctattttacctctcacatttttacattattgttaggctatttttagcctatgttttggatccaatttatg

SEQ ID NO: 243850 - DNA, 1538 bp, Cannabis indica
ttttcgatatggatatcatgtcgatatttacatatattgcctattagaatgcttagcattagtctgtaattttaacagaacattcgaggtagttgtgttttttatctgaatcaaggtagttgctgttgttgggtacaatggtttgatttagttgacacttaacatgggcaagttggctaaatctggtccaccactttccccttttgcaagggaaagtaaacaaaatttgtaaaggaaaaggtaagaagagacccaacaaagcatattttcttttgtacatagttggtaacattaccaaccacctgttcttcaacatcagcaagtgaaatcatattggctttaaaatcttagaaaaatacaattgtagctagtttggcttggtctaacctgttttcatgggcatctttattcttattctcattcaaaattatgatgaaatgagagcactgccaaaagggtgtgtgtccctttctggtggtgattaaattgaagcacctgaagtgagccattccaaggccattatgttggattaaatggataggtgtagtctaatcataactcgctgcaaaatcccattagtttatatgttttatatcagagctgtgaaagcctgttttgcatttattttcttctctctgacatttaaagttgcattgaatatataatatggttttggctgtaccatacgatacacaaagaagatgatcttgataagaccacaaaacgggcaacttggttttaattgccactgtcctttttaggccaactctgtactaagataattttggtactttagtgtagaccaatgttcatcatattatttgtttgttttcagtgtcaatttaaataattttccaatgttttaatcaaattctgaaagagacacaaataagaaaacattggaaattctccctaaagtattggagatatgtatggtttgttcatattttcttcatgcatgttttgtactacttggatacaactcttatacaccatgtttgcgtaaaaggagcattgttaggtaccatcacaaagtggtgtacgtatgttaataattattaaattaattattaaattaaactatataaaattggtattttttttatttgaaagaaatataaaaatagtatttaaatatactaataataatacaaatatcttgtggagaaattatacactgcttgtgtcttttaataatttaattattgccattactccattgagtactaatgagtcgccaaggagtcattggttcatgtccatctagtttgtattgtacacatcacaggcgaaaaccctataattttgctaccaaagtaagagtgcaaaaatagatattccatactttatttgaccttttgcaaaaaaaaaggtctcgggcccaaacctggtcccaatcctggactcggacctcgaattggaccggtaccaagatttggatctcaaatctggtcccgaacccggacccgatctcaaactcggaccccgagctccaaacctggtcttaagacctagacttagacctagacccagatccg

SEQ ID NO: 243851 - DNA, 1640 bp, Cannabis indica
tttaatattgaaaagtaaccaatcctaaaaataatcaatctaattcgtactttggcgaattgcattttgagctattgtacagattggattggatccaaaaatatgaaatctgcatttagtgcagatcggatgcactatgtagtaaattattacggattggattggatgaacacccttatatgcgattactagccttaaaaggggtgttagtagttcgcacccctagggtttagtcttagggtttgtcttttcaacgaatggtaatgcacttcgaaccctaacccgagaataaatccaacaaggtggtgatacacaatttttactgccaggtgtacaatgttgttgtagaaaagttttaactcaaaaaagttatcgaacccacaaggattgattattatttcactaattattatactttttggttatatgcttttattagagaattcaaagtaaataatgattaagaatgaaataataataagcttctattactctattaatagtgaataatatgattgtgctaggagtagacttttctcgagtcttgtcttgtgacatggttatggttttttcgtggtgattggtgtgtttcaatctagtgtttttcctcagtcttgatctcgttggattgtctcttttggctctttttagtggtgttggtatggcttctactggtcgaggaatgccgaccttagaggaacagtgtgcaagtattcattaaaggaggaagatagtgagatattggtgtatggaagggagattactactgaaagccctattgtatctagtttgttgattcctcacagatcgatctattgacttcgatgcgatgcagcacttgatggcttccttatggtaatcagttaaaggaatgtttgttaaaaagttggatactaataaatatctatttcaattctaccatgaattagatatccaaaatgtgatggaaataagtccttagacctctaataataacctactagtgttcacaaggttgaaacaaggtgaggatcctcgtgtagttcaaatgaactaagtggatatgtgggttcagatacatgaccttagacctggtttcatgtctgttagggttgctaaggacatgactgattatataggcacttttgttgagtcaaacccaaaaaatttcttagtttgtggatagattatctgcgtgtaaggggttagaattgatgtcagtaagcctctaaaacgtagagggaaggtaagtaaggatgatactgaagagttttatgctaattttaaatatgaccatgtgccattattttgtttcataggtggtatcttgggacatggcgagaggtattgcaaaaggttttttgataatcctgtggaacttgttgagaatccgtatggtgcatggatgagagtcaatcctcatcatcgtaatcatactattggggatgaatggcctaaaacagttcatgatttttctggtgtagatttcaattctgccactactcaaggtggtgctcttgctcgttcaggcaaggtggttacaagacaagttacaagtgttcttatgattacagagactgacgtgtccaattcaatagttgggggaggtacagttatgttgcaagttattttaccaggaacttagatctactcacaagtat

SEQ ID NO: 243852 - DNA, 2726 bp, Cannabis indica
ttttctcatttccatccatactccaatggccaatccaaatggactttatattatgaaatcagtttacaaaaatgctattttcatataactatattgaaaaataccatattacttttaaaaagaaaaaaagttctccaatctcagaccgacgaccctgagtactcctcttattaccgttacggttgaacttggcaatagagagagagagagagagagttgcagagatcaaactacccaaatacccaaatcccagaaaatatcacattctcatgcactcactgaaactaagcacaaccctaatcatgaacaacaagaagactacccgttccatctccatctccatctcctcccttagctcctccaaccccacaactcatttccaaaaccctccttaaaccaacctcaaccccaaaatggcttcctctcaatctctcaaaatccgagctttccttgcctctaaccttccccacaggtcaaaccttcaggtggaaacaaaccggtcctcttcagtacaccggacccgttggctcgcatctaatttccctcaaacacttaccaaacggcgacgtttcatactgccttcactcttcttcttcttcttcctccaaagccgaggctttaatggctttgagggattttctcaatatgggtatttgtcttagtgacgtttgggaagtgttttcggcttctgactcgagatttgccgagttggccggacatttgggtggtgcacgtgtgctcaggcaagacccacttgagtgtttgatgcagtttctttgttcttctaacaataacattcagagaataacgaagatggtcaattttatttcttcattggggaatcatttagggactgttgaaggttttgagtttcatgagtttccttctttggaacgattgtcaagtgttgctgagcaagagcttagagaagctggttttggttacaggtactaaataatccaactgtgtactaaatacatatataataagatcatgattttgtgtcaattaatattgaattggaaccttatagatcatgttatcaagacttgtgcttgcatagaatagaagtgagaactattacatccataggttagaccactcattaccaattagatttgactaagtatctatagatattatcaaaaagtacacactttcttttctgcctaaatctgtattagatgtaattgtttcatcattcatgaaaatttcaaatgttgaagctttgcttctatacttttagatcatggacttatttgtctaagcaaaatgatgaaccagggctaaatatattactggtacggtaaagttgttgcaatcaaaacatggtggaggcctagagtggcttttgtctcttcgaaagctcgatctcgatgaggccattgatgcccttttgactttgcccggagttggtcctaaagtagcagcctgtatagctctcttctctcttgaccaacaccatgccattccggtagacacacacgtttggcaggtaaaacgacaaacatggtttatttttgagtttgatgatctatgaccatggcaacatgttcttcctagtgaataagttcatcataaagtttcatgttaatgttttctgagttcttagctcaataacttctaacttaagaattgttattgctaattatggttgaaaaagattgcaacaaggcacctgctgccagagttggccggtgctcgcttgacacctaagctgtgcagccgtgtggcggaggcatttgtgaacaaatatggaaagtatgctggatgggctcagactgtactttttattgctgaattgccgtcgcaaaaggcaattctaccgtctcatttttcgaatgcaaaactgaataaatctgtcaagagaaagattacagaaactaacatcgctgataccgaagagcgataactcaaatagtcaaattatggttcgctcccacaaggtttgatattcgagtccctccgggcatttgtatagcagttgttgtggtatttctgtccccaaatattgtagggttagggaaggcctagtttcgggtaaaaacatttgagtgatgattgctaattctttgtaaccatgaaatttgtcagattgttttggtcctggaaatcaaacatcaatgtaaatgtaagttttcttcttaagcaagaattacaaaactataaagattgtgtttggtttcccatgattgcttttactttgtgattatctgcttggactaacatttaggactctggttggcttggcttttaaaagctgtttttaggcttctgaagcttctgttattggttagataatcaatgaattttaacgtttttcgctctaaaaagtaggattgttcatcgaaaccgaaaaatcgcggtctaagtttggactgcgacaatttgaaccactgtagaccgtaattggggaaatcgtttttagtggtctggttaatctggaccatttaccgcgtaatcgttcaattgcagttcgtaataaataattaatgattaaactggaccggaccatttataataaataattgatttatatatattttatatgactgtaagtataattttgaacttttttgtgtgtcaagtttttttattctatgaattttagatttgtatattatgtttgatttttgagaatatttttacattgttatttatatattataaatttattacttaaatatatattttgaaaaataaaattaaaaacttagtaaaaatag

SEQ ID NO: 243853 - DNA, 2855 bp, Cannabis indica
aatggcataagcgtcggtcatagaaactaatagtaatactatatctgacagcttatagcagtctgtgtagacctctttttttagtagtggttggataaaattataggcatatgaacaatcttgtatgtatatacaaaattattatatggattgaaaatatatatacagaataaatgattgaatatgtgtacctccagttataaattttgataatctctgtctataaattctagatctacaaaatagaaaaatgagaattagtatgggtaatagagtttccatgctttcagtaattttttcaaatagagttaaagtcagaatgagtacgatgttaggaataatattccatcagagtttaacctgtcattaattattagaatattttataatcaaatagaaaaattaaattgggtaacaataaatattgaacattaattagaatatctagtcaattaacctaatattctctttgtataaatatagtacttcaattttgtcttttttttttcaagaatcagaaattgtattgctttgaaaattcattgacaaaactaaccagcaccatgatattcttaggtataacacagctatacacgagagttgttatatattttctataaggttgtaagccattataaatcctgttgtttagctttctttgacaaaataaaaggtatccttcttttaatatcttatagatgacaaagttatcactttttggccacaaaacacaatttttgctacgccagatatggtacaccactgtgaagcaccgtagcaataatgtgcttcttgaaggatgaaaatcttgctcgagaaatcaccctcaatagtggtagtagctgattccctgtggatctccaacccaaccactgcttaataagcatctcttgttgcagtatcattccaaaaataaatgtcgtatatcttccctctatttatcacaaactaagcaaagattatctgcaatcgacctctaacagcaagccatattatgaactggtgtttagaaacattaaaacaccaccaaacattactgttccaattaacatgccattgactcagattatctaatatattattttatacaaaagtattattctaacattttattcatacttttgtatataaaagtcacaagtaataggtttgataattttattatttaattaaaaaatataagtgaagaaaagtctcaaaatagagccatattttttccaagtcctataaattgcaatacatatagtgttgtaacgatccattacttagattattcatgatttatttatttatttatttctggcacatataattgacaataatattcttcttgatgagttgatgacagttagggcaatcaatcttaattctcagcttcccctcctcggttggatactcaatgatgcaacaatcttcactgttatcttttcctaaagtagtctttttgttctccataccaaagccttgatcttgatgaaggttgtcaaaaatattttcgtgaaactctttgaaagcaacttcaaaagtatttttcttaacattcttcttccaaattgcgatgtcctccatcatcttctccaacgtctgttgcgagccaatgactatcgtgactggccctttgttgagcacaaaccatcctactttggctttccttaaacaacataacctgtctagttgttttttatgtcatcgtaagaatcattttgaacctcgtttgattttattgaccaacaatacacacttctccaaaatagctcttcaaagctcacctcaactttctctttataaatgttgagatgcttaatcttatgctctacattaacattctcattgataaaatttatttttccttcaatctctttggcccaattctcatcttttcctccatgcaagataatgtattcatcttcttggatctatttatatcaatagaaaataaataaaaattcgtgcataattacatgcatatggatggttatagttatgcttagtaatatgtttgctcaatcatgcttaagacaagacaactataaaaaaatgaagaagaagaagaagactaatttatatgagagcattttacgtacccagttagccaaataatgtttggaaggaaaggagaagtcgttgaaaagaaaactcatttgtttgcgttttatttggagtgagtgttggtcaaaaggaaaggtatctaagccccaaagacgcatggcgtagaaggcatccgtgttttcaattttgcctgtgagcacgtccatcacaacaacattgggactagtgcccttgtaatcccacttttcctccaagaacttgaggcttccttggtcagaaatatacttatttaaagtgtaccattcaatgttcttcgattttagaaagctctcatctattaggttattatgatctttatctacaattggcaaccaaataatcacacactgcttttcatcatcaccacgacaagtgtttgtctcattctttattttctcaaattgaatttgtctgagtaggtcaatatcatcattagacatgttttgctttgaccccaacaccaagagtagccattttttcttctctagaacaatgtccattggtacctgtatacttgcatgttaaattcatcatcaatgtcaatatataaaaattattgttgaacaagtgtcagactcagtatcctatgtcctatagtttaaagatttttttgtcaacaaatttaagttgtattatttcatagattactttatgtatattgtaattaattaattattagttattattatcttatatatttaaatttttaaatatatcttttgtaaatgttatagtaattgttagttgatcaataaaatatcaatcaa

SEQ ID NO: 243854 - DNA, 1663 bp, Cannabis indica
gcttaattattaattagttgtaatataagaaggggagcatgtactagtactagagcagccattttatttttataacatattttcattcatatatgtataaacatattgtagaattattattttattgattaatataaatattaatcaataaaattaaatacagatcttcttgctccatgcctcattaatttcatttaagagaagagaaacaattcttctccaaggaagaagataacaacaaataaatattttgaaaacataaaaagttaaattcatgagaaatacatgaacaatttttgttcttgaacaacaaaaacccataatatatatagtcacatccaaaaaaaaaaaaaaaaaaaaaaaaaaaaaaagaagcaaacattctcaaaaatccataaatgaagccttaaatatccgtggccatctctaaatccaaatgggtaattataagaaaatgagagattaacttaagaacaattagtggatttgtcgtcggatttttgccactaatattaatttattcttgacttttgacatattattgttttgtgatgaaattacatgttatacccactttattttatttgtttttattttttcctctattttcatattcttaagatatacccacttttaaaaatgatatcctcattcaactccttaagttaatgcaaattatatactagacttaagtaaatagtgagggtatattgggcaacccactcaaaaaagtgggtatatttaaaaaaaatataatataaagatatttttgattaattgaaataaaaaagagatatttttcaacttatcccttattttgtccccggccgtatagggcaaaataagtattattttatcctctgagttttgacatatataatattattttggtgacaaactaactattattttactcttatctttaacatcgttaaaattaacctttaagctaatatttttatggacatattaatttttttactataattaattaattaaggcaccctattttaataattaacataaaatattcttttaagatttatacttactttagtttattttcttaattttaaaaaactaattattctaaaataaattttgcatgttaaagaaaaaatagttcaaactattcattattttgtaaaaaattataaaagaaaaataaattaaaatgcgtaaatataatacgaaaaataaattaatagtgtaaaaaaataataaaaaaagtattaaaaataaattttaaaatacaaattagtataatatttttaatgaatggggtgcctttatatatttatagggtgaaaatatattcactctttttaaatctataataaaagaaaaataatttgagattttacaaataaatagagtatattgatcttgtttaaaaaaaacgaaaaaaaaaacaagagtgcattgttccaaaaattgtgattagtggggcccatcattctcatccaagctttcaagcatttaacctagttttttattttgtcagacaactagaaaaacttgagatcctccttcctttactaattttgaaatcctctctctccctcttcataattttcgagcctatagtgaaagagtacatgcccactcatagcaagtcaagtactcaatcatagtgtggaaaactgtgaagaatccaacacct

SEQ ID NO: 243855 - DNA, 2987 bp, Cannabis indica
atacttagtttttttacgtatttttctttatatttttaagctaatattgaaatttatgtttgtaattggatatccaattaaaaaaccgatccaatccaattagtaattggattggattggattggattttgaggtctaattggattggatcggatgatgatttttcaaatccaattactaattggattggatcggatgagaaaaaaaaggttggattggatcggatgcccacccctaatataaaccgtacgaacaatatattattcccatgcataccaattatggaaacagtaatataatatttttttttcctcttaaaactacttaaaaaaaatgattttgagatttaaatttaacaccaaaaaatatctaaaaaaaggtaagccgccaccaacatcataaaccctaaaagaagcagttatctcttaacccaacttcattatattttcttttttaaatagcaaaattttccaatgaaaaaagaaaatcttgaccattcccttccatctaaaattgatcaatagatcaattcttcattctctaaataatgataaaatttggtagagaaaacatttttatcacagtcgttgaataaagggtgtgatgtggtgcccacgtgagactcagtagactcgcaccaactcagctttgttgagccctcgtgcaccacaaagtggctgaaaatggttctaaccttacacgtgtcgagatatcaaggcgtgtagggtaaatatagtctacacccgcgagtaggtgttccctaccctcgttccttttctttcttaatctgtctgtttatataaatctcaaactaataaacagacgccgtcactttgagagagagagcttccgaagtttcgaccttcatttccagggttcaggcaggctcggctcagctcagctcagctccccctcaaagccgccgtcagtcaccgccgtattcgtatcaccatagccactattttcggtacaaggtaatgttgttgtggaagaggcacgctttcccgtaagagagagagaatcagagtagtcttatttattcttcttcttcttctgatcaatcaacggaattagctgccgagtaaagtatttttcagatcagagttttacgtagacctaggtttccggcgagtcaactaccgagcttgataaatatggcttcggaggatgttaaacagagtgaatctgcggtttcgacgatcgtcaatctggctgaggaggccaagctttcgagagctcgtgagagtgtggtaaacgcccccaagcacaaccttgcgcttctcagtatatgcaagtctcttgttgctggtggagttgctggaggagtgtgagtttttctttcgttcttccttttctcctttttttttttttggcttaattatatagattttattatggtaagggaaataacatggctgctcattggttgatgttggttgaatcatatttctaacaagtatttgggttttttttttgtttgattgatttatttatcttggcgaagaaatgattatagaattcggaactggggttttcttttttcttcctcgacgagaaattaataagatatttttgttactattgtataaacaaaaagttgatttttgttgaaattatttaaattttagaagtaattaatggtaatgtgagatctaattacgtctttacttgtagcgcctcttgtttttctcttagcggtttcaagtaatctagttgattctcaaaaaaaaagtatctcaatgttaaaatgaggaatgactttacaggggataaatcgacatggtgaaataattcttttataatagttgtttggtttcaagtaatctagttaattctcaaaaaaaagtatctcaatgttaaaatgaggaatgactttacgggggataaatcgacatggtgaaataattcttttataatggttgtttggttgcatcaaaagaaattaaaatgttactattgttttcacgtttctgacattaatttaaacaatcttgttccctagctcctatgaatcttttagaagcagagatttgcagtgtcataaaatgtcaagctaatttctttttgtagtgacagacagataatgtccagtatgctatgttggtttattgataaaaggatgattgatcaaggtttgtttattgtcttgtgtccagttttgattcttagacagtgatggtagatgctattaaacaaaacaagtgcctgattttctttactctgtttttttcttcctgagggatgtacagtgcatttcttcttgtcggattgctatttttgtctgctttttaaccttatggcgtggtttatattttaaatgaaagtattatacttgtcaatatatactatatgtatatatgtgtatgtttataatcgaaattacaatgctttagcatgtggaattttggatcttcattccttggtggttgaacgcaactacaaagcttactgtcttaagcagttttgtcaatgccatgcaggtcacgcacagctgttgctcctttggaacgcttgaaaatcttactacaggttcattttcttactaattcacgcatgtacatgccacattacacatttacaatttcctcagttttcatgttcatatatttttttgtagattggctaatcatttaatcatcatatgctatacaggtccagaatccccatagcataaaatacaatggaacaattcaaggtttaaaatatatctggagaactgaaggtttccgtggactatttaaaggaaatggtaccaattgtgcccgtatagtcccaaactctgccgtcaagtttttcagctacgaacaagcttctaagtatgtcttcttcaatcatattcattaatttaagatccaagttattttcagtttgtttctaaagcaactggtactagttaaatggtcgaaatgctattttctagtgatacaaactgttgaggtgggagatcatcctactaaagaacagtatgcttgatagttacagtcaag

SEQ ID NO: 243856 - DNA, 1792 bp, Cannabis indica
catgcttagtataattttaattatagttaaatcatacaagcaatgtttatatttgttttaaatccttaaggtggttgcaggctataaattgttatgcggttccaccctctaagcaaacattcaaactctcttacaaggagtgttgtatcttctgttcataagtagtgtatctttttttcttctttttctttcttctatccactgagccatggaaacttcaccgcacccatcaacactaaacctcatcaaagtactctctacatccaggcgtatcatccataatcaattaagccacttcacagccctcagtttccttttcatccttcctttcgccatagctgctgctgtgtatcccatactccaatctcccttacctaaagccatctcaaaaagctttctctatctgattggttttggtcctcaacaggccaacgatcaattcaccaccttgcccaacgaaaacattttccttgttctcacttatgtcctcttcactgtagtattctctacttgtgccatcacctcaattacctactctgtcatccaaggcttctccagccaacctgtcaagctcaaaaccgcagtcaaatccattgccgctaatttcttccctctcttaggcaccagtcttcttgcccaaatgattatttccgcatgtgctattctttatgctgcagtctttgctttattggttgctggagctcagttgttggggtttcagatcgatttctcttcgacttattttatcatactaggttttgttatggtgattcctctgttcttgtttgtggtatatctgcatgtgaattggtgtctggtgtcggtagttgttgtggctgaaaagacatgggggttagaacccttgaagcggagtgcaagtttgatcaagggaaggagatggcttgccttgtcactatctttgctttttgcgttttgttatggagttctgtctataagtacgaactattctcttccagtggtagatttggatggtggtagtactaatgataccaatcacaagtggatgtgtttggtgatcagcctggctgttcaagttttgttcacttcggcttttcgagtgctggttctgctatatgaattggtttcaaatactgtgctgtacatgtactgcaaggaggctggtctggataacagagctgagggatttgctggagagtatgttagcttgcccgttgatgacaacgagaatgatccacgtttagcatcagtttaaaacgcatactttttccacgtttctgttatttgttgtgagacttctactgtataaattatgaagattcttgtactttgtcaatgttacagaggtgtaattttttttttcttctttatttggttcgaaattcctaggaaattttatataagaaatgctcattactcatgttctggtatttcaggtgcgtaatccttactccataatggagtttaactttaactttgtaaactttcaagaaataaaaacaaaagatcacttaattgattttgagattaatttattgatgcttcctgagctaatgatatttttttccttcatttaagtattacattattataattttgagaaagtcatgtgggctttactattgtttgcttgaaatataatttataggtctatacacgtatagatacgaccaattcacttttggaataagtatacgccttctgtttgtgaaaatgttttctaaattcttattttattaagaagaccaaaaaaacgaattgacggagatgatttcatatatgatttttctttttagattaaggaggctaaaca

SEQ ID NO: 243857 - DNA, 2994 bp, Cannabis indica
gagaataatttacactgccaaaaataaaatttaaatattttattatacataatgtaattttttttatatgcatagttaataactattttaaaaaaggctataaattatttaatttttttaaaaaaatttacaagtacttttaaaaaactactaaaaaaataaaatagaatataaaaagagatgccaaaacgtcttttaggaagtctatgtagattttttctagaataataatttagttatttgattaaggtttttttttaataaagttacttgattaaggttgattgcatattattaaagataatttattttcataaatattaaaaaataatatgaggaagcaattatgttgagccaaaatattaatttattattactgaaaagaaaatagagatagagattcaatgagcggattgtttttgtagtcaggttgggttcagatagtactctttgacaggaatggaatatataggcagacccattaataagggaaataaataattaaattaaatgaaaaaccctacttcacccaacaatatatacgtgtggaccttttcagctcaacaagtcaaccacctcattttttttatatttatattataaaataaaagattatggtataatgcttctttagatactcatcagatcgcaatcaatcatcacattcctatgaatagaacaactttaatagatgagatttgaccaaatgtataaaactctagtttttttttaaaaaacctgttatttccattaaaacaagaaccattctaaatttattggttatttagttcaagatttgatttaacacatttatgagctattacattttgagactgaggaacatagctaattacaattgtcctagactaaaggatgacagatttttaattcaacttaaaccattaccaaaaacagaactaagattattatcaccatatatacaatctagaattattcataaggtatccgattcaatctaatttgcacgatctaatataatctaattcttaaaatatagatattcgcacttacgcgaattgaattggattaaaaaaatttaaaatctacacttatacagattgaatgttgtttgatttcaaaaaataaacgattcaattcaattcacatttaatcatatatatatttaaaggtatataatatgggcacccgattccaacccgccatgtacgaaagtgggttaaagtgggttgagttacgcttttatatttacattaaaattaatatgatgcaattttggataataatagtactattttgaataatttaataagttataggtccacatcataatatacataatatgaaataaaaaaatttattgctataggtccacgtcataatatacataatgtacatacacgtcatcggtatgtaaggagcattgtctgcccttaaagtttgctctgtggcagttgtggtaggttttttctttttaacttctttttttcagttttcctcatacgatctcctcaaacttatcactatccatgaattaaacacatctcctctgtatcttcagcgtttctcctgtgatcttttttgatctctttcggttacctatgaattctttccattctgatatctcccaagcactcactgaaaaggaaaaagaagttgtcaaattttccaacatctctgctccacttcctcgatctcaatgtaacagagtttactgcaaaatcttctccaaaagaggccataactcgaagcagttttttaattttgtaactaagaattggactggcagatttccagtggaaacttcctcttatgatactgatgtctatatgatttcttttggttgtcaaggtgatcttctcagggtcctctccaaagagccatggcattttcaaaaccaacacttggttctttgccttccaagtgttctacaaaatgcctctttagagtctttcaccattactcctttttggattcaggtttatcgattaccttttctaagcaaatctgaagatcttgctcggaatattggtggattgattggtaattatatagatgtgcatgaggattcactcaatgagggatggggtccatttttaaggattcgtgttgggatcgatgtctccaaaccacttctgcgtggccaaatggtggcatttccttggattaaagatgaactttggcttgaattccgctatgaacgtctaccgaatttctgttatgagtgtgggataattggacatgtttttaacaaatgtcaagtgtacttggagaaaatcgatgatggtaaagagcctgatcttccttatggcccctggatggaaggttctcctcttccaaaatcgccatatgatcattataggcaagactttcaaaggcaggtccttggccttttgttactcggctggttaggaacacaatttctcctatcattaagcccccacgacagcctcctgctcttcctccgaatgttactgatcgagaaaaaggaaaagaaatattgcttcctaagtttactgatcatgagtactcctctttaactccatcctttgcagcactctcttgtggtcttaatcattttcctactgatggaaattctctcaatgatgcacctataactgagaaatgtatctcaacaccatttcctagtgcatcttcagtcaagaagggtgctccaccacagtgtcaaccaatgtattctcggcctgaatcatctggggttaaatctcctgctgctgcaacaacgattcctctttcgtcaaatctttcatctaaggctgctataactacctcaccgacagtggttttatctactgccactccgccagcctatttccatttaagtgaagatcattcctctggttcctccatgatgaccatgccattaccatctgctactaacatgtttgctccatcaataaccactacaactccgcatattgcttcagcaagtatcacgcaccaacctgaagttactccatctgtaggaaatcgaatggcatcacttttctccaa

SEQ ID NO: 243858 - DNA, 10102 bp, Cannabis indica
caccggtgccttttagcatttctcttaaaacaattatttctagtaatattatatggtggagattatcctatctcatcctttaattacattaatgttcaaacttttgagtccgtttaaatttattaattattttagttatatttataactatctagttaatatttataaaattataatttccctccaatttcgtcaagacaaattgtgttattattttaaagttttatcaatacgttgttattgtctttaacatgaccaatgtaaggtccaaattttaggtcattgagtctaaatgaaaacatgtaatatcagttacttccaaattttattttaattcaaaaataaagtttgtacagacaaaattagaagaaaattataagtttacgaatattgggtatttatgccgcaaaaaaaaaatcattgagtgtatactgcttacaaactcaaaactttagatatttttgccggtatttatccttaaaaaataacttaggtcaaggagtaccaacttcttggtaggggtgttcatccgatctaatccgtattattttgctcatagagagtgcggatttcatatttaagattcaatctattccgcctaatgactcaaactcactccaattcaatttgtaaaagtgtagattgaatcagttattttagattgattacttttgaatattgaattatctaatacttattaaaaaatacatattttgtttttacatataattaacaactaaataaaataaattattattactttatgtctcttacaataaaataaatgaatatatattaatgatttaatatattttagatatagttatatcatatgtattagtatttttaaattatttattttatgttaaaatattaattatgtatataatttttcaaatacatatatataaatatatgtggattgaattggatcagttatttttatatgtcaatcaatatctaatccgtgtaagtatagattttagattttcaatccaatctgattcgtataagtgcggatatccgcactttacagattatacttgctcgttcaaattgaattggattgaatattttatgaacactcctatttcatggcatgctttgtaattggttagtttatattcaaacacaaaatattgttaattaaatttctttggagaatgatgtggctcctagtcctacctctaccaaattaaactcagtaaacaatatggttgtaacaaattttgcaagatgttgaaatcatatataaattaaatatgcatataaaactgaaggagaataataaaatggtgaagaacagaaaacaaaaatacttttgtatgcatatataaattgaatcattcatttaaatattgctatcatttataaggaacatgaatctagtcgtatgggaataatgttcatataaattaagacaaatatagtctacttatgataagcaaaacctagtgcaccacgctatttgtcaacatgggcgttgggtactcattctcaagctcccaggatctcattttaataattccaagattcattaacttgaggatgaggtcccctaccccatttttgaccattccaaattcattggtcgaatcaaatttcacatttgagcaatcgaaagcagcgcacgaggttgattgtcaacttgggtgctaggctcagattctaggggctcgagtttgtagttttctccccgagtttgcttaaatcttcattattctctattgacggaaaaaatttatggaatactttttggtgaacttgattagaaatggccctggttaaaaatatgtcaacctaggcactgggtcccccttttggcccttcgaaagttttgtttggtcctcaaaaatagttgaatctaaatcgatctttactaaaaacaaaaaatatgctcgtacgagttcttagaaaacctcctcaaaatagttctaggttgacaaaatctcaatctagttgctgggccagggctaggtgtcaacctgggcactcaaccttgcttttagtacccaaaatgtgttgtttcttcctcgacataacatatttccccagttttgatgaagacgaagaagatgcaaaagttaggtcgttgatctaatacttggaaggtgcctaggttgagaaattgtcaacctgagtattgaggtgcttggggccctagggcctcaggtgctcaaaaatgaattgtgctccaatttttattcaaatgcctaaaatatgtttgtcatatgtcaagttgatgtcacaatgcaagttttgacctattttcagtaagacggtccaaaaaggtgaaatccttgttgagaatgtcaacttggatgatgactgaaaccctaggtgcccagattggcttccaggttacaggttcatgtaaatttcagctcttggggtttggattaggttgctccatgtcttcatggtacagaatattgaaagatagtgagtttaaaatgagttatcgaagtccaaacttccattttaaagttcctaaagtcaacctgatcgcagggctagggacccctcctaggtcgacttgctatgactcgtgactacttaactctgagatgtcatctttcttgccacatgtcaattattgatgcctacatcattaggactacttttggtgcaaacattttcccccaattcaactttacactggggtgaggttgacttagttacatgaactatgcccgcttctctcaaaactactaggtgggcatcatttttaacaatcttagataattgtttccgttcttcaagaattcccactgagagtaggattttgaatccccattccctgttgaaaggtagaatttgaaattttaggttgatgactccttcagtgatttccttttatttgagatacagtgaaatcttgccgacattggaatgtcaacatttactcttatctttggctattgtcttagcactaactctcctatcacacagtctgtttatgtgaatattgatgtagtctttgtcttctgttaggttgaagccttgaagctctttagcatgcctttggttgtctttcagtgaaggtagtcttgttcatctcctcaatttggtagcagaagaggcctttgtcaactctttagctttacaatgcaggaggccttcaacatccaattggctttacagcggagggggccttcaacgtcctgcttggctttgcaatgaaagaggccatcaacatcccctcagctttgcagtggagggggccttcaacatcccttctaatttgtagcgaaggaggccttcaacatcccatcaactttgcagtcgagggggccttcaacatcccttttggctttgtagtgaaggaggccttcaacatcccctctgctttatagtggagggggccttcaacatcccttctaatttatagcgaaggaggccttcaacatcccatcgactctgcagtggagagggccttaaaaatccccttgtctttctagtggaggaggctttcttgacgactatcaacgacgtgttatagtagtccctagctattatttagtcaatttaggatgtgcctgactcccaaattaatataccctagatggaggtgatgtcttccccgtatcgagtgcaccttagagtgatggtctccattttgtccttagtctttaactttagagatattcatcatcccttctattgtattcacaatagaagaggccttctttatccctttggttgtcttgatagtaaagaatgtcctccacttccccttgactgttatcacaatgtaggaggtcttcctcattccctcggcataatcaaggaggtcttttaggcgaatttcaatgattcattgtaacattcacattctaccgtttggttgccaaggagacggtcgatacaagctgatggtgagaacatgatagataggtggtagataagtgagatggcttggaggtcgctgggtgttgaccctccaaggagacttagtgtcgatcactatgaaaatagtcatagtgatgtttttcacgaggcagttttgactgtgaatggtaatctaatttcaccacagggagtgatgtcgactcacctaaaaccatacatgagctgtttgcatggtttcggttctcttagggagtgactagatcttttcagggtctattttgattagaatagttcctgatgcttgattattaaccatcacatttgtcgccatgaagtttgaaatttcatttatactgcctgagcttaacttctctttcctcctggtgttgatctctttatgactgggacgaaaaactttgaagtttgtatgttgaagctatcttccttcagtgagataaaccattgttgaggtatagtggactattgcttgtgcgcttggtgctcatgcatgagctcactttatgatcataagtgagatgaatcattgtcaaagttttgtgcgaaaaaaccaaccaaattgatcctttggataggggcaaaatcacaggttgttggagaacctgctttgaggatttcaacttatagacctttattaaaggtttcagaaaaaagtccaagggcgaaaaaagaaaagaaataaatttgactaaacacttgctatgtatagtgtcttatacttggaggagtctagttaatgaaagaataacacaactagggcagcatcccactcccagagggtgttcttcaatgaattagaaaatctcttcttgatgcagcatcttgcttccagagaacgagctttctgtaattgatgatactttttttttcttttttgatttttgtgatccgaggaggaacacttgcagtagcactttagattaataaactcattaatatttataagacctctagcacatatatcataatagtgcttaactctggtgtgaaaattttatgaatgtcattgcaacccctggctcccgtatgccagggtaacacgtggattccatataccaaagtgtatgtgacatacatgggtctcgtgtgccatgatttttgtgaatgatcacgtaacgtgcatagctcctatatactatgtcttatttgtgccttaagtaatcaaacaaatgccttcattggtcactcgccctaccaaatctcgttgggctttcttgatcatgggtatcaggttgttacatgtgtgagcattcatccacttatccaaagatttatgggttggcagtgcttaactcaataaagaaataagcatagttaccttaagactaaccctagaagctttgttcagcgcttaagagcgtcgccgagtctgtgagctacaattgattaataacaatgaagtacaaacaagctttactcgaaaattttatttattagatattaaattaaattacatcactatgagctaagttgaaagaaaaagaagtagtagttgcagacttttgtttttcattaaaccttaactaagtgatccaaactagactaatgccttattcaaattacagtatagggatcataccttagtgatgcacctccctacctaaagatgacttcattgcatcttggtgattcaagaggcaatcgattcacttgcatgaagtaaagtgaatatcattatgaagcaaactatctagggaacaattgctttatatataatatcgtccatgttaaacctaggtggttggttcatgtagatctcttcatccaagaatccactgagaaaagcagttttagcatcaagctgtttaacttcaaactctctttgagctaccaaagaaaacatcaatcttatcgtcttctactttaccacaggtgaaaatgttttggtgtggtcaatttcttccacctgagtaaagcccttaggcactaacctggctttgattttattggtccattctcatttattctctctttcaccttgagaatccatttgaactccataatgtttttgttcttttgcttcagtacaacaatccaagtcttgttcttttgaagcaaatccatctcctcatcaatggttggaaccattttgacttgtttccaactaaaattgcttcttcaaagcttctacactctttaatttcagtttgttgtactactacaagtgcaaatgcaatctgctctacctcaacaaaccttttcagagggtgaatctctcttcatattctatcacgcgctaactaataacctttaagacctaagtatctaaatccttcagaaacctcagtttcatcatcgttatcttccagttaaactttagcttttgtctatgcactatctttcgtttccataatactaaatgcaaaccttcttccaatatgttttgttatgtactctatttccatgtgtgtagtgtacttattttttgattttcctacattacacggagacacactacctttcctggctgtcaagtggggatattcaaattcattgaaaatcacatttctagcaattgctacctttggtctacccttttaagaaatgcatattctataacccttagtacctaagacataacataggaaagtttccttaagtaatatacatatgttctacacccaaaagttctttaatgcattaggtttggggttctaatgtatattttataagggtttttcaagcctataactatgtttgggcttctatttataaggtaggttctagtagctataacttcctccaaatttgtttctctatcaaacatctaactttattccatagggttatttcatcctttcaacaacaccattttgctttggggtcttcactacaattctatgactagtaatcccatgttcttaacacagcttgtaaactcggagttaataaaatctaacccattgttagtccttatgttcttatctttgagatttgtttggccttccacctaagttttgaaaactctaaagtgttctaggcactcatgcttagttgctagtaaatgcgtccaaacacatctactataatcatcaattatagaaagaaaattttatttatcgaagtgagtaggaactttgtgtggcccccaaagatcagcatgcacatattcgagtattttcttagttgtatcccttgctggaatgaacttcagattatgttgcttccttaaaacacagacttcacaaaatggtaaggcaattttcagtcttatcttatttgtatagttctttttggtcttgttcattgagaccaaaagtctatgatgccacagatgcatataaactattgatcttttcacctttcatcactatcagtgaacctttggtgatccttaagcttctatgcatggacttgtatctgtatccttcatcttaaagcatacttagagatatgaggttttgcctcaactccgtaatgtaccttacattcctcagcactttgattctaccatcacactatttgatggaaacattttcggttcttaggaccctgcaagaatgatcattacccattagaattttaccttcatcaactgatttataaccaaaaaatgattctcgactcggatacatgtggtaagtgcatctgaaataggaatccacttccttttgattgagaattctaagatggaaaaaaaatttccatctattaagcaatcatcactatcctccgtgatagcagctgaatctttcttgtggtgatgatatcggttgtcctttctatctccattgtgagatttgtttaagccttactgcaccttgtacttattgcaacttctttacaagtgtttgaaccttcgacaaaattaacactttcaagtttccttctctttggacttcggccatgatttagagtgatggtatatactctttgaacttactttcttaggtgatctccctcttgcaaaatacacatcttcattcttggattccttttcaaattgtaattaaaaatccttggacttgagtgcagcaagaacatcgtctaatgcaatcacatctctaccatacttgatggcagtcttgacttattgatatgcatttgggagcgatctcaagaaaatgatggcctaggtttcttcatcaaccttatgatttatattagtgaaccctacaataatctcatataacttgtcaatattataatttaatgaaagagaagaaatcattttaaaaccatacaacctttctagcaaattaatcttgctagcaattgatagcttcttgttaaattcttcaagcttgttccaaatccccttagtcgtcttttctaagataagctttctcctcacactgcaggataggtacatgatgatcttgcaataaaccatctcctctatttcaactatcttgcctagtttcttagccaataatttctcatctccaagaactttagagacttcaggtgcactaggatcccctttaaactttctctccatagcgcaaagtctcctgttccatcaaatttctccaactcaaatattttcattgacgatgctaattatttctttaagaagtacaacaaaatgcatcttgattctgcatcgttattcgattatgaagctctgatctgtgggaaaatgacaactaatgtccagagtcaaatcaactaaatcttaaccgaaaaacaattagcaatgacaaggttaacaattgacaaacaataatcggagataaaattagggatgaacagagtatctaaaactagaaatgattaaagcaataaaatgaacaccaacacatatactagttcattcaagtcctatagattgatgtgatttatggctctactctaattttagaacaccacaaaaatattcgttattaattgagcaagaataaggtaaattacagtcgagatcgattgtctgttggattctcttaaattatttatctcttacactcttaccctagaatcttcttcatccacagaagattcttaatctaatcccaaacccaatctctctcttttctatgtacctctgtctttctctccacattcaatctctgtttgaaaaatgcctctcaaaactcatctgttaatcacacctctcctttttaatcataagtgttggtagcatttatagattagagatatggatcccaaaatctatggttgcaaaagctaaattgttaagttagttacaacataaaaaatttaacaaacttcattgtaacaaaatctccacgctagctcatgttaaagcgcttctagagctacgtatgcttcttggaagaaagaccagtgcatacgttgaaggggcttctcaaataggaaaagtggcaactggagtcgactatccagaactcacttgcaggagagaacaactagccatccaaaactctttttcggagggagactagctttctttaagactccttcgggagtggacaagatagatttctaagaattccattccaaatgacatctatcatttaacgaggcttttcctagatggacaagttacaagtccaagaatatccttccggatgacttctaacttcccataaagacaaacaacttctggagtggacaatctagacttttggaactcctttctggacgacatctagctttctacgacaattctttcgaatatctttttatttagaagaactatacaacaaaataaaattataaattaatatacaaacaaaacccattaaattaccaaaaaaaacatcgcacagtgtaattaaacacagccttaatatttaagatctatctgtgacaattttgaattttttgttaaatcttaaaatagttactagatttatttaatcacaattttttttacaaatgtagttttagttacaacctacttttagcaataaattttattaaaaatataattttagtaaaataaattattttttgatgaaatgagaacttcattaaatttagcattctgaatacctaatatccagcagaactgctggagcgttagacacacaaatgctacgttcagataaagaccgagacaacctagcaacagtatgtgctagtcagtttgctgaacgttttacaaaatgaattttaaaagaagatatcgaagataaaagaacttggcaatcatgaacaagaataccaaaaaccgaattaagaggaattctgctacgaatagcttggacagagagtaagctatcagtctctagctcaacagtgtgccagttatggtttttaatccagcttaaggcttccttgatgccaatgatttctgcaacttcag

SEQ ID NO: 243859 - DNA, 1616 bp, Cannabis indica
aaatttttttagtaattacacagtgtaattacattcaattctcatgggggccatgagaattgaagattgtaattgaaaccccttaattactttcaattacactgtaattacatgatcagacaaacatgcaaaattgtgtaattaccttcaattatacacattgtggctttccaaacacatttatgttcaaatgagaataataactctataaataatgatcatattggtcatttgtgatacataagttgaaaccactaattgtaagattagaacctagtgatggtatgttcaccctttaatactatgctgaacaacatatgaaacttgacaaattcttataagcatttctaaagtttttctaaatattcatgtcagtgaggagttgacttttatgacaaatattttgagtgttcttcttctctttgtttcttatgttgcaaaatattgtaatatttctcttcctcttcccacataacctttgattttatatttatttgtaaattgcaatcttctattttttattagcatttaaaataatttgattaattgaaatattaaaatagagaatataattgtctaaaaatttataattgtgtttatttgtgtacgagaatacttagttagattaaatctcataaattgttgtgaacaaattaaattattaatttataatttcactgtattaagattgaagaacatgtttagagttaacatttttttaaaggttttaagattgaattgaatgtggttggttgtgtgtgagaatatttagttagattaattgtaactaaattacattatttaattgagcacataaatctcataaattattataaaaaattattcttattactacaataattatttttccgacttaaacttatttaacctcataccaaacataaaaatgtgaaagataatcattcccataaaatattacatcataccacacagtaccatactcaataaatggttgtaattatcaaaataataactaattatcttgtctaagtaatataaatccctattaaagacgtatccaactaaaacaggcaattttaattatttaaaatgcttttgtgcagaaattataattaagaaaatataaaagattaaatgagttgagcaatgaatggcaaatggggatacatatcttatcggtttctataagaaaataacgttaattttagatacatcaaccaaaacaattttttttttcctaaacatgtttgtagcgacctcccaccaaaacaccacctactttgccataataataataataatcataataaatctaggaatatttttaagggatacttggtgtttattccattatatcaatccaaatataggtctcacctaatagtttttttttttttagaaaatatatccaaatataggtctcacccaataattaaacgggaaatttgaatttccatacttacaatactttggtcatatatgactacattactaatttctcaaaaataccccacatttaaaatccctaatctcatcagcctctctctcaactcactcttgctcaacccacccgatcccaaccccaacccaatttctaaatatgattctttttctctctccaaaattactcactc

SEQ ID NO: 243860 - DNA, 3974 bp, Cannabis indica
tttggctggtggaagaggtttaggaacgtttaagaatggtctcaagggtggagtacacattgtcaagacagaccaggttgcagatattgctggtattaaataatatcttcatactgtttgaattgttggttttagtttctctttgtcttttgaatttgtttgccattaggagtgattgttgtattgtatctaagtttactggttttgtgtttgtcttcttggcaatatgaactacttgttaaatctctccgaaaaaactatagtggttttatacatttggtaatcttcaagtggattgtagctccttatgtactgaaaaactatctgggtgcatcacccacaggcactgttttctatctttttttttagttattattttctaaaggtttccttttgtaactgaattcttctattgcagggaagatgcttggggagatacttgtaacaaaacagactggtcctcagggaaaaattgttagcaaggttggatagttatatagtataaggctttgcttgattgttgacaataagcaatctcagtatgtttgttgtatacattttgaataaacttgttattatacatgtaggacttgacttgacagttgattacattcttaattaatcaactaaatggctcgtctagatacatagttgagtaattaataaagagtaatgattgtgcacacactttttgcaccaaaacactctacacacctatgtggtaattctttttaacttagtggaattcatctgaaatgaatttgattgcttggaaaaatttgcctcataggtgtgctgtgcatactgttttggtgttaaaagtgtgtgtacatattattactcaataaataaaataatatcttcatttacatttagttgagttttgattgtgggagctaattaattaggcccatcatgataatccgtattctttctcttgggatattgtacttaatcttgtacagcaactgctgagagaaataacaatcatgtaatacactgttggaaattatgtatctgctctattgcttcaaccttatgggttgtgcttcactcctctcaatgtttctaagcactccaagttgttttagatgtatttttaaccaattatataatttttattcaatacctttggtttcttctttttccttttacaggtttatttatgcgaaaagttgtcacttgtcaatgaaatgtactttgccatcactctggacagaaaaactgccggtccggtatgttctcttaaccaaatataatatttgtgtttttttggaatcgctggttttgtgtatgggtcattcttaccagaaatattttagtttactttttattgaaagatggtttccttctttttttctccccagcttattattgcttgcagtaaaggaggaactagcattgaagatcttgctgagaaattcccagatatgattatcaaggttgttatcttatagtgtaaatgtttattgtcctgtaaacttctcttagatttgtaagctgtaacttactatttctatatttcaccgcatattggtaggttcccattgatgttttcaagggaattacagatgaagatgctgcaaaggtagtggatggattggctcccaaaggtgccgacagaaaagattctattgaacaagtgaagaagctatataagttgttttgtgagagcgattgcactttgttggaagtgagttttaactttcagatctgtagaactgttacttagaactttccttttttcaacatcttagaattaacctggatttaatggtcagataaatccgctggctgagacttccgataaccagctggtagctgctgatgctaagttgaattttgacgataatgccgcatttcgccagaaagaaatatttgctttacgtgatccaacacaggaggatcctcgggaggtattgttattgcctatcctctattttataattatatcttcttttgtatccaagtatatttcttctcctcaggggtagaggatatggtctgactataagttttaagctgttggatgataggtaaggaaaaagaatgggataacgaattaaattcttgatgttgataccatttgacaggttgttgctgccgaagcagatttgaattatattggactggatggggagattggctgcatggtgaatggggctggtctagcaatggctacaatggatataattaaactgcagggggggaactcctgctaacttcctagatgttggtgggaatgcttctgaaggccaggtaaattaatgatactagattttttgtttttgttttttttggctcttaatgcttttgtgacatccgtggccacctttgaacggttgaacccctctcatttgaaaaaggcgacccttaaatgtagcaattcaatccaaaaacaaaaaggaaatggtcacttatgaaaactgcttcttgcattattagctgtttgcattaaattctgaattgatgttgagactcttctttcaggtggttgaggcatttaagatcttgacatcagatgataaggtgaaagcgattttggttaacatatttggaggaattatgaagtgtgatgtaatagccagtggtattgtcaacgctgctaaacacgtgagacttacataactatttctgttcttacctcactgtaaatttcaactctttctttagttttcttaactgatatcgttttttccccttcctctgggggtggcgccttgctcaccaggtttctttgaaagtaccagtagttgttcgtctcgaaggcactaatgtcgatcaaggaaagagaattctgaaggtagtaaagtcagaaacttacaattatacggtcgaaatttatacgtaatgagtgcttattattttactttgataaatcggttttgcaggaaagtggtatggcattaatcacagcagaggatttggacgatgctgctgaaaaagcagtgaaagcagcatataaataatcagtgtgataattctggttcctttattataattttatttcatcatatatatatataattctttttgaggcaaaactaatttgcactttctgtgctttttttgctgtgaaagcattgaagaatattttgtctactgaaaactgtaacaagagttgtcaatgaatgattctcaataatgttttcttctcaaatttcattggaagagttttttgcattcttggtctgttgtaggtattaatttatacacaaatctcatcagatcttacttttttttcatccttttattgataagactcaaatctgtatactatgctcaaaattaaactctaccaacatgatcaatttgctatgaatatgatgtatgtcaaatcttataataaatgcacaaaattttataatgtcataaaaactgtagttaaagaatgtaatgattgacccttttttgttggcacattgatgaagttgtaggattttttttaaagaaagaaggcatgcaacagtattattaaatatacctataataaatcatataatcagtacttttattataataaatcatataatcagtattattaaattaaatcataggagattgtgaaatattaagttatgtttttgtagttattcagtttgcttaaaagaattgtaatgaggtcatatttatttgttatatattttagtttaatttttacggtaataatacttagttatatttttaaaatttttgtatgtatttggtcattaattgttaaatcaatggtgacgtaacaattcttgaggtgtcaatgtcactaaattttggtttttatttaaaaattaatgtaaaattttaaatatattaataaaaaaataacatgttgataataactttatacttaaccatagtcttgaaatataacttaagtattattattgataatttaagctacaaattaagttgccaatgaaatagagatagatgagggagtttattggattaaaacaagcaaaatctcaatcaatgac

SEQ ID NO: 243861 - DNA, 1863 bp, Cannabis indica
aaaaaaaaaaaaaaaaaacagcacagtaaagttgttataagtaccgtgtgacagtaaaatagaaataaaatgagaaaaatcagtatagggtgtaaatttcccaactatttttgtactccacaagtattctaaaatacagtctcaacatccatgaaaaatattaatatgtaaatttcattccaatattaatatattttattcaatagtataaattagtgaattgggattagatttgggctaacatattatattttgagataagttgaggaatacatcttttttgtatccattaatcaaaagtaccctcatattatatttcattaaaatctacctacttttataagtgggttgcttaatatagctttgccctccacttaagtgtagcacatgatttatattaatttaagatgtataatggagacatctttataaaagtgaatatattttaaagaatatgaaaaatgaaggtaaaaataaaaataaataaaataaagtgggtatttaatgcgcaatttctacttatatttttgtgaacgataagaaaaacatttgatagaaaatttattttaattttttggatttaatttgggttttttttttgtgtgttttacatattcgtgtttacgtgttgtgccctcgggctaatttgatcgtgttttcagacttgttttatcgtgttgtgctcaaacccacgtcatgtcatgccaatttacattatcgcatgtcgtgcttgacctatgccgggcttagaataaaaaggaaattatatatctatatcagggtcggatatggtgcatatagtattatcccagcccccgccccatccccgtttcgggtattgaaattgtcccccaccactgcccattaactaccaagacggggaatccccaccccattaggagcgagtccccgcgattacccatccccgcagtataaatttccatctctagatgagataaaaacaattaatatacaataactattttattaccgacccactgaaacaattataacttaataaaacacagacaaattaattagcttagaatatgcaaatgaaccattaacaactccgcatcatacgtatataatagttatttttataaagtttttggcattagttatgaaatgaacataataaaatacatttataacttgtttatttcatctgattgaaaaagccaatctattacactaaagctagtcacactcaaaagcaacttattattatttacagagctttcatggaggcggagactactactcctaccccaaaacccgtacacatcgtcattttccctttgccacttcaaggacatgtaatcccagctgtacacctggcaatcaagctagcatcaaaagggttcatcatcaccttcgtcaacactcaactcatccaccaccagatcaccaaatctctcaaccaaaacgacatcgatgacgttgttgttgatatcttcgctggggctcgggaagctggtctagatattaggtacagaacagttagtgatggtttccccttatcctttgatagagtacttaaccgtgaacaatacatattggagggtcccttggtgttcatatgccggcccccatggaagaactcatgggagacctagtcaaatcggaggatccatcagtttctgtcttcattgctgatactttcttcagttggcagtcgagtatagcaaagaagtacgaccttgtttcagtgtcgttttggactgagcctgctctagtcttttctttatactatcacttagatctcctcaaaataaatggtcactttggtggtgcatctcacagtatgtcattttgtctaccttttcaccatttgttgcttcataatatgtgtggtttttg

SEQ ID NO: 243862 - DNA, 3343 bp, Cannabis indica
tttttcaacttctcatcagtcataggctgaaaatgagccaagtcagcaagtttttcaactgatttaactgtgcttttgatcctcactgtgatttcaatcaacaaagatgttaatgtcaccaaaggaattatctccatgagaggaactgagactggaactgaggctgcaacattactcgaatcatcatcattcgcctcgagttttggagttgagttttcggggagtggtagaggcagaggagttgacacaccaggaagagatttcaagtcattttgtagctcttcaactgaagtgttcatttgttcaactaaaaaatccaatcttgatgatttcttcatagtcttcaaaatggtagctagctctttcataacacttgttgagtttgagcttacttctaaacaaatgttgctcaattgcttcttcagttgctctggtgcctgtttttttcaaattcaaaatttggttaataaattatttccgtcatatatacaatacaaaaaaagttatttttagtgacaattttttagtcacaacataatttttttgtaactaaatgtgacttttagtcacaacaaaatgttacatgtgactaaaatatagtatttaaacacaagttatcactaattaagttttgatcgcaacaagtattgtgactaaaaacacatttagtcacaacaaattgtgatttttgtgattaatacttttagtcacgaattttttagtcacaacgtaaattttttttgtagtaatatctcaattatattactatttttaagctaattgctcgttttcattattttgaaactcgaattttaccttattttcagatttgatgcaaccattgaaagcttcaatgcaataagcgcagcctcgcattgctgcagcgatttcaaggtattgattccatggatgtcgaaagttaaatcggccatgtgcaggttcccacctagcaaaattagcctaaaaaacaaagaaagaaaaaagatccaaacttaattacctaagttgaaaattttgatcaaatcattagaaaaagcatgtgtaactaatttgttaccatagtatcttctgcagcttttgaactcagtacacatttgtaacttttctcagattctttattgttgttaccactaaagtaatcagctatacaacctgaaaaaaatagctaaaagggttagacaaatgaaattttcatgtttggttagtgagaaaagtttgtatcttttttcttttcttaccatcaagtgagtcaccaagtttgtccatgttcctattgatgagtgtatggagttcttggccagcccaaatgggacaaacagtcataattacaagaatacacaatgaagttccaatgattatggttgataatctttgatgagctaaatcgaatagcttatcaactcgataacccgaaatcgaaacaaagctgaaagtgaggatgaagatcatagttccataatcaaatcttgattttactgatggaataaatctagagaaagttgctgcagaagctgagaaaagaaaacaaaaacaaaaaggttacaaattagtaaccagaaaaacaaggcaaaatttagtatctttatcttattacatacctaaaataaatacagaaactcccactatgaaaggctcaactttatctcctgaatgtctagcaatccaatgaactccaatggctacaaatccagctaaaaaagtcccacaaattctgttcaaacacttacaaagtgttgcacctgaaattacacaacaataaaaaattcaatctttgtagtaaagattcaaactttatcaagttttctttataaagattcaaactttattaagtttagacaaaagggtttaccaactgtattttcgaaaactacaacaactgtcataactgcccacatagcagttcctccaacaccatcataaagaggcctcatataatagaagaaagaaacagcagtaagagctataccaactttcaagcaatggataacttttcttggatcattgcagcctattttccaagcattatggaagaatttcgcaggtttcgaaaatatccatatgattagacctttcagaccaagaaaaaatttgctgagaaggcctttttctggtgccaaaactttggttgagtcatcattgattcttatactccattggacttgaccacttacttccttctctatagccatttcagttgagtttgataagataacactttgtagtgaagtgttatggttgattaaggtgagaaaataatgtgttgttgttcaagtatatatatacaaagttttttttttgtctaaattaaaaaataatgtagagagcaaatcatagaaaggttttaattaaaaaaaacatgttatggtgtatggtgagagtaaaggctataaagggtattttttattgtgcttaatttttttaataaggttaggtaaggtttaggacatgagtggcctaaaatagtcaccttctctacattagatttcattgcttaatttacatgaaaaactttaatgtgttgtgtccattcatagggcatatacccttctaaaaagtttcaatcttttgtttattcatgaaaaatcaattttattaatttccttttgttgtcattttgactaagatgcattttttgatggagtaatgctaattgactaagtgattaatgcaaattgtactaaattactgtgtgtaatggcgaagctagaccgaaatttaatagggaaccaacacatgtaaaaatataaaaattatttatttttattttttaatttaaattggaggttactataacaccctttggccctcttatcttcgtcattgtatgtagtgttagttagtgatcttaggcaccattggtgctcttttgcactactctttcaaacgaaaggtgcattttgagcgtatgttgtattaagtcgtattggacacaaaaattgtttttttttttcttaatgaaagtttcatttttcgaaattgaaatgcaacatttagcagcttgagcatttgccactatcagactcgaccctggtcataagcagattaagtctatgtctagaacacacttagcttacgagtccaattttttttcttttaaaattatatattttttttactaattttaaaaaatattatataaattttttaaaataagagcctaaaaatatttttttttatagcaatatgatattatctcctaatattactaccactaaaatcattcctttacttgtcaaatcaaaccgtccaatgcaattaactaccaaaccaaagttatattgataactaaacttacttaacaaattatgcaaaaacaaaaaaaataaaagcttttcattttaga

SEQ ID NO: 243863 - DNA, 2371 bp, Cannabis indica
atttttccttacctcaactctgctgtaattaactcctacgataccttctaggccctatcaacaattagcgaaacccttagtccaccgataaactcaatatatttattactcttactatgcaacaagtttagcctagaatttgactcataaaacgtttaaattagaaatcctaatgctcacaaagtttttagttaatcgatgttgttatttttagttttataacttatttgttatgttattttttattagtattagtatttttttattgtttattttgtattttttaaatatgtcagttttttaaatcaataattatttcagtgataaattttaatttgatgactaaatataaaattatattttaaaataaaataaaataagggttagaaacgtaaaaaaaaaaaaaaaaaaaaaagttgcacactaaattggtgtagatacaaaatcaacactatttaatggtgtataatttagtgcacaccaaattggtgcataaattggtgtattattagagtgaaatgttgtgaagattttacaccaatttaaagaaatagtgtaagagaaactaacaacttttgttaagtgaaaaattagaaaaactaaaaatcaaaataattattcaacatgccttaaataaaattaaattatataagactatatacttaaataaaattaaattaagactgtgagcatatgcacataacacaaattaattaaataggacacattatatctccaaattaaacaacgaatcgatttcttcatgaattccaccaaaaactgtgtatacgtaacaaatgtataaaccaaaatttagatgtaacaaaaagtaatacaataaaaaggattatgaaattcgtgagcaaaagaatcaaatactagtagtttatgttgtcatgtagacacatgtgacaactttattcataaattattctattaagaagaattaaatattgacaggaacataaaaccaacttcaagaaataattttggttttctgtttcaaagtttatcggatacattcttcatcaaatcgggatgggcacattggaaggcaaacaattcatcaaatgagatgaagccatcgttgtctccgtctatctccttcattcggtctcgtacttcctcttcagaagagcctaagccgagcgccttaagagccttggccagctcctcccatgagatctttccatccttattcgaatcgaaatgattgaaaactttttcacattgaatcctctcttcgtttttaagttcagccattcttttttcaagaattattacaatattggatttgagttgataaagtgaaaaataatcaaatttgtttttgtggttaaagagtgcaaacatgtgtatttatacatttttttcttctccaaattttggatttggcaatatttcctgctttaaaatcggatctcaccttaaaccaaaaatggagatttaaattcaccaatatttaatggaatattgatgataatattagttgttgactcctctccattgaaaatttcaaatttttgtttactaattcaggcttatatagatgtatgtatacattttattttgtttactaattctttaatatatcatcgttttgatctatgcacactttgtgagaaataattgtgaatcgtgacattacttaatgagcatatcacacattagtatgtaacagaaagtgtgttactaggataataactataaaacatatagtaattatattttattttaaaattaaatgattattttaaaatataaaaagtgtgttagataccaaataataattgcataagcataataaagtgtaattaaacatatactataagaaaagggatcttttttcccaccttttacacttgaaattaaaaagaaaaaagataaaaagacatcttcaaaacttttaatctcactttattttcgacgcctagaaaaaatgtgatttgaaattctggaacaagaacgtcgtttggcaaacacacacaaaaaatcgtgttgggagggtcattttgtgtgtttacaaattacaatctatgaattttcagtaagactttttaacgtggttcttaccaaaaaattgggattaaaaccaactttattcccctttttaggtgagaacttggataaaatcgtctccctatacatgacacatgcataggatcaaagcccaaaacacacattgtacttccttcatcttttttcaccattttctcttcatttttcatcttttcttcaacattttcacattagaaactcaaatacattttccaaatcttccattccttcctcatttcttctgtcaagattaccatcaattgatggcttgcccttatattcttcaattgcacgctatagcattaccgagcta

SEQ ID NO: 243864 - DNA, 1401 bp, Cannabis indica
tagttgccgaaattctcggtcaatattttgatactttcgttgagagttgtaggaagcttttactactccttcaattttccttggtggatatcacgccatggctatcacttcgaataatcaaaggcccttgttgtgtcctgaccctctaggacatgtggaaaaagacattgcctcctaagtcaaccttgaagaagatgtcagggatgacgtagacggccaggactatgggctcaaaagttacccataaggctacaaagaagaagattacaaaaacatagagctcatatccctgcggtggtgagccatgtaacacaaagctgagttggctaaacagtgagaagccaacatgagaatgcaagaggccttggaggcaataaagaaagttttagtgatggaaggcttgaacatagactcagtatccattttagtgatacgtaataatcctgatagagctgtccctcgtgacctcaagaaaagaaaaaggatgatgcgtgaaaccatagggcaccaagtcccatcaggtatcctgctgaaaaagcctcacaatgccagggaaaacctcactacagtacctagggactgaaactaacccatttgcacgtagggtatactttgaccacgtgcaagggtataggctccacagatggagtaagatggtggggaacaccgcaacatgcttgtaaaccaagggaggaggaacagccagcgcagcactgagatgtctgatgagcacatcccatggataatcttatgcgaagagttgaatgctcaacaaggggacctctaagattattaataactagagccatgatagactatcccaacgggatgacatgaacggaggaattctagatgaattagcagccttgaaaaaagacttcgttgaggtctctaggagacaaaagggcaacgattatgaatctagcaatgaggaccaggagccttgtgccaagaacatgatggaggcagagctcctaaagaacttcaaaatgctagaaatgacccaatataccagagacacagatcctaatgatcacctcttctagttcaacaaagtaattaccactatacgcatcagcaatgatgctaaatgcctttgttttccttgcaccctcaggtggtcaacgaagaaatggttaaaaaatggagcctagctccgtgagctattggaaaaaactacaaacaaactttaaaaggcaatatgtggctaccaggaagataaacgtagaggtaagcacgttaacaaacaccaaataactacccatggaaactttgaaaaactatttaagtggttcaagggggaagcctccaagaccaagaaagtagatgaggggcagcaactagccctactacaagctgagatccgacaaaaaaaaaattggaatgaattacagagggaaa

SEQ ID NO: 243865 - DNA, 1979 bp, Cannabis indica
gataaatattgcttcaagaaaatttcattcaaatgtatcataggctttccaaagatcaagtttgatcatacaattggcctcagcattcttcctttcataatatctgactaaattctgacataccatgatattgtgagctataaaaaatacattacttatgactaaaatattaatatagtataataacaacatattatatatagtgatgaagtttaattttgcctaaaaatattttttttaattactcaataaatgtgttttagtcccaataaataataatctaaattatattaattattcataaaaatcacaaattgtaatgtgattaaagtactagaaaacaattaaagtgaatattaaacggaacttatataggattttcgcccccaaactattaacattattaaagcgtacttcctcaagttttttgctcgttacagattttttcttaattatttaaaatgttgaaatataagattcttgcatgttaagctttatcgcacatgtctataaaagttttaatatggctgatgtctcattgtcaaataaacgccacatgtatatttaaatgaaaattagcttaaaatttaggaaatatatttttatcaattgttgacaataaaacttaaaatgaaattatttttgatattttaataataaaatatgtttttcaaaattttaaattacatatgtagcgttaatatgacattacatctttagtcacaacaagtattgtgaatttagttacaatataagttatgaattttgtgactagtatctttacttacaaattttttagtgataattcacttttaattataaattttgttgtgatttaaaataaatttttttgtagtgcatgctaaaaaatttaaaagatataatttgataattgtaataaatcccatggtctaaattataattaaataaatcttaaaggaaacatgtatgtataattttttgttaaaatgtatctactagttttaatattgtttacattattttcaaactagttataattaatgctaatttagtacgttacgacatgttgaggatataatattatagtactattaattaagtttcaattaaaagtagaatattcagttttagaccagtgtgttagactgggagtctaccaaattttttattttattttaatattttaataattattaaacaaagaaaaaaaaaagaccctcaaggaaaaatgtttaaacctttataaaataattactgttatgctaaggttgcatttgttaatgtatttatttttaattttttttaattataataataaaagtaaaattttattttaaaaataaaataaaacaaaatgttcaataaccacttttataaaaatagacttcatctgccttacctgatttgattttgtgtagtaacaattgatagatcaatgcactcaagaaatttagtggatccctctcaaagaaatatttgaaagagattccttctctctttccaataaattaaactccacaaacttagtttttatcctcgagtagcaaaaactcccaccatgccatacatctggtaaaatggtctgccactgggactaacaactttggaggtctagcaggttgctctaaagaaaatattaaaaaaaaaaaattagacatacctgcttaaaggtatcggaccaaaatcgttcaaacatcagacagatatcgggccaatatcccaaattaataaaatataataatatgcaataataatcggactactaccggactatcgttcttataatcggactacaagtaaaaaatattaaaacatcaacattgcaattataatcgaacctactattggactcactcgtaccacatcggacacttcgcaaaattgaaaatccaaaaacactatcgaacccactatcaagcccttatcatcctctatcggacctaatgaattgtatcagtacaagcaaactattgccctaccatcgtcctaatatcgtc

SEQ ID NO: 243866 - DNA, 1614 bp, Cannabis indica
tcttacatttaaatattttgttagtaattttttttttttaaatctttgtagtagtagtttatgtgtataaaataaatcaaatatgtgtataagaataatattgtaccttatattttatgtatggtggctatctttagtccaatgatcatatactaaccaatacatcatacaaaattcaaaacactgctaaaaatatatttagtacattatagttgtagtcaatccattagtatttgaatacaactaaacaattcaccatgtcaacaaaatggttcaacagcaactacatgtttatttttcatttttcaaagtgcatacaactcattaaatcttattttcagtgtctgtaaattagttattgaagattacaaaaaataagagtaggattctctcaaaaaaaaataaataaataagagtgagattgttggggttacgtagcctgacccagtaaggagagaaaaatactagcttaattagaatttcaagttcatttatattatattgttatgagattttacctaaactttctcccctgccaaaaaaaaaaattgtgatattcgtttaattatcatgtgatattaccgctatgagttttcttttggtaaaggaaatactactactaaaatttctttttatgtccatcataaatggactagataagtttttccagttcattttgtgtttaatattatatcggaagacattaaatagatatttttctaatctaatattgttagactaaaaaaatatttattattggacgtgataatgggacctatgagaagaagtttttcaagtccaatattgttagacgtgaagtaatttcgtgtccagcattgttggacatgtatctctatttttatataaaaaaatcaaataataaatattttaaatattataaaatttaatatattttttaagtaattagagaaaaatattaaaaaaaaaattaaatctacatcaaatattatattacaaaataattaaagactcagattttatattattttatttttctttactctatcctttataatatctctttaaaataaaccttagaatataatgtttcatttataatttataaattaaaaaaaaaaaaaggtaaaacttttaagaataaggttattggaggctcaaatttgctttttctcggaaaaaaaaagagataagaaacaactaccagtgatgggaatgacaacggaacaccgactcgaaaaggactgacccatccattttttgccggagaaactgagtcaccttcaccaagcaacgtgatcttttctcttagtctatttttttacagcatacaagagtattatcattattgcttcatatatagagagagaaacaaaacaaacataaaaactaaggagattgacgactagttttgatgagacagtcgattggtttcaaggtgacggaggctgagatccaatagcttcaaatgtcgtcaaccacgaacctcaacaccatgactgtcgagcatcaaactccgtcttcgttgacgacaaacccagacaacaaacgccaatatcgcttcaaagacaagagagagagagagagagagagagagagagagatagagagagagagagagagagagagagagag

SEQ ID NO: 243867 - DNA, 943 bp, Cannabis indica
aaaaaaaaaaattattgattgctgatatacctaaaattcaaaaaaatttattgacattatatttcatgagaaactctagttttggaacataaaattattgtttgaaagctaaaaagagtatggttagtattgtggagacacaatactcattattgtttgattattttctttggattgaacataaagtaatttgagttttgcaggagggaacatcaaattactttaaaggactaatgcttgttctttgctatgttattgttgctgcaagtttttttgtacatatagacccttctgcaattggtgaggatgcttccactaaaagttatagctaaagaatgacaaaactcaagtcttaatgcttacttgacacttgcttttgcagcggataagtacctaaaacctagtagttgaattggattattggcgagttttcttgattgaaggcagtgacagatccagaatttttactttgtgtgtcttgtttattattaaaaatatttgtgcatactcatcctgcatactacagtcttttagtttaacaaaagcctaatactgtcatgttgcaatcttttggttcaaccaaatcctagagaatgcttatttatgaagatagatcttatgaagtattataacttttacccatccatgtttgaatttcaacatggtacgtacctatgatatatggtgttcttcaaagaaatgttttgaccgcaagaccgatgaatgctactccaacaaagattcttgttagatgtaggattactgtttcatgtcaacagtagtgataaaaaaaatgtgattttttgtgtggagatttttcaatattctcttctttccttttcttgaacattaatatatggcttgtatttatacatatatatatttgataaaatatcaacttcattgaattaaatgtattccgaatacaagagagccttaaatc

SEQ ID NO: 243868 - DNA, 2120 bp, Cannabis indica
attctaaagcaccaattgatcatgcttgaagagtccaatcgatgaaatcacaactgtatctgagaaatcagaaatcgccgatcccatcttacagcggctcaaatcactcaaaatcgtgagtgtttttcttcttacttggccctagtcaatttcccaatttaacaatcaattaacaaacataataggtttataattatcatggggttctgggttttcggtttatattatagtttaatgttctttgctttatttaattgcagtcaacaccgattttgacgactcctcctaccgagactagcttgactgacattctagtgaggaagccatcagctccaagtatggaattttttctttttcccattgcattgaataatcatttttcaattattggcttaattggccaattgggtccaagaaaaaattacagatacatgaaaattgattcttgagaacttgagaggatgataatggttactctaagtctatgtttaatggtacatttaggtactgttgatccaaaagtgctactagaactcttctcaatgtaccgggattaccatgagcagaaggctcaagaaattagcaaaaatcaggtttctcttactatacatatatagatatgattctcttattagtgtattgtgtattttggctcatatttcatacaaatcgaaacaggaagagatagagaacaagattgaagttgcagatgcgttggctattaaactcttgcaacgtcttaattactcggtctcagcaatgaaaactactacacaaaatttatcagaaggtacttgttgagcatctctttctcggaattattggttcggtttgtcttagcaacatctcaaatttggaatatacacagttaattcactgcaggttgagattggggagcttaaaggaaggttaacagaagttattagtaattgtgactccttatgcaaaagaattgcagcagaaggacccgaatctcttagattatcggtaaagccgttcgcagtcccagttgcagcgaaagaagatagctctggcccgtcctcgtcctcgttgtctcgaagaaatccagctacagaacaaagttaggccaatattttttgcatttacttattttgtttttcaatcctatgttgcattccattcttatataatatatatgtattctttgatgaattagcaatatcttggaatgaaagaaagaataattatagagaatattcgggttgagccgttctttgaagaatggccgcttgttcaccttgattgcatgcagagctgatgatttttctgtcgtcacggcatatcgatgtcctctctttaaaaaaaaaaaaaaaataaatatgttgatgtttgtttcaaaagggacatattttctactcttattatttcaagaccccaaaaatcccacaattaagataacatgtttagtcacgcaatggtaggggtatatatattactcagcaactataatgaaactcatggagaatgatgatgatttaatgtacgaggagtgttaatttaaagtattatggtactgaaatggctaaagacaagggcggacccatatagtgacaacatatatttctaaataaaattgatatttatgcacaatataagttttgatataatgataaagttatttaatatacatggagttcattagttttaaatttttaatgttaataaaaacaaaataggtttattttagtatttaaattttactttttaaacctctacaaataaaatttgtttataatcttaattattgaacttaatatttttattgttactatattgaaatacgaatttgcatctgaaagaaaaaagacattctatcactctgcaaaaaaagtgtcgtccccgcacttacaaaaaaaaaaagtgttgtcccctctcaacttaaattttgaatctgccattagttacaaaacatgactctataactccaaaataaaaaattaacagaaaataaaagtgtatgaattttaaattttaaataataaatttatatatcacacgtttataataatatttaatttcttaattattatttattaaaaaactatatgtttattgaatattatttttaaataatatttaatataagataaagggaaaaa

SEQ ID NO: 243869 - DNA, 1934 bp, Cannabis indica
ttcaggggtatttttaacgatcttaaaaattcaggggcatgatttgatacatgtcaaagtttaggggcaacaatcctaattaacctaaaaaaaaatatataggttttaatagaaaattaaccaaaacattaatacagcaatttgtatgagataaccaccaaaatatatatttttttttgcagcaataacgaccaaaatattagtatctttttctttcccaaaaactaatcataatctttttttatttattattattattattattattatcattttaaagaagaactaatcctactcaaatattggtagccctaaaccaacacagaaaggcgccagtcatcaagacacgatcacatccgtccatttaaatcgaatctaagaaaattccatagaaggaaaatctgtagagtgactccaccgttggatcaaatccaattccacttgcttgcttgctatatattcccctaagctgccaaccaacgcaaccccttttgcatagaaaggaagatatctagagtgctgtagagaacgagactttagagagagagagagagaacagagcgagaaactatggcggcaacagtctctccatggtccaaacctggggcttgggccctagactcggaggagcaagatgcagaacttcttaaggagcaggagaagaaggcagccatggaacctcttcatgatttcccttcgctttctgccgccgccaccgcgaagcctaagaaaaagaaaggtcagactctttccctagccgagttcaccacctatggaggccccaaaccagttgcccaacccactgcgcctgcgggtttaacccatgaagaccgcatggcactccctaaaggccctcgcgagcgtaccgccgaagagattgaaagggcccgtcatagcggctttaggtcgtttgatcgaggtgataggaacggcgacgactcgtcgaattcgaggtggaagagttctgataggaacagcaatgggtttggtaaggatgcgcctagggattcggggccttctcgggctgacgaggccgacaattgggcatcgacgaagaaatcgtttgggggtggtaatgatttcgatagaggcgagagaagagaaagaagagggttctttcccgattctcaatcgaaagccgatgattcagatagctgggtcacaaataagagctttgtgccgtccgagggacgaagatttgggtcgagcggtggtgggtttgagagagagagaaaagttggatttacctccaatggtggtggtgcagatggggacttctggggtaagagaagggaggagagtactggtgtaactgggaatgaaggtgggattgtgggtggagggaggccaaggttgaatttgcagccgcgaacgctgcccgtggttagtgacggaggctcgcctggttctgtgacgggaactgtggcggctattgtgacgaagccaaagggctcaaacccttttggagaggccaggccgagagaggaggttttggctgaaaaagggcaggactggaaaaagatcgatgagcagcttgaatcgttgaagattaaggaggtgaatgagaagccagagggtggatcttcatttgggaaaaggagttttggaatcgggaatgggcgatctgatgaccgcattgagaagagttggaggaagcctgacacggaggaggatactggttcccaaaggtttgtattgtcagctatgtgaaaatatgctctagtttttactttttactttgtgaaattcagcaaggttgatactttgatcgtttccttgcatgatgaatgatgatatgaaaagttaaatagattgtttgctgataaaattcactgttgctagattatgttttagctcttaatatgaatattgattgttgatgacgtaaaatcaaattcattatcatgatttggcaaatgctttactttttattg

SEQ ID NO: 243870 - DNA, 1948 bp, Cannabis indica
ttattattattattattatgaaaccgtgttagttatttgatatcaactcagaaagtatacgagtatttacaatattaaaaccaaattacgcatataatacagaacacaaaaatcttaacacagtggctcattgcattgagtggatgacataatgtcaaaacagccacaacaaactggaaactgtcaatcttacaccctccaagaattccacttggcatcccagtactaagcctgagaaagatgagagattatttattttgagcagagttcaaaaaatggatacttctggcattacaacattttaactttacagccagtttctatggagggagaagaaaagaaaaagtgtaccaccaggacaccatttacagttaagtaactaaaagaattgtgacttatgtacaaaagaagccatttctctaactcccttcaacagccgccgtgacattgtagaagggatggaaaccttagaagccaagtcttcgatggacttcagccgtacctctgagcacacttgaatctgattggtcataacaaacctaatttcctggaaaatgaacaaaaaaaacatcccggtccaaatgagtttaagagattccaggctgtgacaacaaagagagggagattatgaaaaaaatgagatatcaactaagccaaatacagtgacaatgagtactagttaccgtagttgttaaaacaaggtgtgacaggattaggtcctccagcaaattgcagttagcctacttagttgcagagacataaagctccaactgctcgagccaagcatagtgacgcgtagatcaactgcttggcaggaccacaatggaatggacaaacaaattagtgttattttcactctttactctatcaacccgactcaaagaagcgtgccactgctgagtaaagctgatcttcttcaaacggcttcgacacataaccatccattccacacttcatacattcttcatttgaagcttgaaatacatcagcagtcatagccaagataggagtgtgccaatgagtcacatttccaaacatctcgcttgatgcttctccagatgctattttctcgtttacattgctttccttgaggcgaattttccgagttgctgtaaacctgtgtaattaaatgagccattagaatattaataaatgatacgaggcctttcgttaactctgggccctgatctcttatttttcattattacttgagatccttcatgtacaaagactatatatcaaaagaacgagcagattgattacccatccatttcaggcatttggagatccatgaagcaagcatcgaagctgtgaggtggttcaagcttttctaaagcagctttcccacaatccacacaggtaacaatagctccatatttctttagagcaccttccgctactcttctattcaccatgttgtcatccaccaccaaaattttcctccctctcaataatgttccaagaggtaattttttcttttggttcatgagcctcttcttaccatttgcaagggcatcttgcaagcaggcaattaaaacacttaatctaagtggctttgtcagaacattatccaccccaccggcagatttgagcgcattgcgttcgctagtgctaattgaggtagtcaatagaaatatctttggagggtttgtaagggattctgtagcacaggtttgccttagctgccgcagcaacttatggaatgttagaccagcttcactatcccaaacatctttatcaacaaggatcatggccaaatgtggggaagaaaagctaaaaagaaaaacaatacattagaatcttcactcaaataactcaggcaatataagcacaatatatattagttagttgtcctgcagtacaatctagttgatgctacaaaagctaaagtaaatccctaacacatcatacatttgaatatgtatttcttacttttgagtatcataga

SEQ ID NO: 243871 - DNA, 754 bp, Cannabis indica
gcgataaacaaacgaagtttaattaattgacttacttaaccaagtaaccaccttttcctttaacattaaagagcaatcttcttctttcataattgaatttgaagattcattcttcatctgtataaaataatagatattaattagcataaacctcaattagtttgagagttaaaaagtttattactacatattaaggatgtagattcacatgctaagaaatattttggatgatcaatagttaatttttaaatttcaaaaaggcttgtatgagcatctaaagatgtagaaacaaagttcaaattattatgagtatgcaaactttattgtcaaacactgtaagctaaaaacaaattgtagttgttaatattaatcagctatccagtgcattaactagagcatgtattttaattttttcttgaaaagaaataggtacaaaccaatacaaattaattatctacttattttcctatcaattaaaattttgtaatatttgaattgattataaaaacatcatacggattaggtacctaactatctagattatatttgattgaatattaatagtttgggtaatcaaatttttttttttttgaaaggctttctattattattttttttattttatttgtgtaaatatgatagggctcaccattggttagaccagtttagatcaaaaaatgcctttgagagttagaaaattcttgatccgtgattttattttagaactaattttgataaatgaacatttcatata

SEQ ID NO: 243872 - DNA, 1884 bp, Cannabis indica
atttcatttcttgcaaattgaggcatttgtaccactaataagactacaacaaaaattttgactcttggggtgcaatgcagctatatgatattataagttctcatgtttgaggttctccatttcaggtgttcctaaactcaaccgatcagaaattgttgcagcttgtgaagatttcagtaatattattggtacattttctggaggcatggtgtataagggaactctgtctagtggggttgaaatagctgtaacatctagtgcagtgaaatcacgcgaagactggtcaaaaactttggaagaacattttaggaagaaggtaaacaatactagtttttctttcatcagccttttatgtattcaaactcggtgtctaattgttgattttcatgacctcttacagatagaaacactgtctaaagtgaaccacaagaattttgtcaaccttatcggcttttgtgaagatgaagagccattcacaaggataatggtttttgagtatgcaccaaatggaacactctttgagcatctacacagtgagtattaccgcaaaagcattaacttgtggctgttttttttacagaaaactcatgatttatgaagccttttgataaagatagacttgtgcatgattttgacaatgttgaaattttatgttatcagtaaaagaagctgagcacctggactggggaatgagattacgtatagccatgggcacagcatactgcctagagcatattcaccaactgactcctcctatagctcatagggacttgcattcttcatctgtatacttaacagaagactatgcagccaaaatttcagattttcggatttggaatgaagtaaccgaagcaaagatgcaaccagaaaccaaggagctcttggaaatcccatcatctgatccagaaagtaacgtctacagcttcggtgtgattttgtttgaaatgataacaggtaggattccatactctttggacaactgctctcttgcagactgggcattgaactacctgaaggctgaccattcctcaaaagaaatggtggatccaaccttgaaatcattcgaagaagacgaactcgagaaattgtttcaagttataaaagattgtgttaaccctgacccgaaagagagaccaacaatggtagaaatcacttcaaggctaaaacagatcacagctatggggcctgatggtgcaacaccaaaactatcacctctttggtgggcagagcttgaaattatgtcctcagaaggatgctaagagattttggtcacaaatattgattcattttttcctacgtttattcttttaccttactatgattataatttctaatggcctttatttttgcattatcttttctgattctgatttgttcatgttaaccatggtatgtgtacatgattgtgattgctaattaatgcttgttaatgtaaatgtatgtgtacataagtgagaaaggccaaagaaagggattaagcttgttcttccctccactcaatcatgtggtttcaggctgtttgacgtttaaaacttaccattttaatatgtactgatgagatataaataaatgagatgaactgccaatgactttggcgtctgcctttgctctcatttttagctctgtaatgatgcaccaatcccaacctactccccttgcttttcatatattttttaagaggtagaatttcctttcctaagcataaaatcataaacatatatacatggtttaatgacgaaggaaaagaaaattggaccattttttcttactttgaagtgtttgtgtttcaaaatgttgattttaattaaacacgatgagcataaataatcgtctaaatcataggtttgatcaacacaagttcatcaacaagtttattaaatagaa

SEQ ID NO: 243873 - DNA, 1297 bp, Cannabis indica
tttttcaggggcgactgcccccctcgctacaatgtgggtccgcccctgccactagtattataagcccaaaacatgtctattttattccttaagccttaaggccgtatctaaagcatataataagaaattcgggtgtgtataagagataagatttattgtgaggtggtaaggtttgagtagagatggtttgctaattagatcctcttttgttttacactctcttatgttatgattttggacaactagttaatgattttaagtagttcatcgatgatcaatgccccaataataaatgtatatttattgttttatttaagactctatcgtggtggtcgtgggttactgaccacacaccagatagaactagagagaaatggagggtcgtgaatctcaatcacgcaacaaagagaactagagagagagagggttgtgagtctcggtcactcaacaaagagaactagatagagggaggattgggggtggtgatcactgaagttcgatggtagttttggtggagttttgtgagaactagagaaaaggggagaaggagaaacgaagagagtttgggagaaatgattttaaaatgtgagggataatttttttttttagtggaatgtaatggtattttataattaattaatagctttagcttaaaggttttaggttcgaacccataacctcttcctttttcctatccctctctcaccactaagctagccacatgagggataatttagagtttatggaaaagcaaacacacatggccacttttaccaatactagtttacctaatttaccctcaaataggggtatttataaaataacaaatccaatccaatccacacgatccgatccaatctaatctgcaaagtacggatatccgcacttgtacggattggattgaattggaaaattaaaaatatgtacttgtgcagattaaatgttgattgacatgtaaaaataaccgatttaatataatccaattcatatatatatatttatatatatattttttttaaaatttatatatacaattaatatttcaatttcaatgtaaaaaataataatttaaaattttaatacatataatataaatatatttcaaaagtcaaatgtataattcaattttatttataagaaaaatataatttaaaataaaattaaacatctttatacatacaatatttttcttcttgctttaaatttgttatgtttagttttatttagttaatatttatttttagagatataaaacaataataatttattttattttattattagttatgtgaaaaaa

SEQ ID NO: 243874 - DNA, 3309 bp, Cannabis indica
ttttttgttacttttatctatgggtttaactctaatgaaggaagaagaattctttggcaaaaccttaaggatttggttataaaggatgcttggttggtacttggggatttcaatgagattctttacaaggaagagaggatcagggttagagcaagatataaagaagcaagagagtttcatgaatgtgtggaaatgtgccattgggaagatgtcaaatatatagggaactactttacatggagcaacaaccaatatggagaagatagaatttattctaagattgacaaagtattagcaaatcaagattggctggaatctttccatgctgctgaggttttctttcaaaatgaaggtatatttgatcattctcccgctatactaactatctataatatgccgagtgggaataaaagaccttttagttattctaggatgtggtctaaacatcctaaatttaacgaattggtggctgaaagttgggaaagcgagtaagagaatcaatgatgtatcaagttgtgtctaaactaaggaacttaaagcaggttttaagggctctcaacatgaattattttgctgatgtacctgctactactgtgatagcaaagacagagcttgatttatgccaagaatacttgagaaatgacccccttaatcatgatttacagcagcaagaaattactgctcgaggaaattatgcacaggcactggagaattatcattcttttctgcaacaaaagagcagtctgaattggtttaaagaaggtgacataaattcaagttttttccactcttacttacaggcaagaagaactcaaaatagggtgttatccattacaaacatggaaggagttagagttaaagatcttgagcaggtaattaatgctttcttggatttttacaaacatttattaggcagcaatataacctgcaggaaacaagtgcaacaatgtgtattaagacagggcccgattgtttccaaggaacaaactaaagcattttttagctgagtatacgattgaagaagtgaagaagggaatttttggacatcccaaggaacaaagccccaggacccaatgggtatggtagttttttctttcaagaaaattgggagttagtaggcaaagagacagttgaagcccttatttcctttctgcattccggccaactattaaaggagctaaactccattgacccttgttcccagaagcaattgtccaaacactgtgggggactataggcctattgcatgctgcaatgtgatgtataaggctgctacaaaacttatctgcaatcgactgaggatgatattacaagaattggtagcacataatcaaggagggtttgttcatggaagattcattgagcacaatataatgatatgtcaagacctcatcaggcactatggaaggaacacaaaaaaagcaaattgcatcataaagctggccttgcagaaggcctatgaaaccattaaatgggatttcattgaagaagttttgcatggattccattttcccccaaggttaattaatttggtaatggcttgtgttcaagctcctcgtttctctttgatgataaatggatcattacatggcttttttgaggccaagtggggtttgaggcagggagatccaatgttgcctctactatttgctctgggaatggaatacctctcgcagataatgaggaagattggtaaaaagaaggactttattttccatgaaaggtgttggggtcttgagctaaatcacttaagcttcgctgatgatgttttattattttgcaatggagatttcaagagcatatactatatgttgcagggactgaagctcttttctcacacattaggcttgttccctaacccttccaaatcgactgtatattgtagtaatatgtctgatgcagatgtgcaaagaatcctcgatgtctcaagattccaaaagcaagacttgccattcaagtacttgggagtgcccatttgcccaaagaggatctctacaacagattgcaaggtattggtggaaaaaatgatggcctaaatcaaaatttagagcacgagaaacctctctttttctggtcgtgttgtgctcatcaattcagttctcatggcaatacactcatacttgtgccaagtaatgttgctgccaaagaaaattgtaagtgaaatagaatctatttgccgtagtttcttatggaatgaacattacacattagcaggtgtgcctacggttgcttaggcttcggtctgccaatcaaaaagctcaggaagattgggattaaggtgcattacggattggaataaggctgtgttgtacaaatatgtttcggctgttgctaagaaggaagacaacctatgcgttaaatgggtacacaacatatacatcaaggatgacaaattggtggacctataagtcttcaactcaagcaagttggtattggagaaaattggtaatggttaaagatcaaatgaaggctttgggtacattaaccatggttcaaggcaagtatatagtggcagccgggcataaagaggtacatgtccaggcgccaagaatagattggaggaagtttgtgtggaattgttttaatattctgaagcatagctttattgtatggctacctatgcttgcaaaatgaagacgaaggaaagattgaaaagatttgtggtaattaacaatgatgactgcctattatgcaacaatggtagtgagacaattgaacacctttactttggctgccagtttttgaaagaatgcttaacataaatcaagcttcggctccactggaagacctcgacaacaactttgaaaggaattagcaagtggataacaaaggccaaatgtgacagatttaaaaagagagtatttgttgctgccattgcagctttgatttacttgatttgggccaatcggaacaatggctattggaacggggagattgaaaattgtgatagaattgtgtacaaagtaaaagctgtcattaaaaatagaataatatgtatatggctaaaaaaatgtaactagtagagaagaatggttgtttaatacattgtaaaacctttgtaaagattatagagtttagaattggaggtcctctacttgaggatgctcttaggctgtacaaattgttgtttggattaatgcacttgttgatttccaaaaaaatgaacaagctaaatgataagtaaggagaattacttttgaatcctcttcatatttccatctcattggtcgacttttagtacctcacattctcttgacaagatatcacttacactatcaacacactaagtcagtttttgtccgacacccc

SEQ ID NO: 243875 - DNA, 1266 bp, Cannabis indica
tatctatataaaaataatttaaaaaaaaaataaaataaaaataaaattaataatttttaattattaatattattttattttttaaataaatatattattaaatattattattatatgtataaatttttaattgtatacaagcagttctatagtaagagtatataccttacatcataataaccacaagacctaaaattaacggtaaaatcaagcagttccctaccggtagggaacttttgctagatcctactataatattaccctatatatattataaaaaaaaaaaggactttgtccccaagactaattttctcctctcttgactatagatccataaattttatctataaagcatactctcccccaagaagaaaaaagaattatccttttagataagtgaatatcttaaacttgagttaagaatatcttaaatttgagaacaaagattttttttgctttctatcaactagtgttgtcttattctcgtaggtcatatcaaaatggtcccctaagcaagttcagccaatcaaaacatgtgactcaatctcagcatcacagatatttttaagataagtatatgttcttaagatgggttctatagaatggattcacgtgatgaagataattcatgattctacaggttacaaattaattaagttataagaagagaaactcacaataaaaggatcagcaaatttgatgtcattagccgagtactccttggtaataccgccgccactaaaatccaccatttcaactctaaatacatctccgaccgccgcctccgccaccggaggtatgtcagggtgccaccggttgtgaagtggaaccttctgttcccggggcttcttcttcacgtcgatggggaccataactgttgggccgtattgggccatgtcttgctccaacccaatagcccggacttgaattaaacaacccaactagatgtagttagttacttaatctttcaaaggaaaacaaaggaagaaaggaaaagaaatattacaaatgacaataggatgttagttagtggagttgaatgttttaatgggatttttattttatgaacacgtgttggtttgtgtcgttgatgttgcctaatgaatccaatttttggcatttattttcgggagataccaaaatctcatgacacgtttactaaactgtaattagaattctaataatcaataaaagaaattaattaggttaaaatataaaataatcggaaacgatattttattttttgtttactaaactgaccggaaa

SEQ ID NO: 243876 - DNA, 1857 bp, Cannabis indica
ataattttttttatttagattgtatatttatttattaagcacttgaaaatatttttgtaatattattattattattattattttttattaaaactgaaaaaataacccacatttttttatcacaaccatattttgaaaagtacaaaaaaaatgtggtagagctagcctccctggcacacacacatttacatgcaagttgagaaataataaatttccatcaagtcattgaataataataatataattaaagaaaattcttagggccaactcctaaaagatcattacattacagaaaaatggcataagataaaagtaaaagtgatgggcatgaagtgtaacaaacatgtcttaaatgtggataccataagtacctgtgtgatgtttgaatatcatacactaatacaagttctactacattaaattatgatatagatgccacaactttggtgttcccaactgtagttgacattattatatagaaagacccttgaatatggctccatagaattaaaatttgctataaacatcgtataatagtaaatatgtacaagataccgaaaatggtagagacattagttcaaataataaagaaattatctccctactatcttctcccaccttttagaacagcaacaaattacatctgaaagaaagaagtaatgctcaaacagaaactcacaagaaataagttacctgctgatttaaggaggaaataaattttaacatctgcatgatttcctatacacaattgataatcttaagctgtggacaacaatctggttgaagtgaataatccatcccattttccttccaaggatataaatagatgattccgaaaagatgttcaggtgtgaattatcgaaagttaaaaaaaaaatctatgctggagcagaggcacccacttcctcattactgttttcttcgagcaaaggcttcctgttgtctctattaattacagcgacttgattttcatcatcctcattggacaagtcaaaactattcaggaagatacctgtaaatgcatacgaaatgaaatatttcacaaaatagctactctgtgatgcacacaataaagtttcaactctttttattatgtcgagtaaatagagaagtcatatctgatgcacgtgctcacacccccgcaaatagatcaagaatgaaaagtttcaactttactcttatgaaacatagcatgtgtgattttcatttgtagacaaagatagagagtagttttttcacaggttaaaacatgtacgaaattcgcaacagtttgccgctcacctatgaaccatattgcagcagcaataaatagaatagcagtcagaattagagctgttgtcctccagttgttaagatgatcctgcattatggtagaatttaaatatgatgccacagaagagaatatttctgtgagaggagaaagctaaaaatacaagcatgtaggaacttatatcaccaagactaatcctttacaaataatggagtctatataatctaatgtaggcaagaagcaattcgatccatagaatgacaggagtagttggcatgacactagaaggtagaagatataattcaaggagtgttttgtaaaaattatgaaaatctttactagcaaaataactttacaaaaaattttattagcaaaataacattctatggtcgcaaaaacgaccatgaattacactgtacgactataaacgactattatggtcgtcaaacgaccattacactgtgcgaccaaatcgagtaaattaagtgaggttattttgcaaattttagtagttgaaatagttagtttggcatgcaactttaagcagaaaccttaactaaagaaagaggtcatctatgaaagacaaa

SEQ ID NO: 243877 - DNA, 3040 bp, Cannabis indica
tcattaatataaatattcaagtatgaatacatcagaacaattcaaaatcaaaaccaataaatattcaagtattttaataaattcataaataaataaattagaacaattcaaaatcttaaatcaagaaaattaaaagtttagatttataatctttacaaatatgaaaaacttaaatagatctatctaccattattgttgccgttgctcagttactgaattcttaaacaaaaacaactaaaacttatataataatatttacgtggctcgccacgtaactctcatctagtatatatatacgtacagaaagatcgaacaaaaaaatcaataatatgtaagggttgtcattgatatttttattatttatgtcgatatctttaatcaataaaatacttgcctctattttaaatgtatgcatatatagtgataataataactaaacataaaaggacaaaattgcttatttttggcttaattagctggaacactaacagcttacctttaaaattaataagatgagtgcatagatatttgtaagagaccaaaactgtaaacacaacctatatagcagattttcattaatgattaatattataaagggtatatgatagcagtagtagtagtggtcagatattctcatcagagatgggtctagccattatatatacacgaaagtagagcacatggtttcagacacagttcataatattatttataattactatatatatataataaataaatgactcagaattatgtcgttacaataatttcgtattccacattgttgaatacgatcagataaatcgatcagaaacgacaatttattcggccccgtttagctttattattattattatatattggatcaatcgcgagcctcataatattctttcatttttattttgttcaagatggattggtttttagtggtgtcaattgggaattatggagtttcatctcaaaaccaattggttataagtggagtagtccatgttcttatatatagctcaatacttttacatttaatccatgtgggacaatattcttcaatatgcaagaattttagcaccgattgtctacatgggagaagaattacataaccgctcttattatggtatgttggtggagcattgtaatatgttacaaaatctatcaaatgtatttttgttttctttttaagcgatttactaatagagttgttgataatttaactatttagttcttaacgtatgtttcgaagtaacgaaattattctatcttttatttaaagtatataacattattaatacaacgtgttgttgtattattggagatgatgtacatgcatacataaatagaatacttaattacaatgatattgatcaataatgtcttatttattggattggggaaattttttcttcatatatatctggggccaaaaaaagatgtcggttttttgtctgtattgaaatattttctctctatctttgaatactagctatgacaaaccacactacttacaaagtcttccacctttttatctctcaacctaaaatagtggccataattaaaaaaaaataaaaaaaaaaacaaataaatgttgcttaatttgtgaatcatcgataatcgatatatatctgaaaagtaacccaaaaaaaaaagaacaaaattggattattattattattattagtgtaataattaattaattaactttgactgcattatgatcatttacatcagtgattaataatccattaagaggagaaaaattattattaggtagtctaacagaagaaagtgctttgttgaaatgctttgccttagtgccaaggtactcattccaagtgatcggacggtagagaggtggagagcctgggccaactaatctttggagtggagatatttggacacttgatgggggcccataaaggtaagcaatggacaatcggtgtcgggtccggttcactacagcccgatggagcacactcgggtataacccgtttgacaaaatgtgaagaagatcacccacgttcacaaccagagctcctttgactggtggaaccgtgacccacccagttccctctttcagaacttgcaacccacttgtactgttttggtgtagaattgttaagagggttgaatcagtatgggctgcaagacccatggcccgatccggatctggacaagccgggtatgaattcaattgtagagcagctgagccctctttgaaatcacctttgggcccggcccatttaacgtcggactttgttatacccaaagaaccaagcatcagccacatcagcttccccgctagcctcttcatttgagtttcgtactcttcaattatatcactgaaatacaaaaaaaaaaaaaaaaaaaaaaaaaaattaatttacatttttttttacattatcaaaccgtatcttctatgtgggtccatagctctcattgtaatctttgctaaatactaataatgcatacataatgttaaatttatttaatttttttaaaaaaaaaaaaaaaattaggttggtgctaaaacgcactttcattcaccacccaaaaaaagaaagaaaattttaataaaattaaaaataaaaaagacgtagtagtgcatgagatatagtaaaaatgtgtgtgtggggtttaattaataattagttatcaaattaattaattaagtaccagaatttggagtaatcttggggccaaagctggcgaaaatgttcaaggggtgaaccaacgatggtgaagccttcagaccacataagctttggaaaaaaagaagaaattctagccaagccgtagccggatacgccatcaggtgagcgagccgccttgagcttttggctaaccggaagagaaaaaaggttccgaccggcggtttcaatgtcatgaagaagttgtgatgggattccatggtttgtgacttgaaaggcaccccaagttttgcatgcatgtccaatgagtttaagggcattttggtcatttaaatcaacaatagggacagatatgtcctctggccaccgctcaccggccggcgggttgctcctcc

SEQ ID NO: 243878 - DNA, 1401 bp, Cannabis indica
cttctgagcctctccataatcaccagctaaaagttctgacggcaagcctattgatgcttttagagttgaaaggtagtttgatgtttccatgtttaatatattattatatgaagttttggttaaagatggcctttcctatgcttacataattttcttctgtctttaatctttgatggtgtctaatcctatttttctcccaataaaatagcacatatttcatttaaaaacatgagcttgcaatgtaatttaaactgaaagtacaccaaataacattcttcaggtacataacataccttaacacagagctcagagattggctgtcccaccaaaatgcgttgaaatggaggaggagcaaattcaaaataacttaatacggacctgcaaaaaagaaaccgaacttgttttacatctattcctacaagagaattctctccctctcagcactctgacccaagaaatacaaacatgcatgcatctactttcttgtagattcaaagaaaagtacacagctacatgtgcatagataaatataaggaacacatctacatgaataacatgtaatgtcactaatgtatgcctgcgtatcatatatcttaccctgataaagaaggatccaaatcaagagcacgacagaaggcgaggcaagcaagctcgtggagatccaaacccttcccaatactattatagaactcaataacggaatgttctactaatattctgtctatgtcaaaatttgcagcctcttcattagaattagaccttaaattggggacaagccggatcaaccatacagctttgtccacaattattctcactattgggcggaaacaacccatcagcggaattgtgtaatttggcagcaggaacacctctgccaacagtctcaccacctcatcttctgtcactttatatccctgcaaaaataaaatataataaatggacggatcattgattccctagctattatccaaaccatactatattaccagttcttccaaccacttatgttagttaagtaactaaatttttaactgccaatttccttttaataaagacaaccatttaaaagaactgcgtacctctttagcatacttagcaaaccgttgaacagatagaagctttgggcagcgggcaagaaacctttccaacgcagactcaagactgaaactcttatccatacccattctaaaactcaaaatatattgttaactaactgtaacaatatcttacctattaattttacatatataaagctatataacgttatttgttccggaaacaatcctcattagcgcgtacctgcgaatgaagtaattgtttttcggcgtacctgaagtaatgtttttccggcgtacctgtaaatgaagtgattgtttatttccggtcgtacctatgagtgaa

SEQ ID NO: 243879 - DNA, 2750 bp, Cannabis indica
acgaatacggagagaaaaagagaggtacctaaagaacttggggaaggagaagattttccgagttcaagagaaggccaaagcatttgttcttagtagtgccactaactttttggttgtttccacttcgagaaggaaaagatccgaatccacacttgtcacagacttcacacgaatgtagaatcttgtatatcttatattcacacctcacacctctcttttagctatttcagaaagggcttacatagtaattttcattttgtttcttctcagcctattttcttgcataccatcaacaaattgacacgaatcaaatgcaagccctactgcttgcttcaccttcttcacaccttcattcaaagtttcactttctaatgttaaaaccaaatatccataagttactaatttgtttgttggattctttcagcctcttccatctccatcctttcgactctttgctatagaatatgagtttttactattcggccattggagatgcagactctagatttctagctcttagttaggagtagtaattgttagataaatcctgattagatagttttgatctgtaaattaatttaaaagaaattattttgtttgattatcatttgataaactatgttattattatttttcctttttgacagaacacatatttaatttgatgaggactattttgtggttaatcatagtaatctgtaagtttgaaagactttgatatatcatacgtttcaactcttgaatattaaatatgtctctcaactctaaactatgcttcttcctttgtggaaatgtagagatgtttcaagaatcacttatttatactacacctattttttattattatttttaacaattgattttagtttccttttccaaattatttttattgaagtgttttacagagtaagacctttgtgtgggtgttcacattgatatatattaaatatatatatccacttattcaactacatacactgacttcataataagatgagttactgctggtttctccattcctttgttgtactactactttcttctacttctctaataacacatgcatcatttcattctttaccttctaataatcatcagttgtgtcattctgctgacaactatgctttgctcaaattcatcaattcattttccattaaattaaaacacaactccaatgctttctcttggaagaatggaacagactgttgtttgtgggatggagtctcatagcctcgaggtttagttttcttaaaggtcctcttcactccagcaatacccttttctcacttggtcatctccaataatttccatggctctccaattccatctcagtttggtagtttgatcaatttaaaaaggcttagccttgataataacaatttttctggttatattcctgttgaattctcccatggatctctctaaactcactcatctcaccattaatccattccgaagagataagattattgtggagacttatgtctctcaaggaactttctcttagatatgtcaacatgatcttattggttccatgcctacatttgattggagctcttacatctttccaacaccaaaatctttgttgatttaccatacttgtctacaactgtcaggtctttgaagacttgtcatatcactaacctcacttgtttagacctcagtagcaacaatttcggtggccatatcccattgcattatctcaatcttcaacacttaatctatttggatcattctggaaataattttctcgcagattccagaattttcaaaaacatcaaactctacccaaatttcactacctaagcatttagaatccctccacttatctaataactttctcagtggggcaataacttctttggatatattcccttacgggttccaataaattgaatagtgagattccaaactcactctttcaactactacattatataattaatccactttgcgaaaaaataaatatacagtatatagtctagacatagacatattagtctaagaaagagtcatctcaattatctatgtgagattaagtgaaaatacaaagactcactctctgctagattgttccgagggcaaggcaggtttggaagcattctcttttatattacttttatcttttgcataaaaaataaagatgttagggaatttattatatctggttttactaatttaaataaagatgatttctctctactaatgtgtattttatggactatttgggaatatagaaacaataaacttttcaggaatagtcatttggatgcaggggatttagtgcagtgggctagcaattacctattgcaatacaagaatgcacaatccaagagaattgatgctgaattagcctgtcattcgcatgctgcaacagatcagagcctaccttaaaaagggtattatcaattgtacacagatgctgccactgatacaaaacatttcaagattgggcttggtgctatcattaaggactggactggaaggataatagcaggaatttcatcacctataccagctcaagtctcacctctcatggcagaagctatggctctctaatcaggcctagattggtgctgcagtattcgaattccacttgcaagtatattcactgattccaagcagctgatcagcaaaataaattgctcaaaaaaggagcttcctgcccttgctgatattgtggaggatatcaagagttcctcgtcttatttccctactgcttctatatgctttgtgccaagagattcaaa

SEQ ID NO: 243880 - DNA, 2232 bp, Cannabis indica
aacttgggattcgttatgaaaaacacaatgcatgtttaaatctttcctcagctctcaatgaaaacaccaaaatatttactgagattttcaaaaattgattaattagagattaagaaagaagtaaaacaataaacaataaataataaatataaggttttttacgtgattcaggcgttaactatccttagtccgcgagtccatttattagccttattggcaagtaatgaatattacaagtatttacattaagaacttgaacattgtattcctcttgtccctcttgaagaagaagaagctctttaagaatttttagcatagttttaataattgaaaatagtttttcagactcccaagagtcatcccctatctcatgaaaggcatgggtatttataggcaatctcttcactcaaatgctttctgtgttgagatctgaccgttgatctggtaggtggtcgctccatcatacggtgtgccgagatgacaactcgtattgtctggacattccttacgtgtcactcaacgacctttcctttttggacttcctctccgaatgctcgttgtaccatgagcaagtacgatggtgcacgtgccttgtactatggcctgacgtgggggacgaaacctggcatcataccagtaaaagcatggtcgtcacttttgtagtctaacaggtacagacaaagctctcttgtgacatcgtacggggatacaactcattcaaggtcctttcgtaacctacacaggtgtactcgaggaagcccccagcctccacagggtgctccgcttccgctcctaggaataagagatgccatgattgcaaatgctccatgcgtccacgccttgtgatgaagatatcattcgcggaagccccttgtgggaattggggccgatggcacatcttgatgattatcatgacttcctctgttaggttccacgtgtccagcttacaaaaatctggacaataggataagtaataaacttcaagcgcaacaaaatgataaagaaatgaatcaaagcagtttactctatatttcacttatcttttcaaaatcacaaatactttttatctcaatctctcaatccaaatctgaatacaccatgttctctccctcactctaaccacacaacaaacttacacacaattctcttttcataacttacagtttttctccacatacacgtcacccacacacaaaacacatatttataggaaaaataaacttgggcaccaagatcacttgaggaccaagacaatccaaaactttttttagaaagactcttcaaaatttagtcatcaaaacttttcttttcacataattaataattaccaaaagaaaattataactttataaatataaataaataaataaataaagaatgaaataaataatttatgtgaaagtatatttaatctttcttatttactaaaatcaatttgcattttgaatagaggatataaggtcatttggtacgaggtgttcaaaataatttaattcaaggaaatattatgaaggagtatataattgtagaaaaatgtgtgaactgtgtttggctatgtaaggtaatatgtaatcatattcttattaattaaataacattgtttggtagagtacatgaatcttatatattattttaaaaaattaaaaccaaaatattttttattatatctatttaatgttaattataaaaataaaataattcattaagaaaatatatttattaattagtaaatatcaaattttgttgtgtttttttaattaaaatggatatttttatatattttatcactatgtgatttatttttgttcactatatcatttatgtgcaccatcagcataaattttatatataatgattatatatattattgctaataatataaaaataactcaattaaaaaaattgaactcacaaaataaatatgcatcgtaatatttttgttataataaattttaatatttgccaatgtattatttatttattaatttaaaaatgctatttaaattaatgtaatggaaggtaataatttaattctatcttttttaaaatatcaacattactctactcaatggtagttatattaataatggaataacattctaagactaaaccctcaaaacaagataatgtttcatattaccattcccttgtaaacattaaccctgtaaagtcctttttttggcaagttaggtgacaaaataatttttcatttttatggtaagattgctatgc

SEQ ID NO: 243881 - DNA, 2356 bp, Cannabis indica
ttagttttttcttttttttttctttttttcatttttacgaaattctacatagaaacttctattgacaactaacgatgacaacctaaattgacaaataaaaaatcgtataaaacccatattgcaactagcgctgcaaccactactagaaaaacccaaaccgtaaatttgaaaaaaaaaaaaaattaaaaaaaacagtatatgagataattctccaatttaatatttactaattaataaataaatttctttaataaattattattttatttttatatataattaacattaaataaatatatataaaaaaatatttttattttaattttttaaaataatatataagattcctgtactcaaccaaacactttaatttgattaataggaatatgattacatattaccctacacaaccaaacacagtttacacatttccctataatcatattctccttcataatattccctataagcaaattattttgaacacctcgtaccaaacgcccccttaggggcaagtatcaccaaagagtgtcggctaaaggtttcgctctggtgccaaggttttttttttgggagtgagggaaactttacgaaagcgttttgtgagagtcctgtctgctaaacacgtaagtagttagtgcattttatctcaaacaaaagtagtaccacgatataattgcttgaagaagtttttagtggccataggcattatcagtggcccagaaagaatactttcgtaccgtactaaacgaaatgccaccgcaaaagttacttactattgtacctaagctgactttcccgactttataatgcgtgggaaaagtatctgaccttttgtgatgaaaataaccgttttggcctctagccaaaacaagtcagcaagagctctattagtaattattatttgcgagttttatggtatttaatatatatattatatatattgccacgaggcaaccaacctccaagctagcaactagtgaagaaattaataagaaaaatctaccaattagccatgacaagataatgtagagcagtagaagagatcgtgtaattataactagttaacattaaaattgtaactatagttaactgaaagaaaaaaaattgaatagaattaataatttataatatgatttatcagaacacggctccacatgaggttgggtcgcggaaaggacaagcggtggcgatgaggatatcaggaacgaaggctgcattttacaactgcagcttttatggaagccaagacactctgtacgatcacaagggccttcactacttccacaactgcttcatccaaggctccgtcgacttcatttttgggtacggcagatccttatacgacggctgttatctcaactcaacagccaagaaagtggcctgggcgacagcccagaagaggagcattacatccttagaaagtgggttttcctttaaagacagtgtggtcactgggagtgggcacttgtaccttggaagagcttggggtgactattcaagggttgtcttctcctacacttttatggataacattgttattcctcaaggatggagtgactggggtgaccaaaagagagatcagtaagtcataatatataatatatattttataaaaaatattaaccacttatactcttcactatttttaacagagatatttgagcccaaaatatccaagttaatacattagtagtacttattttcttagcagcaaaaatatcttccgtccatgttttgttgtagtttatgttggctgttgtttcagcaatgaaacaggagaagaaattcctacctagttcaatactttcacaagcaaaatgaaacgaaaatgcagaggaaaaacagaggaaaaatgggcaaaatatgtgtgttctattgatgttttttgatacaaaagaaataagcttctccaacactttctttttttacttcaaatctcagccctactcttgtttaaatataagtccttaatcgggttttccaaaaaatacaaaatataagtaaaattaataacataacaacacattaactaatatgctccccattaattttgctgtctttaactccaagggctgatattagtaactgaaactttgctagtggaagtgcctttgtcaaaatgtctgccacttattcttcatagctacaatatttgatttgcacttctctattttcaattgcttctctaataaagtggtacttaattgcaatatgccttgttttctaatgaaagcaaggaattttggccattgcaatactgacttcttgtcacaaaatagctcagtagctttttcttgttttttcgctatgtcttccaaaatccttttaagccaaataacttgagaagttgcaa

SEQ ID NO: 243882 - DNA, 2699 bp, Cannabis indica
gtaattttcttagaagatataattaagtatgatatgctattttgacgtatatcataggaaaaataatagtattactgtatattatgaaaaacacaaaaagttgcaaatgaatatatgtgtgttgttaaggctatcttctcacaacatcattatttacaacactagtttcattttttacatggatatttggacttggagtatgcatgtaccgaacatttgagcatttttggtcacgaaattcaaccagaaacatgaagatgttgtaattgtaacaaacatcatcaacatcagtaaaatagtctgtgtctgatgtttttattattattattattattattattattttgattggagaatttgcattcaaacaaacaaaatcaactgttagtggggaacttaaaaatcgaaaacaaatatttgtccaaataaacgcttctaagaatcacataaagaaagacccacccgcaacgcaagcagctcgcggccacactcatcagaaaattcccagctgcacccactgcgcaagcaccccataccacaccaaggcagtcccaaatactagagcaaatataaatttagtttgtgtgttatgtcctatgtcgctcgttgtgattttaatattacacttaccagctatcaaaactttaatctcataataaagttttgataattggataaatattgtgtttggtgtaattaaatcgaaaatagaaaaacaaaagttagtgaaataacctaataatgaacatgaaattaatggtatattttattaaataatcttatttagaaaaacattgtgctctaatctcaatggaaaaaccacattgcaagtaatgaaggaggaaaggtttaagttttgggctttaagctaatatgcaatcttagttggtctctaccctttattattgctttagactttagcataaaagcaggttcccacttccctcaatcagtgaatgaggaccctaaaccaaacccaaataagaaactaatccatctatattaatatatatatatatatatatatatatttatatacatatcataatcatatccatacatcacttaaatggaaaagctaccagtactatttgcatcccaccacatgttaatattcgttttttatatatgagctttgcttttttccaaatatatggtttatttttttcttcccaaggtgatcaggattgtgatctttgtttaaaaattgtatgtaaattcagcagattccattacctgattaacatatattagcattagcaagttttccaaggtattattaaaaatgcaaattcagcatattccattaacaacatggaagctcttactttctcataattatttaatactttggttctcttcttgagtgttcaccttttttataaggatcacaaacaaatttattatatcattgtccatatatttgtttttagaaattatcatcatattttatattaataaataaatgatgtgtgtattgatgtgaaataagtgaaaaatgtatgaaataagactacccttctggccaaggacaaaatctaccaagaaattagctgttgatgaattcattcattcattcatccccttcctaccaagattacattagggtcttttaaaaaagtattttgtacccatgtcataattgtccttttctttctttttattttaaaccaaacagtgaaaccagtagtcatgactcatgtgttgaaaacttgaaaacgaccactctctacagatgaagatcggatacggaagaatgccaagattcgagtcaattaatcttcttatctaagaaagtaaagaatagatttttttttcctttattttttcttaaaagaaattgactaggtgagtctcttctcttctttagtgtaattcttgcctgtgttttatttcatgacgcgtttcagggcaaacaactagtcaaattttgaccattcactcacgttaatgaatcatcatcatactcttaatagagtagactcggaatttttacgacatactcggacaacgtcgtactttcctgtcgtgaatcacgacccaaattatttagacctaaaacacatgagccatttggtgctttcatacgtaaacagaaacaatagtgaaatttccttagctttatcagcccacgactgaagacagtcatattatatttattgtatatataatttataatgatgatgatggtgacgatcacgatgatgaaccaaaccgataactaatcaaaaaatcccaagaactaggctaaagcatatagcctaacttaattaacaaagaaaataccacgagctctaattaaaatatacaaattgcttgcttgcgtagtggtcataacatggctttaccaactaaaaataaattgtttaattgttaaacacctaattgggcaaatttaatttcacgataccaaaaggaatccaatattttcttcttaagaaaccaattaggggcagcaatatatattatatagagaacttttttttttctttatatatatataatactgtgcttaacagagccagaccattcaatacaagcatatttaaatagatagagaggggccactctgaatctgaaccacatcagaatctcatctttactggatatttttacttgtaaagctatgaaagccactagtgaattttaagagtttgaacccaccaagttgtgataaatggacagtaccagtagggaaa

SEQ ID NO: 243883 - DNA, 1955 bp, Cannabis indica
ttatgtcctggagttgtatttactttagccaaatctttggggctgcatgtgaaacttgcctgcaggaacgccttggtttgttctttttgtgaagcactgtgcttagactttaatattctgtactgttttcaacactttactttatgtgttggcatgtatagtcattttaagggttgtcttcttatgctgtttagaagtgtgtggtttcaatgaccatcactttaaaccctttgacattagtcgatattttatccttctgctgaattaggagatactttaaggagtacatgcttcctcttaccaagtaggatggtttttgtcttgacccttttaaaaatttcttaggacaactaaagctgttgaaaacacgaatggttttctaggttgttcctgatcactttatgatcacggtagccttgatattccttggatgtgtagacctttttataattcaagaaggctggtttcacacgctacaggcttgggacgacatttttcctaatcaggataaagccgaagtctgtaggagttcaagcaaagccttttcttaaaacactcattttttttgaaaatttctgagaaggaattcaggcgagtatttcctgtttaggaaatttttgctgaaaacgcttccttctttaaaatgagtgtatttattctagctttaagaagcaattcaagctattttcctttttaaggaatttagttgaaaatgcatcttgccttaactaatgaattataaatattgaaaaacagagtaattaaaacaacaaaatgcgacacacaatgtggtgtttgggggcacagatggctaagcatgataccaccaagtgaactgagaagtatgaatatctccaccttcctagtcgcttattttaaacatcgcttgtggcctaaaaacgtaaagtgtaaagtcaaatgtacattgcttttgttttcattgcatgatgcccaaaagccatttttcataagttaattacatagatttttacacacaaaacactccaaatgttgtcaaggccttgtttccaccgcctgtttgtagtatcggcacaaatgatctggattccacgcattagggacccttgatccatccatcctttttagccaaatagtaccttgtccaactttcttgagtatctcataggggccctcctagtttgggctaagtacccccattcccggttcctgtgaagctgggaatactcttcttagaagaagatcaccaacattgacggtacgacttttcacctttaagttaaagtaccaggggatctttcctgggtacattttaagctgcacttgcgacagttcccgaagctcttcaattaagtccagtgactcctggagcaaagaatagttgcaggaggggtcgtaagtatctcgtcgatgggatgggactgtggttactatcagaatcaccgcttcacacccataggccattgcatatggtgtgtgccacgttgaagttctttctgttgttctatagatgtagagaactcaagggagttcttctagccagtaggctttgcaagcgtgtagcttcttcttcaatgtgatcttgaagattttgttgacaacttcaaattttccattggcttgtggctgggctaccacagagaagcttttcacgattttgtgccgaacacagaagtcggtgaaatgttcactatcaaactgctttccgttgttcgacacaatctaataggggagtctatatctgcacataatgttctcaacaacgaaatccaatgccttcttggaggtaaccgtattcataggttccgcctcgacccacttggtgaagtagtcaactgcaacaactgaatacttgactctgccttttcctgtggggagggatcctaccaagtcaatcccccaaacagtaaaaggccaaggactgctcattaacgtgatttcagtgggtggcgcacatgggactttagcgaatctct

SEQ ID NO: 243884 - DNA, 1416 bp, Cannabis indica
cttacaatcgaaagaaactcaggtgaaacaccattaacacccaaagaacgcctgaaccgtaataaggtgcccttgcaatacaataagcaacattattagtagcttgttaaacaaaataaacatacaccttagacaattcaccaattaaagcacgacagtcttcaatattcaaaccaaaaggcgacaccatgtgacttgaaactttaatcgcttggatataccaattagaaatttattagtgtcacaattataaaatgtgtgttgagtcattaaataaatatgttaaatttttgtagtctattttaaaataaagtttatgacttaaagtatgattgtcatgattttaatatatagatactaattagacaatttctaatttgacgagagactaaatagaaattgtttataaatattactaacagtaatatcataccttttttacaatcaatttaagacttcgtacacttttgctaatctttaattttattgtttaattctcatgaattaattaagaataaattcagattttatagtgttctaacatgtaatatcataagaaatccctaagttaattattgaggatttataattgtattattgtgaacgtaacttgaatgaaattattggttaccatttggataggcctgtcgaatatgaataattattattttatgtaatcgtttatgtgtttttcaaacacacgtttatctattgttgacttctttggtttaatcaattacgtctatggttaagttattttttttttttttgatgtgggcatacatcgatggttgaattcagtgttccttttgagtttaagttaattgatcatatgagtatacgtgtcttattatttctcatttttttgaaactgagaattttctttctttcttatatattgtgtatttatttgtttatataaatataactttaattgaatgcatatatgtttcctttgttaattatcattcattctattagagtcaatagaatattgattttatatatttcaatattgagatatttatgcaatactatgtatagtatttgtaaggttttgaattattagtgatataatttgccagtatataattagttatgtagtttaataattcaaattttagtgttcgattttttcttaaaaagaaaaaagtgtaatattttagttaaattaattaaaatattgtcaaaaatattccctttaacctattagctagttaataaaattaagacttttgttaaagaataaaaaactattttgcaagcaaaccaataataattattggaataagaaattataaggattcccacatcaacatctttttttgggttcaagaacagtcgtctgagagtggttcggttcggctccatgacgtcattcgtttcagatttttgttttcatttattaatttacta

SEQ ID NO: 243885 - DNA, 2830 bp, Cannabis indica
tggtgttgagaaaagacaacaaggcagcaatgctggattccgaagacccggtaagaatgatgtcgtcgacatatataagaaggacaatcactacggtggtcgatctataaaggaaaagtgatgtgtcagcctgtgaagcaacaaatccccattcaacaatagcagaacttaacttgagaaactaagcacacagagattgcttcaattcgtaaagggacttggacagtttacacacatgatgaggatggtcggggtcaacaaaaccttcaggatggattatgtacactgtctcaggaagattaccgtggagaaaagcattctgaacatctagttgtttgataacccaattgaaggatacaactatagaaagaaccagccgtatggagttcggcttgacaacgagattgaaagtttcatgataatctaagtcgtgggtttgatgaaaccccttggccaccaaacatgctttgtatagttcaatcgaaccttctgcattgagtttaatgtgatacacccatttgcagccaataatgcgataaccaagaggtggaggaacgagaacccaagtgcgttgagattttaaggcaacaattttggtatccatggcagcattctagagaggatcaatactagcttcacgaaaactagatggttcgattggagtacgtgcagcaacactaaaaaacaaatagggcttgtgaatgcccaatatagctctagtaatcataggatgcaaattagtaggggcaatgggaagctcggtcctagaccgcccaatagaatgcccaaatgccaaatttgcttcaaaacaggtcacaccgccatgacttgttaccatcgtgccaactttaacttccaacaatctccacccttaacaacccttcaatgcttatttcacccaacaacaacctcctcaacacccgcaacaacctcgtccttcccataaccctccattattacccactccaccgttccctactactgttattgaccctgcttggtacatggactcaggcacttcacacttgatcttaatcttttggagtttgtagcaccgtatcatggtaatgaccaaattactatgggcaatggtaagtttacttctatctctcatgtgggatctgcatatttaccatcttcttcacttaaactctatcatgttcaccattcacctagtctttccaaaaaaattcttagtttttctcagctttgtttggatagtaatgtatttgtggaatttcatcctactcacttctttgtcaaacagtaggagagtcatcaaattcttctcaaaggacttcttaatcaaggtatttatcgtgtttccacttcgcttgagccatcaaccccgacctttgaattaatacattccgacatttagggtcctatcccggcttcttctattactggtgtcaaatattttcttttgttcaatgatgaagttactcgtttttcttggttttatttacttactactaaagatgaagcattcaatactttttttattttcaaaatattggttttcacacaatttaacagcactattcaatctgtccacactgattggggcggcgaatactgctttctttctcattttttcaccaatcacggcatctgccacgatatttcctgcccacatactccctagcaaaacggttgcattgagcgcaaaaatcgacatatcgtagaaactggcttaactttgttagcccatgcccatttaccgctctccaattggctatatactttctccacagccatttatctaataaatcgcctccccactcgttatcagaaagtcccaaattactatttacttcgagtctttggatatcaatgctttccattccttcgtccttataacaaccacaaacttgaatttcgctcctctccttgcacttttcttggctatagtagtaagcacaagggttatctaagcctccatcctacctcgggcaaaaattttgtcactcgtcatgtaattttcaatgagtcttctttcccgtttgctgctgcctctgcttttcctactcctccttaaaatctcactctattttaacctctcttcccttctctattcctgctactgcctgaaccactcctatgtcccctttctccctttcccatcatccctccttccctaatcacggctcttgcaacccctcctccttccccctctccctcacctatacaccatcatccatctttcccctcaactccgtccataaatacatctcatacatcctcgtctacagcttcaccaccccctattaatttgcatggtctacatgagcttccagtgaggaggagcacggggttgtggggagtatggtgcacgaggatggtgaacggaaggttgagagaaaggacgagttggctgggaaggtgaagaaaagtatggtgcacgtgggtgggaaggtgttttcagttttgggaaagggtaagttggcgaaattggcttgaaggaagctaagagatgcagctgcaatttgtcgttcaagacgagcttcatagttaaggagaagagcatggacttcttccacagtaggtcgaacagggcgagctaaaataggtgttacaaaggcgttgtactccggtcctaaatcatttaagagataagataaatgatcttgagatgaaattggctcaccaacaaaagcaagagtattacacaaggattttaatttgtgcaaatacgcagaagcagtcagccctcctctttaagttacgcaatgtgtttgaaaatcggagttcctcgcagaagatgcggctatgcatgttcgttcaagagacacccaaatttactgcagctagtggtgaaagctcacga

SEQ ID NO: 243886 - DNA, 3085 bp, Cannabis indica
atgaagcagttgagatatctcaacttgagggaaaacgaaaagattaagagactccctaattcaatttgcaagttgcaaagtttgcaaactttgattcttgatggatgtgtggagcttgaggaaatacccgacgacatagggagtttagtaagcctaaggactcttatgttaaccacaaaacagagctttttgtgttatggaagcttgaaatctcttcgttttttgtacattaatagttgcgataacttgaaagtgttgtcgaatgactcgataaactgcaccacattacgtactctggcaataggtgattgtgcaaaactcaatttggcaagtgaatttagtaataaaaatgttcaattgagcctccaaacttttgtgattttttcgttaccagagacaacagatcttccccaatggctcgaacaagctgctaagactttgcgaaatttaaggattgaagattgttccaagttaactagattcccagagtggttgccaaaactcatctcacttgagaagcttgagatcatttgttgtcgaaatttgttgtcgcttccagatgggatggaaggcctcacctccctcacacatttggttattgaagattgtaatgcattgaaggaaagatgcaaacgagaagtaggaccagattggcataagattgctcatgttcccaacctttctattggttaggatttatgatcatgatgacaagaaaaggaagatgtaagtatatttctagttttaatttataaatttattaatacttgcaaagtaattttactattgattgagtaaatattagttgtgggtttgcaattatactctaatatactccatctctttgttacatatagcattgtgcacatcttccctttggcacaacacaggtgtaaaattcttctgctgagatgtctcagataatgaagttgttggatcgttaaacgatcattttcatttctagccaatgtgagactctggttgcatactcaactgaagttggtgtatttaaatcagtcttttaataaactttttatgtgtaataataatctttgcaaagatacactttccatcatttgataaatgtgtgcatgttttttgataaacttttttgtgtactaaactttaatttcaaagacattttattttgcatgtgattaatgcgtacagatttttcatcccagttgtgatgttttatagagctcttaacttttttctttaatagaaaatttatgtaatttgttggaattggagccatacttaggaactctaatggagatgttatagcatgctttcaaagcctatgtttggaagttttacagttatagaagcagaatgtaacacaattgttgtggttgtggattgcattgtctcttcaggatttgaaatctaacgttgttgaatctgattgcttaacggttgtatctggtatttaataataataatagatattcttactttaatgactttagttcattaactgttagagaatattgcaagctaattttttaaattttcaagaatgttcctaatccatgtatgacgggcgattaatacggctgcacatggattagatatgcatgtttttcggatgaatagacaacttgtttgactagatgattttttttcttgtggattgtatagtctttttagcttgtacgacactatttggttttcaataatattgatcattattttcaataacacatgtcatcaaggattttgcctcaaaggcgaaataatgcaagttttatccaatttaaattagcaaacctccaaccatagtcaagcatataaaaataggatccaaaaatattgcatttacaaaatatattatcaatttttcacaaatattgcaattaaattctaaaacggttaaaccaagcacacagttaagtacaatttctttttcacaagcaaagacaaagcaacaacatacaataattatgacttaacagtttacactaaccaaatactttaagaaaaacaagacaacaaaaattgaaaaaaaaaaacaaataaaagtaaaaatttataagtcctccccaaaactaaagatgcatattgtcccaaatgtgacaataaaattaaagagagagaacttacctcaaatacatgttacatcaatgaggggttgacgcctataataagcgtcatactataccacttgaaagttgccattatgaatgccctcaagtttggcttgatacgagtttgtaccatgtttagtaccaacaacacaagatttcaaaggataagcttggggagaaatctttggtagctcatagaggatgtaacatgatgagggtagttttgataaaaaatatggatcctttggtggtgtataaataaatgtcattgatgaattcaaatcaatgatctagaactttcattcaaaaagcttttcctggaagtgaacgaatcatagtttgaaattggcttgaagtttcagactttattttcaatcacaaacagagcgtgttgagcatccaaaacttaaatttttatacctattgtatcttacaattttaaaattcatgctaaatccataaaattcatattatttagtatgttttctctcatttcaacccatatgatatagttagatataaagtaacaagaatttataaggttgagataacaaatatcgtaaaattaattagagatgtgtgacacagagagaaaaaaaggtaggtaggatacgttaattataatattgtaactttataacttatagtttgaacatacaataatcaagtagcaaattaatgttaaccttattacaaataaaagtagcaaatttggacaaggaaggtatgatttgttcttttgaagttgaacatgaaactcagcaaagcatttggaaaatctaatggtttcttttgctatattgtgaacaaataacaatttcaggatacaaaagctgcaatgaaataataacaaaaagctcaaaactctattctctttggaaagatctttgataggaaagaaaccttttgatcactttgtgcacttctaataagtgtactcttaatttaattgctcttcaattttccagaattaatttgtgagggtatcataagca

SEQ ID NO: 243887 - DNA, 2950 bp, Cannabis indica
aaatatagtttttttcttttaaaaatactaagaatataataagatgttggtgatatatttgagttgttcctttaaagcaaagcacatatataacaaagaggctagtttagtaaattgatctgtttcccctctaatatgtcatcttcctttcatacaatataaccataatcttgacataatttttaggtaaaaaccttttttgatttgatattgtgaattgtgtgataatggtttagtctgtcccataacacatatgacactattagcaatgttaaatttgtttattataatccaaattctcacccttcaaattgaattaaggaaaattcaatctaactatcaaacatttttctaattggcttaaagtagaatcacctccaaaaataaacctttttttttcagtaccttgactagtaaaatgagaaaatcctatgaaacattctttcttgtgttgtggtttcctatttttgtttctttttcacccgaataagaggtttctgattgtttgtgttcatcactcctcgtctgagcctgaactttctgagctcgatccttgtttatgggaagttccattggcagcagggccttttcttcttcgtatctttttgttgctcgtcggcctcatcttcactgtactcgctctcatagtcatcatcgtattcttcctcttcattttcttcttcctcttcaatcccatcttctgtaaatggtccctcttcggttacaatactacccctagtgccagctcgagtgcgcttcaaaacctttaccttcaaggctgtctttgtatcacaaccgatccaagaatcgcacaagcaataacaagtcaagttatagtttccttcagctggtgcctggaacttgcccattaccaatctcgacccgcttttcactttctcaactgcttctctaactgcagcaccagtctccttaacatttgctcccgaaccctcctttgtctcctcgatagccttagaagcaccagcaatagctgcagcttcatccatgaaactaaccttttgagaaaaccatacgctattggagacagtgtcggccagcaaaaaccagaagttttcttccttgtgaaatgggaagtagggtgcatgtggaagggcaccgataaggccattagcacgtttttgtgatatccaagattggattgtgacaatgtcgccttcttgaataccatcttcaccttcagtctcgcagttcacttcgactgttacagaaggcatcatttctaaaaccatctcaacatcttgtacttctgctgatgagaaaccagcgatttgagtaagcaggtcggctcgttcttgcatggtcatatcttgaagttcttggaatgttctcaccttctacaaaaatgaagaaacaaatagtggttaaacaaaaatcgcttcattttactttcggttggagagttgaaatccaaccactaatcatatccagccacaacgactaagcaagtcaatctccaatatgtttataattttgcaaaaccattttcaacaaatattttacaagcttgtgtaagctttcataaaaatatatgattccgaatcaaatcctataggaaaagaaaaatggcaataacaataagaatagaggatacatggtatcatatgtgttacaacctaggcaatatgaaagcccgcttgttctaagacattgcataccgcagaagacgaaaaaaccctcctagaaaactctaagatgacatctaggaagtataaaggctgttcattctaaggcattgtataaaccatatgaaacaaaaacaccttcccagaaaactattacaactacaagtaccaatcacttgtagggcccgaggagacaatataattctggcaagttatttagttgagacttcagagacaacaatatagctcacaaactacacttagaaaggatcccagaaatataattttattgaagtaccttgcgagatattttctttattacagactcactaaaatgtggtagctgcaggaatggtgcaattccttcactcgatcctccaatagatttccttgcactaagaggaacagcctgcataacagttattgtataaaatagtgttttaaaattattaagaaaatgaataagagcacaaaaaaaaaacaagtttgaaagcaatatcaactgcagcaagaatatcgtgtttacaaatttttaggatgtataataaaagctttaacacatcaaactcttaacttaaaagcatatgcattaatcgagcacttaaaattaaaatttgcataacctgaatgatacactgagaaagctcaacaactccgattgcaggccttagccacccatgcccctgagtggtgcgtggtatgattgccatctagacgagttacagatagaattagcggaatgacttagaaacatgaatcacggtagatgatagacaaaacatgcaacaagtaaaacaacatccaaacagcaaagaaaattcactgaacattgatgaataaccatgcctaaaagaaagctgacaagaaatgatatatgatggacagtcacaataaacaatctgaaagaaaatatggatttaataagggactttgtagatactgtttagaaatcaagcagttactggattaaaagcatgctagaatgaattgaacctcgattcagactgccaattacaggcataaaatacttcattctatttgtacaacatcaacaacagatatagagataaaaagtaagaatgcatagaattatagagatcaccttcattagctcttcaaggaggcgaggtgcaagttctagcacatgtctgaaatcggcatgcaaagatggagataaagaagctgattcccgagtcaaatgagcttgaatcaacaattccgtctgaattacaaaagcacaagataattgtcacgaaggaaaatactcttgcaatgatttaatcaaaatcacgagataaactacctta

SEQ ID NO: 243888 - DNA, 1786 bp, Cannabis indica
aaaaaaagaaaaagaaaattctagctgaaagtaatgtttttctttttgatttttccttctgcttttctctctctggaggattttaccacttgtgcttaataaatattttatcatttcttctgcagctactatatgagttatgcttggatccactaacatgtggtcccatcatggacttgttgagtacaaaaaagtatacaatttttcgtaaaggtgaaaagttgtgtacttgtctctagtctttttctgataaatttctactcttttaagacaagaaagtttcagaccttttctaattagtttctctgcaattgttttctattatggcagcacctagacactattggggttattccactccctaaacggagtagcaatcaagctcttcgtatcagttctcttcatcaggtttctgatatgtttaattaaaatagttttcttccagaccacttgtatttatgactgagatttacacagttacatgggcgttatataacatgactagcacaaggagggttgagtcattgttttgccacatttttgttacatcaaatcttatttttgtaaaccattccattgacttctgatgcaactatttatatgatatcatcaatggtcaccttaaacaatgcaaaaattcttattcttgtttatttgttatttattttcattaattagagagagatacaaacaggacatattgaacattaattagaggtgataaatgttattgtctagatttcacttcagatgattaatagttttaagcatgtattgatcggatttaactcagtcgattattcttttgcttacaatttcagagagcttggctgttgaaactcttagcaattgaattacatgctggtgatatgagtagttcctcacatcgggacacttgtcaaagtattgttggtcacctttttggacgggaaattattggaacggaaactgatcaagtcatacaacattccctctcactccaaattactgcagagcatgctggaactagaactattagtaagagtaaggtatacctaattgcttgagaaacaaaagtagatttgcacatctcaaagcaatttatttactctccattcttcagaagttgtaaaccttgctgttatcgtcttacttgctattaatattattttcttaactctattcttctttatttaactgctagataaagccaatgctcttcttgctatcaattaagatagttgactttgtttctggatctaatttaggtcttggagttgcttgaagtagttcaatttaggtctccagacacgacagtgaagctttctcagattatttcgactttgaaatatgatttgctggtaacagtttaattcttatgaacctattctaaaagggtgctgctttatttatttgttggccctgagagggaagtgggttggtgttgggattttcagcctgttgaaaattggtccatgtttctcaattacttaagtttctgatccattttggtataggttgaggacatacttggcaatcctacaatttcgggaaagggtggtgtctactattattcggagcgtggcgatcgtctgattgatctatcttcatttcgtgacaaactttggcaggttggttttcaagtgccatatatatttattttccccctttgctactgcactgtaaattgtggttcacagtgcttatctttttctttttctctctttcacagaaatttagttctactaatccccaattgagtaactttgggagtgaacttgaggtcaacaatgttaaagatacaata

SEQ ID NO: 243889 - DNA, 1522 bp, Cannabis indica
taatcactgataacataatgatttcttatgaggtaatgcattatcttaagaggaaaagaagagggaaggatggttatatggcattgaagcttgatttcagcaaagcttatgatcgggttgaatgggcgttcctagatgctatgatgagaaagatgggatttgatgagaagtggatccgactagttcttcagtgtgtgtctacggtttccttcaatgttacacatgatggttggtaagattggtccgattactccatcaagaggaattagacaaggtgacccttctctcttcgtatcttttcttgatttgtgctgaaggcttttctgcaatcatatctcttttgaagcatcaaaacaaataaggggactgtagagttgctaatggcgctcctacaatctctcacatgttgttcgcgaatgatagctatgtgtattgtagagcaaatgatagggataccaacagcgttatgagaattcttcagctctttgaaaaagcgtctggccaagttgttaattttgacaaatcttcggtgttctttagctctaataaaagtgaatctaatcgtgcattagtttgcaatctaatgaatatcaatgaagctgatgagaatagtctctatttgggtttaccttgtgtggtgggaaggaataaaaagccattttgggttttctcaaggataaactaaagaagagaattcttaactgagaaggcaaatatctctctaaagctggtaaagagattatgctcaaaaccattgcccaagctctccctagctttgccatgtcagtgttccttctgccaattgggacatgtcatggacttgagagtatcatgagcaactattggtggcaaactaagaaaaaagaaacaagaagtatcagttggatgagttggaaaaagttatgtcgccataagaatcaaggtggtatcggtttcaaagacttacgaagctacaatattgctatgctagcaaaacaatcgtggagacttttggtaaatgatacttctcttgttggcagaatttataaaaactcgttactactccaatggttcttttctaactacttctcttggggccaatcctagcttcatttggaaaagcctctttgaaactcaagacctcatcaaaagctatgctcgaaaatgttttggcaatggaactagcattaatattatggctgatccgtggttacctgatgacactaacccatttgtgacatctacacaccccggattaatcaatcaaatggctgctagtttgctggaaataaatgctagaagatgggacaatgaagtggttagtgacttgttcaatggaagagatagctctcttatttatcagattccacttagtccgattgtaagggaagactgctggagctggaagttagaggcatctgggatgttttcagtcaaaagctcatacaagtaccttactgctgctatagaagttccagacagcagtgataacaccagatggaaatcatattggcagctccaaattccccaaaaagtgcttcac

SEQ ID NO: 243890 - DNA, 1424 bp, Cannabis indica
atagtttcaaaaacaagttgtgttggtccccgaaattagtttttgctttttcgttttcatagagtttgtgttaggtttcaattgttttactttaatcctttttgaaaaagatatatctgagatagatgagaagcaactggtgctctatgctcagatggctaaccttgtcaacttgatgcttcagttgcctgatgtcaacataaaagagattgcagaaaacttttccaaggtactcttataaaaagtcataattaatcacagatttgttagaacaattatgctcacttcctaaaactcaacgatgaatttggctgtacattgtaagacagactgattgatcttatctttctctatccacgcagcttgcttgcaatgcacatacaatttgtgataatgaattgagacccctggggaccgggctgtttcctgtcatatcgattattaaccacaggtaactatatcagttcaataatgctgtttaacaaattttagttcattgatatgttttaggtaccattctcctgatttcagtctgttaaatgtttaagctgcttgccaaattctgtcctggttttcgagggaaagttagctgtcgtgcgtgctgtgcaacatatacccaaagattctgaggtagtagcatatgatttcttggacattaacagttttttattctgaactgcaatttcgtatccacattgtagatcagcttcatgtcatttatggattggaaaacaggtttcatgacagactgaaaaagaagcgatattgtataatgatctaactatggatcggaacatttccatgtttcttctgtgttatttaaccaattctaataaattgcttacttcctacattgaaaagtgcttaaatattgtgattgcatacatggtatttctatgtttatggttttcgagaaactaaatcttccaagtattttatcttatcttacgaaatctttgcttatatttatcgtcttctataacttattaggtgttgataagttacattgaaactgcgggaagcactctaacccgtcaaaaggctttgaaagaacaatatctcttcgcttgcaaatgcgttcgctgcatcaaattggtacatacatactaagtttgattctttccttcaaccgtgcaaagcttttgccttcagttatgttttgctcattttcttatatgtaatagttttcctctacttttttaattgatatgttactgaaagggtcaaccagatgatatcaatgaaggtgcaattgtggaaggttatggatgcaagaatactgaatgtgacggctttttactccgtgattctggtatttaggaaaaccgaaaagagtagaatgatagcaaataataaagatacattttggaaggaaactaattgtttctgtatacttgatttcaatgttcaggtgacaaaggatt

SEQ ID NO: 243891 - DNA, 3770 bp, Cannabis indica
atcttgtgtgtttttacttttatgcactgtttgttttctgggtttctctggagttacagagttgtattctgtaactacggaaaaactgttttcagtaccagtttcattatttcgcatttaatgaatcacttaattaaataattaaactgggaatattaaaatactgaatttcatatttattataaaccgcaaacaaactatgcaacattgaaaggtccgaattaaccagtccaccaaagacagtcttaccggttaccatgtacagtggtttggattgttgtccaaatttaaaccgcaatttgccaattccaataaataaccctaatttttatatcgagtttcatactttttaatttgataaataacattaaaaatcgataactaattgtgaaatgccacatttcaagaaaaaaaaatacataagataccatattggtataatgttaagcacatttatgccaaatagcaatattcttattaaaataatcatgtgctaatacgaaaatgctaaaatattatatcggtataattgaatattatatttgagcttaccacaatgaaaaatattatatcggtataattgaatattatatttgagctttattagtatttttgcccctttaaaatttgacactattagatcatgcctcttgtagcttgttaatatttttctcaaatttttttatttacaaaaatttagtccttttatagttctattatctaggttccgctccatcttgtcgtttaaatgctgacgtattttgtaaattagtaactttgtatcctgaactttgaaactatcaaatcgtacccttttaaataaaattatctatagtggccaaaagagaaatatttcgagctgacttcggtagttgaaaattttttttgggctcttaacctaagacccaacataaaaggaggatgacagaaggaaggaatgtgctagaaggttacgtgctttgtacccatgtccttaacaaagtaataatcttctataaacccatcgatctttgacacctccttgtctgtagtggcagtcagccactggtattcattctgggaaaaatagaagtatcctaatctgttctacttggggttggatttcaagttgaacaaccaatcgtgggtggaggactaaccccatcttgggtagcatacaacacaaacagtgcagctaggtattttatgcctttgggagtgaattgggtcagacatacatggtagtacttggccatctccttaaaatatggatgcaaatgcagcattgcatcttgcttagcatgaggtcctgaacatgcgcagtatccaccttcgggatttgtggcaagttgcccagggctaggcaggaatgcctccaccttctcgaggaaggccttcttcaaagagattagttaatctcttaaaggtaagcatggatggtggtgagacccacctagaacccttcagacctctagtttccagaggtcgagcctctgtgtatttctcttcacgtaatctcagcctgccaccaagacatctcccgcctcagagacaagttctctggcctcattgtaaccactaaaaggaagtgctagaatttcttcttcctcttcctcctcttctccttcgacctcggaggggctggtaggacagctctctcccttgtcctcaatctcttggacctcaatgtccccctcgacaaccttaacatccttgcttagaggcctaacttgctccaccccaattgttgcaaacagccaggcaagatgaggataagatactgaggttttcctcatagtttgcttaagttgtgccatcattctatgtctggacggtagctttgtctcaaaggtatgccacacaaaagtcacgacaatgtcacctacgggtagagcgcctaacatgagctagtcgaccctctagaagtgtgtcgaaaacacaaggtcgaaccctataacgtctacaccctttcttcagctcccaaataaaacgactgtacccttttccacatatatggtcaaggtattgatggtgctgcaccacaggctctgggtactatgtatgatcactgctaacttctgagtcttcaaaactagaatttgaaggattgccactagatgaagatgagtttgcgcctaactgaggatgattcttgtgaagaagttgaaggagatcctagtcgatataataatccttgcctagtgctcaccaagattcatctacaaaaggagggagacgaaaggtgagagctgaataaggaaaacaaggaaaaacatgtttgatatgccgaccaggctgatttaaatggaaaaaagaaggaatttcattccaaaatggaattcccaaatctagaggttcaaaatcacgaggaatatctggaaattctttggtaacccaagaatgagtgaatttagacaatttctagcaagaaaatggtacgggattagagaatcaaatgacctaagcatatgttaatcgaaattaaaagccataatttcttatcctctcaggtttgtcaagaacaatacaagaccatagaaattttgcagcacaaaattcaaaaaaaataattcatgtattcaacaaaaattgcataaagaagaggaaatgataactaactcacagtttgaagctttctgaatgtgcttggagggtttcaccgatggagattccaacaagtttccttcgaaaaatttaacaatgaaaagagaaaaaattctttgctctggttttttaaaagatgaatggctaaagaatccttctaaagcttaaaaccccttttataggttgttaggtttttattagcattatttttaggttaattttagtgtgttgttaattaagttttactctagtttggtgcaattttatgctttttggtatcttttattttgcaggtttaaaatagaaaaaaatagaaaatattgaagaaatatgaaaaaaaaaaatagtcaaataaatcaattctcggggcaagagcacctagaaattaattcgagaaaaaaattaaaagttctggtacgattggagcttttgaggaaaagaaaatataaaatttggaggagcgcctcaacattaaaaacccatgccagggcatgaaaggcataaaaattagtagagaatgtcgtattggactaaggaatgggtgtccctaggcatagaaatccaatgcctaagcataaattcatagaatgctcaccgccccttcgaatttcaagcagacgatattttttagattttttctatcatttgtatcaatgtttgactataaaaggagtgggcttcgatatttttcagcaagaaattgaggagtacaaaaattagagagcaaaatctatcgcaaaggcttttttaacagagttttcaacattcttttcttctctattttcttcttctattttgaattaatatgtgtgaatttgctacgatgaacatgagtagctaaacaatttattaaggtttagatggatattgtttggcatcgatttatagttttaatgtgatttaattttctcccaatttctatgtattctatttcattagtacttaattacttttaatttcttgatcaccaattaaatgtttatgattttgatgtgaaatctgagaagttagtgtcaattatgctagagtgaaataggaaaaaatttcaatataagacgagagtacctatgtggtttggatagcttatagggtttttatgtttaatgtcttttacatgtttaatttatcacgagagttgaaaatttgcatgtaattaaaatttatttatctgagaagactataaatta

SEQ ID NO: 243892 - DNA, 1569 bp, Cannabis indica
tgtttaaacaacatacttgtgtgtagatctaagatcctggtaaaataatttccaacagtaactttgtttgtgagaggtgaaccatataataacacattctatagttgtactcacatgatgtctttacttgaaaccatgtgatttgcgttgttattttctacatttttgactgatttgtttgttgtggtgttttaatttttccaaatctgcttgaatccagaatgattattgatctgatgaacatgataaagaaggtctatgctgctgttgagtttaaggggcaacaaaagaaaacccagaccaaaaagccaactaggtagccaacccttcgacacccgacttaagattagagattccaccaagacccgattaacccatggagggggaagcagtggagtggctaaaatggtggctccacctaacatcgttcctgacaatagggagcccatgatcacctctaacaaagacgacttcagggaaggaatggtgctcccaaagtcaagtgcaatgttaaagtgtgccaacactgctcctcctcatggaaggggggacaaaagagccaaacattctacccctggaaactccgaatcttctacagcgggaagtcttcctgatgggaaccaacaaacacccttgtcgaccaaaccaccaattaacaatgccaatgacaagaaatttgtccttgtgacccctaactctttgaccaagatgaactccaaataaacacacagccaatagaaaataatccctccagcttcgggcagtcaagccatttctacctaaacttcttctgcccatccaaccaaaccagcccaaggcctccaaacaaattttcccaacattcttcctctgccattcaaatttcatgtgaagcccactcatattggggtagagggtttggtgtaggttcagaaggtggatgcctatttgaagcaaaggctagtagaggagcaaagggtgctccggtcccggactgaccagctatccccggtgatgagggttaagattactgaaggcattctgaacctagggtatttagctcccataattgaccgcccaccaatgagttagaagttggtccctcatctgggcagggacttagaacctttccgtgctgaagccatggaggacatgcggtcaacgtagcggaattgactactaaaaatgggctatcattagttgttttgaccctgtgctcctagccaacacctcaagacaacaagccacttgggtatttcctgttaccacttttacctatttctatttcttaacacaaaatgtcattcttatccctcaatgctttaaattggttctagatagccttctttgtggagcggactttcacggagatgcaaatgatggatgtcaaactggacctttccctaactgcccgaaaagctctagaactcaaggttgaaaacatcaagaaggagtgatgagaacattagggccaatgagataagtcaagttccagttggcccaaagacgagggcgcaagcaaagagattcaaagaagaactcaataacttagtcaacagagttttaaaacaagaacagagtgcagtcaac

SEQ ID NO: 243893 - DNA, 1347 bp, Cannabis indica
aggatttgaaaggggcgggcaaatacagatgcaaactcaggattttggaagaaaatttggaaccttaagatacctccaaaaagttaaaaagaaaatagttatggagcattgctcactgaatggatacattgctaaggaacgacaacagcaaacaacatattgcagcatcagttatgatttgttgggcagtctggtgggctcgaaacgaactgatttagttgagtctcaatcgcatgagcttgtgtcatcatcggtcttgagtgatctgagttatggaaaagagaattggacaaagccaccgtttaatctggtcaaggttaatgtagatggagtagtctttgataaggagaatagacttgggtatgggtgttgggagggatcataatgcagtttcttaagagcaaaacagggctgctactttggaaaggtgacaccaattgtagctgaggcagctggttttaaggaggctttaagctgatgcaagagataggcatgggacagtgtcataattgaatcagattgtcaacaactaattcatgccataagtagtagtgtggcttctccttttgtcttgactattaaggactgtaaatagcaatgtcatcttattttcttccagattgtgtcaatggagtgagttctgctccccctaaattataatctccttgtctgattgatcttttgaattagtaaagtataacattttattcaaaaataaaatactacataatcaatctgaacaaactaagctataaaatttggcatgccttgactaatctgctaataatcagtggaagcatgaaagctatagcaagcatctatagcaagcatagtcaattttaaaagttcaaatgcaaatttggattgctgtcaagatagataaacttacaaagtggataagctggggaaaatcatactcttatataggttttactttttctagagcaataatatataaaggcctcaagtgggatttcaattctcttgatgtgttgagttagcaggtgagatcttactggccatctaaaacttcaggtgaagaagaataactcaatcagcaaatgatgtttacttcttagctccatgtatcatgttgttgttgtaacttgtattgtatctatcatctaatattagtactgactaaattcacaattacattttatatatgggatcatattcagaagagaaagcatgtgaagaagccacaaattactataaaaattgaaaacaatccatgctgatgcaaaagaaacataaccacatgtctcaacttggtggtgggacagagtggaaacatgtaatttgggaagaggagatttcattccatgttaatgacctaattgaatt

SEQ ID NO: 243894 - DNA, 5738 bp, Cannabis indica
gagatgtcattagaaggtctccaaccacaccagaatattcagaatctaaggctaacaaattatgggggtgttaagctctccagttggctcgcatcacttacaaacctagtgaagttaactttagtaaattgtaagaaatgtcagtatttggtttcaatgagtcaattgaagcatttggcacttttgagcttggtatctttagagtacatatccaacactaatatgagtgaagacttgcttggttcaaaaacagcattactgccatctctacaaacacttcggttgaataatttgcctaatctaaagggatggtggagagaggctgaagaagagaaacaaatgtccttcccttatcttccttctctttcaaaactaattataaagaactgtcctaaggtggcttgcatgccagtttacttacatttgaaaggaaagttgcatctagaggagagtagttggaagaggttcgaagagacatttagaatgatgatgatgatgagtagtaacgttggatctatattcccagcaacgtcttctttctcacctctctccaagttggaaaggctagatctaataaggattgatgatatagaatgtcttccaaactgcttcaagagctttacttctctcaatttcttgaatattgatagttgccttaaattgaaggatttgtgtccaggtattctacatctctcatcacttcgacatctacagattacaaattgcgaggggttaggggacatgctgattagtgatgatgattatgactttatgtggcaatccctaaatggaacactccaatcattacaactacggatgttgccaaatataatgactgttcttcctaagggtatccaacatcttacaagtctacaacaacttcaagtttactcgagtgatagtctaacaacaattccagagtggatccacaaccttaaatcacttcagagtctttggttatccaaatgccccaatctgacatcattccctgaaggaattcaaagccttaccactttgaacaaactcatgattcatacgtgtcccatgttattgaagagatgcaaaagagaaactggtgaagattgggataagatttctcatattagagacttggacttaaatccggatcccaacaaagaagaaaatgaggtaggatcatcaattccaaatttttcttttgatttcctaaataagctaaaataaagtacttataattttatttgatattgcagaatccatcagaccaccaaacaaatggatgcaatctcttcaacaagtttaggctccacaatattttgtatacaagaaatcaaagatagatatgtataggtaattattctataaatcccttctctctatatacgttctgacatgatttaaattactaatctcaattgaaaattatagcatttttcagacaaacaaacagagtaaaattaatgtgctaagaaaatatgagcccttctatgatgatgagctcgttttggtttggaataattcaagcgctttgagttgttttttgaactggattttggttaaagatcatggaatgatgatttataactttaatgtggttttactaatttagtagaggaaacaagttggtttttttggtgttcaactactaactactttttcttttatttttgatcaagaaagaattttcattaatcaaaaccaaccaagatacaaaaacactaggcattactatctcttttagacaacttcttgctatttacaaggaaaactctagcttttaaattggcttttaacagcctataaacatggttaactgccaaagacaagctcaaaaatgcaaaagtttctgttcatccagatactataaaccacacctgccattgtagcatgaatcaggtctgctattaagcttccctccttccttgagttaatccaagcaatccaataattgaactcagtcgtccttatagctctactcaaccaatttgtgactctttgaatcaaacgaatacagaaagtacaacaagtggttgtgattctccaaagttacctcgcaaaactgatcagcttaaagagctaaagttcagacgagaagatccctggtgagaaggtgagaaggtgagaatatggatggcttgccagagaatgaatctgtgttttgtggcggcaagtctacaccacacaactctgccatttcttccagcatataacattattctgtggatgatattttaactactaactactagatactttctttgaaggaatttgaaggtttacttttgcttggatcttttcatttcttgcatgaattacaaaataaatatgttcatgaaatctgtagtcccttctcttgtatgttctttgtttaattgattgattctaaattatgtataattgaaggagcaagagattgagagagaagaagaagaagaggaagcaaggatgaagggtagtcaagagtggcattgaaaaatatgacttttccaacaccaagagaagcacaagaacattggataggcgagagctttcgagtgaacttagtcgttcaaggtatagcatttgtaatttcgtattgatttgttgcttccaggaaacattcaccatctaaatccaagttactttatgtgtatattaggaaaagcctcaagttatcatcatcatcaattgcttgaagggatagccaaataaggactgattacaaaaatatccactggtaattctctactttcacttctacaaatactgctgaaatgacagttcaattcatccattatcttagaaatctttaaaacatctcataatgtcttacataataaaccatatgtatcaactttctaatatttacatttgcaagttaaaatctactagaggataaagtgaattttattcaatccaacacatttgtcttaactagactcaagaactatgagctatgcatttagaagcaaagcaaaaattattcattttcttttccattaatatttcggtatgcatttaataatttctttgttacttcaactcgtttttgacttaatacttttgtacttataattttcaaacataggcaatgtttatttacttgtttctagctctatttgcagtagagaaattcctagtgtcacaatcaatccattgagctgcactcatggctcagaatgttctagtttttcaggtatgcaagccaactgtgaatctgttacttgttcatgattataaatgcaatcaaatttcaactatttgattaagctttcttttgcttctaatttcaaatgttttccaacaggctgtactgagatgttgcattgattagagggtgattaggcctttttggatcagaacttggcttcttgaaactagaccgatttggtgtttcgaacccaaaaatagttagtttcttcttgtattcaagttttgtcacctaatggcatacttcttgttttgtttgccatgttttatattgtgttttgtacaaacttgtacaatacctgtgaccttgattgtaaccgcggtttttctctaccaaaaaggaggtcactcatggatatgtgacggttttctaaagttcattaatggaagtatacttagatttatttcatgtattggctgatcacaattttgaatgaatgaaacctgaggaagaaaaggaaaaatgattgaaaatgtaactagaataagagaagttttctttttgtcctcttttgaatcacttgcaattcattctttctttttttttttttgggttaccgataaagggtaaaataacataggtaacaaaagttacagtaggttgtgggggagatttccatccaagaaagttcattgtctatcctaagggcatgcttagctaatttatgagtctcaacattaaagttgtggctgacatgagagagagattccccaagaaaaatagacaataaaactttaatatcaaaaaagataactcctgattcattcaaataaactgtctgaccttccaaagctgagaccaaagaaagtaaattagaaaagatcctcttctctggaattcccacatcttgagctcaacacaaacctaccagtaaagcaactgtttatgcctgaaaatttgaaaaagaacatgcaaacgaaatagtttaaaagcaataagtactttaattttcaaactcgaaaaatattagaatataattgtaatagagacaactaccaaagggaacccctttggtttgaccatttacctgatttcttattgataacattttaatggtaacaaaataatataaatttaataacccaaaatgctaaagcggatcatatatttattttgaaaatatcataactataaaaattctttaaaatttatccaaaaaaagatccacttgaaattatttagttaaattatttaaatttcaaccacacttgctattattacattattttatacgttcataagtaaaatttcaagcataatcttaaaactaaaagcataatttaaaatgatatttactatacatagttgggaattgtatatattatccaatcatagctataagaaaacataatacctattatactagaatgatttaccttgtaatggtttaaataaaactgccttcatttgtttgtctgaggagaaaatgatagctccaaaactaatcacattttgaggagttgatatcgccgcattcacataaagtttatagctaagaacttctgtctctgcattactttgctcactagtgcacctagctgaacttcctttcttagttttattcctttccagccatatttcatcataataggaagagatccatatcttaatttggtgtggggttcttatagttcttttatgggttttcttatttttttcaaaccatattatccatgctgaaattaacactttttcaaaagcttttttttcaagtatttctgatgcatacagtaacacttctttgaaagttaaatcctcttttcggcttgcaagaaaagggaaattcatttgcttccatataccttgtgaaaaggaacaccagaaaattacatgtgcatttgtatcgttcctgaaaccacatataggacaattactatgagatgagctatgcctttgaagtagaccgttaaaagaaggtaaaatttcatgaaaacttcttcatccaaatatcaaaatttttctttagaatttgtatttcccaatatgaactccaccaaactgccatagctgctggtgttgaaaaagtcgcttgagttgttgtcgacgctggaaaaattattgaaattggcatcgtcgtccaaaaaattatcagaaaaatcactaagaaactaatttcttgatgaaaaatcagtttcttggtaatttttccagcgactatactaattctaacgactttttcgaagtttgttgtcgatgccgaaaaattcgttagagtagctgccggtgtcggaaaagtcgtcggagttggcattatcgctagaaaaatcaccaagaaggttgtcaagaactagtttcttggtgattttcccagagacaatgccaattatgacgaattttctggcgtcggcagcaactctaaggactttctcagcactggcagctactcttgtgatttttccaacgctggcagcaaacttcgacgatttttccggcattagtgagaaataaaattgcctaaacaaataaaaacattaaatatgaaatttaaaaacctaatttacatatatatgacatattaaataccataaaaatacctaaaaataaaaaaataccatataaattggttaaa

SEQ ID NO: 243895 - DNA, 2685 bp, Cannabis indica
gactatcgtgacgtgcaaaagactaagtgataggttatgtgcatgtatctctaagatgtgtgcctacactgaacttacaataaacatagctcaaagaaaattgagaacagtattctgtaccaaactacctttatttaaaatgatagttctcttggtttttctctatttcttcttttaacaggaaaaggcaagtagaatgcttttcatccgaattccaaaagaaatgacactaaaataatgtcaacaaaatttcaaatctcctaatacagggctggccactaactcagcaaatttattacaatataccatgcttacctttatacttagcagttggcttgatacacggatgcaaattataattaaatggagcattccaaagttgctcatctgacttgccatgagttggcaaatcagccgtcttatcctaagcaaacggtaaagagagaaagtgagagacaacctcatgtacctcatgtcaaaatgcctcataaagctcatgaaatgcattaatatataatatgctttctccaagcacgaaatagctattgagcctgcctcatatactgtcacaaatttgtgttaactagtagctgtataccataaacatattttccttaatcatgacaaactatagctgataagtaaatcttgtcttgtctgaacttgaagaaaggttttttcatttgttaatattgtataatttgtctttctttgaagacactaccaattgaaaagttagtgaatgtaaatgaagttgtatagctagccaaataacttgagaaaagtatataagtataataacaaatacaattctagataattaacataaatatatttcaagtaaaagtatagtttttttcctttttcagcattagctgcttctccaactggatgcactccatagcacctaatagcaattgggttttcacacaccaattcctgcctcaatgtaatttccagtttgcataatacaacaaataacaacatatcttatcgccatctatatctttgcaattataaatccagtctctattaaaatctcctatgaatatctaaaccagaaatcagcagaaacattctaacgcaaaaacccatacccgaaaaagccagcatagaaagaaagaaaaaatcaagcctcaacaaccccccactcccctctccaagagagagagatcgaagcatgaaattacaattaaaggttagaacagtaaaagcaaagctcaagtacctaaaacgaatgaaggaaagaagaaaaaattgtaaatttagcgtacctgatgggattgagaatttttgttcaaaaaaggctgtacgtgttcatcttccaaggaatttcttgtataaacgaagaagacgaaaatggagaatgcaaatatggagaaaatttgaaaagtaatggcaaaaggggttgattttcttgagaggaatctaccagttaaggaggttctgtagtgggaagaagagcctctgttaaccatttcagatgctgctacagatctctcgccatttcatttctttcataatcgaattctattttcccatattaaaatactgcattggagtgtggggagggagactataattacctgcgaaagggctcatcttagataccaatagatctccacttctaaaacctagtcataaaaagtggaaagtgaaaaagggacactataatctccactttttttttttttaaaggaaagcgttcatatattagataaaagatacttagacctcgcggtcattacaaaataggtgttcaagaatcgaggtaataggaatatctcgaaacctctggtggaaaaacgttcacttagcctacaaaattacagtttctactaatattagaaaaattacaactaataaacgcgggagagaacttaatacaaaaagagacatagttctcaagctcccacctggactcagtcctgttaagagcattgataactactttcgaatcactctctacaataataaacttcaagccaagattcttcgctacatccatcgcagagcagcaagtcgtcgcttctccacatagagcatcagcaaacaacactctagaagtatgaacccatatcaccttgccaaaatgattccttgcaaccacatcagtacacatagtgtccaaccccactttaacatcacaattcagctttatccagtcttgcaggggaggacgccagtcaatcgtcaagcacggaggagagcaagggaacacaaaagcatggtgaactgcaaaagaagagtgaatgttatcaatacacttagttatattaaagagacagttatcatgtactttatcattcctgatccgccagatagtgtcaacagttaacgaggcataaaggaagacttcatcagaattgatgcctttgtttttaaggtcactgatgaatttgacccagtcccacattcggatgccagtatcacacacaggaaaaatatcccagggagaggacctccacaaatggaaagccacattacaagataagaacagatgttccatagtttcattctcggtcccacacagaaggcacaacacctccttaataggaaattttttacagatcacagaacgcactggaagagccctggccaaaatacaccaccaaagagtttttcagtctttcaaaaaatttgtattccacagtctgttccaaagagacggggcaacctcacaaa

SEQ ID NO: 243896 - DNA, 2631 bp, Cannabis indica
actgtttattctttgaccctattactcatgtgattagaccattgtctcagtcgtatattcctgcaagatgaatcatgctaggttgactctaggaaaaaaaatatcattgacatatcattattttcctttaagggacaggtaaacatgtctacatttcatgagactggactgatgtttctaggtgaaaaatttttactagaacaaatgcccctagttttgtgatgacaccttgtcggtcaacgaaactaccagaaagagacaggtgagttgcaccatcacattgtgatgacctttggctatcttgttgagagcttcaaaaggacagttatatttattgctctttacttatctaaggtgccatgtcactgggcctttcagggttcgtacaggcgtgacttagggtaatcgttggattaaatgacctttggtctctaaatgccatgtgttgtaaatccaacggaagagtctgactcttatacaagcctttctaatattaaatgaaatctaatttttcctctaaattctcaagttctctcaaactttttcctctcaaaaaatttgaaaaaccttcattgataaaggaacttttctgaaggattctcacttaaatttgtttgagggatcacgtttagaaatctttctaagcattcagattcaaaggttatatttttagagaatctttcaactaatttgatatatatttttgaataatcgtgcaattttcggattttttggggctagaacattcatgaaagtgataggcttgatcatgggtaatgaatttctagaaaagaatagactgaaaaagagagttttctagaattttttttacgtaaaagtcaaatactcgcatcttttccatcacgaacttcaaatattttcctcttttacatagaacaccttgaatgtctgcacatgcctatcctataggttttcatttacaacatgaagatcagtatgaatactcgtgattttcttaatatcactttttgatttgattattattcgtgtgaggtcactcctccataaatttcacacacaacaagctgaaaagatcttttatcttttagatgagcgatcttttggacagtaaggtcttcgagtttgatggaggagcatttgttgatgaacctcaaaaaagtgatagctttattccaacatccctatcagatgacgaggttccaacaaaagtagactcacaagcttcatggtctttgggcgagatagctcgcatggttaaagaactagaagaactgttggctattaagtgtgagaaagtaaatccactgtgtccgctcaagggagttttattcgtccaagggatgttcatgatggagaagtcaaagaaatggggcaagactttgaattgcatactcattgggatgatgaggaagatgatgaagaagctgcaattttctgttgaggaagcacccccagatgaacactttttttgcaaggattttgtctcgtgagtaaggaagccttgtttgatgatgttccaaagtttgaaattggtgagcactagttatacaaaactagtgacgataaaaattttgcaccttcattttactaacccagcgattatcttgactaacgtcccggtggtttcagttcccattctttgttgtggagtgacgttcccatttaattcctttgtccaagccattctgatgtattattaaatttctcccttccaaatcactcctaacaactactaaatcttttgtggattctatgtgatatatatggtgtacacgcaaagaaaacctacaatcaaggacttttgctacttctacaacatcaagaatgttggccaccacaatggcttttgctgctttggtaagtgggctaactcagaggtcaacagagttaaaggtgcagtttctaatatgggagattatcaatcaaaatagttttatgtgtttttgctgcttagaattagaatagactttaattgccgccctcgtctatcgcagatgtttataattttcattatttttatttcaattgaaagggggttgaatttttctttatgtttgtagggaggccagctcaatctaagctttgtggggatcgtagttgtattaagcagtcttctaatagagatcgagattggcgtattctttgcaagtctacaaaagctcaagaacacagactaatccgagctgaccctagactccagtgagaacctatatataggaagccttctgagaagcaaaaactaaagattaaaaagcacttttccaagccaaccccaaaccagcccgcaattaatatgctcttagtattcttgtttgaaaataaacttattatgcaattactaacacttggtattatcttgcagatatgacacttctgaagaatgccccagttcttaatcgcaagtcaaaaacaaataaggagctcacaactccttcttgtgtgaaccctcttttgaagaggaagattgatgctatcgagactccaatcatcaacttgtcaaagaagcagcatatggttgctcatgaaaggggaagaaactttgacttaagcttgatctagcttttcttcaaacaagtctagactttgacattgcccgagcttgttatcatcgatgtttaagacattgtgacgaagggatcctgcacccac

SEQ ID NO: 243897 - DNA, 1438 bp, Cannabis indica
tttttataaaaaaaaaaacacgggagatgcattatcactttaaagtaaactaatgaatttataatgatacataataaaacgcatttaaattataaaaatatgattggaacactctcaaattatatacaattttttacatataataatgtgtaattaaactcgatcatacaattaaaagtgatgtgctctttacttaatgataattaaaaatagttaatatttatacaaattatcatgtgtaatagtgtgtacaatttaagtgaactagtattacacaattattgatcaacaaattaaaaagtagattaagctaccaaaacaattaattatatatttgacaaatagaaaactagatatggaaaatatatatttgatcgctacaacaaaattaatcacatactcattgatgacattagaaaccaccttcatcgatatacgtttgaactacattaattttaaccactttttcttcactgtctaactaacaaatttccacttgattttgacctcaattaattaataagacgaacaccgcttgtacgttatataagattataaatttacatacatatcaacacagccagctactagcctactgcacaatccaaataaaaaatattgaaaagtgcttagacttatttggatcttgtaagacttaattaatatccaagaatatcctaacgaacaaaatgacaaatttgttgacctatatactcatattacctcatgcagaaacgtacaattaattatgaagtctgaaaccaaatatacaacatatggcagagttcaattgtgttctgttgactcattcatgatttgagtttgattgtatgtagtagtagtatacgtagtcgaagtagtctattacaaaacccatatttattgaggtatatatacacttaataatttggttcggttcgtaataagttatatatataaaccacgattgttcagagtacatatagtttactactttttataatctgaatttgtttcatcaaaaatattaagcaattaataatggtaatttgtattgtggtgtatgatcatagtggaagctttcattcatttgtattgtaagttacataattgtgtgtataatatatatatatatatatataaatccacatagtattgactgtgattgattgttgttagatatagtaatcctccacacttatattaattaaacacgcatatagcctaacatcatcgatcatattaggcctgtgtattagtttttaagatttttgttgagtaaactgctagcaaaataaaagagggacgatattaccgaatgaagatttctgggttgagtcgcggactaagtcgctctctttaagacgttcgcggcactgcccaggagtgtgcaagcagtcggaaattgccggtcgtccccaggataaaataagtccagtcgttgcactgtatcggaacc

SEQ ID NO: 243898 - DNA, 2459 bp, Cannabis indica
gctttgacacaaatccttgctctccaccgcctttcacacactcaaaaatccgacacactctcaaatataatcctagtgggatcagtacctgcattttgagatttaatatgaaacttttaagctttgaaacaaagtccaaggaagaaattcagagagagagagtgagaaagtaaagggcttaccaaatctgaaaatggtgctttggagtagcctgccattgcatgagagatagcatgctcatcggtcatctcgttaagtgcagccttaacaccttttgcaagatccataacctcgcttgtcaaagctcgactattcaaatttatagattccagcaattcggggaagctagcatcgtgtggtgtggtgattcttctgactatttctaatgcttctgtgatattcccaccattgtggatcaaaagactgaaggctgcaactaccaagggattccgaggttggtcagataatgctctgtggaatgccaagattgaaaccctgaaaacataaacatattattatccagtcttccttgattggttctaacttttaatattacaagtctaaaatgagagtcaaagaaacagtgttcaatgacttactagctcactgaacttgaaaataaaacaaggaaatatatacaattttcggtatcctgtgttttgaactaaactgttattctctatttttaataatactcatttgataaaacaataccttaaactcaaatttggtcaaatatatttttagttttcaccattccttcacttacatccaccttaccaagatgatcaacaatgacaatatccttcaccgtgctggctattgaaaatattacagatatatttgacaaaattcaagtttcaggtacagtttactactgttttgtaaatcacaaggcacaaagtatgatatcttttccataaaagtagtaaccaaaaatgcaaaatcattgcaggactgggaaaacctcgaaaatgagcccgacccttcagggaggtatttattgaatttcagttttaatggaactctatggctaaggaaacgtttagtttcaatggaactctatggctattgaagttaatacaaacaattgtcaggaaaaaaggtatctaacataggagaccttagaagttaaaactatagcaatcgctatataagtacccaggaaggactccaataggagcaaaccacatgcctgactatttgcgaccccccttgggttatcttaactaaaggcagcatagagcatataatccaaaacagtttcatgcaacatagaaaagagaacccaagaagatctaataccacacaaaagcaagtgatccagtaaatcaaagaatcatcttgttatatctttactctataatggcaatggagtatgaaaggatttatcaacaaaacttaccataagctgctatgacatggcttgtcaggtgccaaaagtttatccatgttagaaaacagagactgcataaagatgaaaagagattttcttcagaaaagaataatgaaatactactaaatatcattgtaatgctataacaggagtgaagttcatgtctctatgtctaatcaggatgaggaaggagaacaataacacagtgaaattaacagcaaactggcggtcaaaaatcaatctcatacattcaaaactaaattctctcaacgagataatagatactaaacaattgggaatatattcatattaccagaagcatgttcgatcttgtgtcacgtcttcgaaaaccactgcgaacaaaataagctgcctgcagttttagtccatatcaaactagccattccatgattaataggtaataaggaaattcaaactctaattaatacctggatgggcagaagtaattctaaaagtccaaatttccataataatcgcaaagaagcttcagcagaaccatatgctagcatgtagttgacttccattagaagcctttgctaaatcaatttataaaaaagcaaataagtcacctagaaacatttcatgcaatatctgaaagcactaagaagagaaaaaatatgatggtgaaagaagctttaatcaccttgtcaagtctcaacactgaactagataaattcttaacagaatgggctgtttcccttgaaatgcgaaatcctaaccgggctgcgattcttattccacgaagaatacgagctacatataattggaaaaacatgttagcttggcagttttagtgtgttcatagttatgcatgagtaggaatcattgcaaagagaaaccaaacgaaactggaaatagaagacgcactgacgcaccacagtcctgttgcaaagaagtgcttgcaggaatcaccgttcgcacctatgcccataaagattacacgagaataaatgtatgattcagctagttaaacagaaatagtcaaaagccaaaactaccaacaatatagcgtaccttaaattttcttatatcttcaactcct

SEQ ID NO: 243899 - DNA, 1197 bp, Cannabis indica
agaaagaaaaatagttgttgacaaaattttattagaaaaaaaagttattcacaaccatacatgtatcatgtaagtagggttagtctagcttttattccttcgaaatatgcatacatctttcttgttttatttatttttttcttgaaatagatgttgttttgttcccttttattgatcaaaagtacacataaatattcgtggtactttactatagtggcaaaaattttgaaaacccaaatttcttttctcatatatattcctgtataagcagttaatttgtgttaatcaaccataatataagaggaaggagaaaaatggattaaacccaaatcctatataatcctattgctatttcctactacacaaatgttgaggttgaagaggaaaagttcctttaactgacaaaaacttatagtcctacttacttactcttcacatcaactatctttggtcatctcatctcatataaatatatatataatataatatatatatatatagctaggacggccccttctgcatggtttttgtacgtacagcatatactatcactactacttaaaactttaattatttactaccccagaaaagaactctcaatgagtttgatttataaaagaaagaaaatacaaagtaaaactgtgcttgacaagacccttgtgttgtgtagtgtactatactttaccataactgttcaaatcataacaataacgtcattccttacagccgacacgtgtcagagggcactgttcttttcattggccagtcttgtccttgtaagaacaatggatcgtattcgttcgtataccctggcctttaattagaataagaaaatggaagaaattgtgaagttgttaaccataaattatagcttttattatataatgatagtctgactggtcagtgatctagtgcatgtgcatgcatcgttaatgtgatgcgccctgctgctgtggcgtgttggcgcaaagtggttgcgcgcgcgcgcatgtctcaatgtaaagggcttgcttttaaaaaaaattcctttttgcctgaattaataatgacttttgtgattcatgtggtgtggtggaaagtaattcattaataattatgcacatcgtcattttgatcatgagttttggtaaggtggcttcgaatattttcgtatacaaacattataatcaaaggtcatattcattgtaattcttcctc

SEQ ID NO: 243900 - DNA, 2686 bp, Cannabis indica
accaaatgaacataggtagttaagatattaaagggtgaagatggacatgtggatttgaagccaaaaactacttcaggagccgtgagatcagtgatgttagatgcttgtgatgtggaagattacacttgttcaacttacttaaatgacctgaatcgtcatagacaacttgttatggagtgaaaatgagtcttttttcttttgattattaagctctttacgcttcttgttgcttctttggtaacctgcttttattgttgttacttgtttttgtgggaatattaaaacgggtcatgggtaattgggtatagctctgttcttaatgtgggcgtgaattgccaacttcactaaagttgttgtctgtataaaattataagtgaaaaaagaaaggaaaaaaaaacatgccacttttgtttgtgactgaatcaaaatatacaacatttcctttcttttttctttacttgtttgttcttacgtggttgatctatgtctttgaatcttatgacttgtatttgaacttataataaattacatatttaaaaacaaaaatgaattgtaaacagagaaaatcaataatggtctggatgggcgtgtgaaaaggaaattcaaatttgaagagttctagacccgtgatgagcgtagtaaatttattgttaatcaagcatggtctatagtgcaacatgagtggcctctttcctgaatattttgaaggattgatatggctagggttgcctttattcattgaaatcgaaatcaatttggtaaccttgataattagattaaagatttggaaagggagttaaatgagttgcaagtaaaaagggttgggtttcgtgattggtgcgatgaacatgctctaagaagttccttcaaagcaatctattggaaacaacgttctagagtctcttaacttaaagaaggagataaatactctaaatttctcaatatctctgtcaccataaggaaaataagaaatgacattaaaagtattcttgacaagcatggtaactggattaattctagggaactcattggaagagagttctctaattttctaagcaacattttctgtgggaatggtactacccctgatgttgatctcacggttttgattactgatcatttaagcaggtatgagtaggaggcccttttaattgtttcagattgggaggaaattagaaacatgctttttgtagaaaatagtgattcgaattatgtgtttcgatttcatagaataatacatatttatatacaaagctaggagactaaatatctactaaatatttactaaatatctaattcttttacagctaatatatatctaatatctaacacttttcaagatgagtagccttaaggtgtcaggcccaattggcatgcctattttgttcttcaagctgcagaagagaacttctgccaaggagttagtaattttttcacctctggaaaaatgcataaaggtatcaattctttcaatgtagaattgatcccaaaagttcaaaacccccaaaaagtatccgaattcagacctatctccttatgaaatgtgatgcataaagttatttctaaaatcatttctaataggataaagttgaacctccctcgtctgattagtcctacccaatcaatgtttgtcttggggaagaatattcaggataacaatgtgctacttcaagagatcatacactcctttaagcggaaacaaggaaaagaagctcttttcgctattaagatggacatggtgaaggtaagataagttgggactttatggacctagtgttgaaagcctttcatgtctctaatagtaactacaagcttatctcccaatgtttaactacgacctctttaaatgtgtgtctaaatggtgcgtcagttagtaacattaagctaggattatgggtgtgtagaacgtcatcaactccaattacaaccaacagatcaattcacaactgatctaatagaataggatatctaatcataattagatcgaatcatatgtaaattatgaaaaatccaattttatcacatcggttgttggatgggacatacgatctaatgaacaatcgaaccgaaatgatataattatcatctaatagtcatccaattatatttattatatacttattattttgttttaaaaaatatattaattaatttcattcttaatatgcactttcacatatgagatcacatcaaaaatataaaatatcacatatcattttcctaaaagattaaatttaagtgatttattttataatttatatggtatttgcattttatgtagtgaacttgtttgttaagagtgatgcttatttggttggattggatttgtgttgtgttatattttgattatggcatatgaaaattaggttagactaaattactagtgcttattatgtatgttatatttgcattttattactatgagaattagattttaaattatgttatatatatatattaatgaagttcaacatactaaaactaataaagattggatggatccaatgcaatagaaaatttgttgatgcatccaatggttagaactgatccaatttaatgcatctattagatcggatcgaatcgtatcatttgcctcaattcaattggattggatcgattgaaaaaattcaacatccaataaataattagattcgatcggttatgaccaaatccattagatgtgatt

SEQ ID NO: 243901 - DNA, 1434 bp, Cannabis indica
ggtgtgcttccaatggacgatgaccagctattgaaggcaacgaatatattaataaaggagcagcataggtggccgtggctgcacacaataccatgtatatgtattatgtgtatgtgttgcccacaaaatgaaggtcgactctgcaaatgacaccacatgttagtggggtatcatgcatgcgtacttcgtgttgagccaaaaactatgatccacttctcttctcttcaatagccacattaaaaacagaaatcctaaaagacaatattaggtgcgtgaaataacacatttaaaaagtacataataaacactactaataccaataacaatactgtaaacaataatattaaaaaccccaaataactcatcagcatgggctcaactaactatccccagttttgcaggtatatacctcatccggccccttgtttctctctctctctctactctctattatatattatatatactcatccattatatataagtatattatataaacaaagtgagggaggtagctatagctagcttgagagagagagagagagagtaatatataatggatatagtattagtaatggatgggatatttgggaaggttggaaaacagtgctacgcggtgctatgcttgggagtgttgcttgtctccgtcaccatagctcgttatgtcgcccatgattcaaacaaagatcatcgtacccgcaccctgcgccgccttgttgcgctacacggtcatcctcttcgtcttaactaatagtataactactctaaataattattaatcctttccctatatatattttcagagaaggattataattatatgctgcatatcaatgatgtataacttaattaattagtatattttgtatgtactttgtgttttcttgtatattgtgctgtgtttgaaggctgaatactgaattaaataattgtttttggaattaaagtcattaatactaaactatttacaaactataacatgtcttttatttataaagcctataatctgtcaaaccattaatacaatttggtctaacaaataaaactctatttttgacactttcaattattctcttgtaaatcaattcgggtaactttcaaagatgaataggctttattcctttttaattagacaatattgtctcacatggatcaaatgtaaaaatattgagtcatatataagaacatgagctactctactcatcaccaattgattttgagataaaacctcatgattcccaacatgatattaaagctatattcctagcgggtttttgatccacacctatcaaagagttagccagccgcaagcgagcaaaatggtactcccagccacgaacaaaaataagcgatagccaccatccactactacaaatatcaaaattcgcgacggtcctaaaaatgattttttttttttgggaccgtcgctaaaaa

SEQ ID NO: 243902 - DNA, 1444 bp, Cannabis indica
tataatttattataaaaaaaatattacaatatatatttagtttgtgaaatttattttttttctttatgagattgaattatttttatgttattggaaataatatatatatatatatattatatataaattttatgcggatggtgtaaataaatagcatagcgaacaaaataaatgacatgatgataaaatatatgaaaatgttcattttattcaatcaaaaatacaataaaatttaatatttaccaattaataaatatatttctttaatgaataattattttatttttatatataatattttacattaaatagatataataaaaaatactttttaattttaatttttttaaataatatataagattcatatacttaactaaacaatataattcgaatataattacatattaccctacataactaaacacaatttaaatatttcttataatcatattccctgataatatttcttataatcaaaattattaacatctcttaacaaatgtcccttagtattatctgcatattaatagaatataatatcatatgatcatatttatgagttgtgttattcatttaggagacaaatttatgacgcactaactactacattatcttccttaataaaaaaaaacaaagaaaaaaactacatatcccttaagaacaataaaaaccaaatacataacaatctttgttgtgttatataaatatgtatctaatcatgtaaatatattcttatgtatataataggaaattaaccctatctcctctccacacatggaaagatgtaatcattgtattaatattcttttcttataggttgtttcatttgtttaggttttttcttttcattttattgttttttaataatttatttctttaattaagtaatatttttaatagttaaagtttttttatttttcagcagaaaaaaaatcagtttaaagtttttttagctattatgtttattataaaatttctgattaaaagtatttttattaaattatattttttattattttaaaattaatacaatttgtttctataattttttttatacacttctagtttttaataatttagaatcaatttatattatatttttaattgggtgagtatttaattctaataaatgaaaaaatttaaatgatttagttgtaaaaaaaaaatttagaaaatgtcacacataaaaagaatttttgtttttttttttttggtacgacgcacaagaaaaaaaattcacataataatccacataacaagtaataaagtaatttaaatcacaacttaaatttaaatggaacaatccaaacattaaaaaataatatacgagataattttaaaaattaaaacaaaaacaaaaaaaaaactttttaaataaggttaaaaaaacaaactaataaataacattacctaaaaaattaaaattaaataatgaaataag

SEQ ID NO: 243903 - DNA, 2415 bp, Cannabis indica
aatgatatatagagcctttttattcttgttttcggttcaaatttctcttattgtaatattaattaaaagacacatcacatgtcagtactttataccattcacaaaaaattgtacaggcttcctggaaagggtatccgagtcccttcatcagcttaatttagttgataattaaaagatgttaacatatggttaacagagtttgtattctctccatacattaacttaacttttctctctccaagaatattaaaagtccttattaattaacctctccttaacttataattaaactaaaaaatcatcttctcattgcacaaagttatgatactgagatatcgtatatttgtttcccactttgatcaagatttccgtgtaattctatattcaattgatttatttttcaaacatggcaattagaaaaaatccccaaaatctaattaaatctaaaacaaaacaatcacaagatgttccataaaaactaatatttacgaaacaatcacataacagcctaaataagttattggacaaatgttcaatgaaattattcacttatgctcatgtatggtcaatcccctctcttcgtccagtactcgtttgaattcagaatcgtgacttgaatggctagaagcaatgtcatcatctttagtttcacgctccggtttactcaccacataatgagtagcaaagaaactgaaatacaccaaatttagagttgccaaaccagctatgatgaagtagtagtagtcaagtttattcttgttaagatcatggtttcccaaccatggtgatttacaagtcttctctgttatagaatgtattacattgacgatggccgagcctatatagctggcaatggagaggcaaaggaaaaatattgcaccagcaacggttctcatgttctctgacaattgcatagtgaggaattccattatggcaactgcagcaaaagcttcagtcaatccggataagcagaactgtgggaaaagaaagaatatggtagtcggcgaaatgaaggtgccccgtttcgtggcagcgcttcgacgttgtctctcaacaatcccagataccaccatggcaagaattgacatgacaatgccaattatgattctctgcctcatactcaaccttttttcctttcctgtcatcttttttgtcctgggaatgtaaatcatctcatagatgtaaatccatatggaaagtgcaaccattgagacaatggtcatccaccctggtgggaacaagaaatgtggtccaattcttctgtccatttgcatagcttgaagtaccccaaatgtgttgttttggtccattgtcatgaatgctccaatcactgaaactccaactggcaaaactgctaataagcacttgagttgctcaacttgctgaacactacaaagtctccactcgtttttaggcctgccctcattgtctaactcatctgggttagtgattatagcagccttatcaaaaaacttgaacctctcagtacgaggaagtttcaactcggaaactccagcagtcaaaggaggatcataaaaagaattgtcatctgtctcgattgggccaacaatgcgtctgcgctttcgaaaggcagctgcgattaccttcaatatgtctgtgaagacactcccttggggagtcacgttgatgtaagtgtggcgaccaagtaagaaaatggatatagagaagaaaagacagatggtggggatagcaaatcccaaagtccaactcacactagtttgaatgtaaaccactgcagtgagggccaaaatcaaggcaaaggtgaaacaaaagtaccaccaattgaaaaagctctccatttgagctttccctttggctgttcttgtgtcgaattggtcagcaccaaaggcaatgttgcatggcctaattcctccagctccaatggataacaaaccaaggcctgtaaagaggatccccagctgccaatctagagccttggggcattctattgttgattccggatcgcaatgagatggtctgaatgcatttatgcctgcagttagtgttatgatccccatgccctataaaagaataccatgtatgttaatagtgttgtctcaataagtagaactacaaacagagttgttaaagtgacaacttttcatcacaacaaaaattgctgtaatatttatgacataacaagttgtcactaacaaaaattatttttgtgttacttgtagttgtagcataaaaatggtgaggtatgtttttttagtgggcaaatttttcaattttaataataataaaaaaaataagaatttgttaggactaaaagtaggagtttttatggtagtctcctacacattttctcgatcaataatttgtttattatataattttttttatactgaaaacctgtataattaattctcttttttcaagcctggataattc

SEQ ID NO: 243904 - DNA, 2042 bp, Cannabis indica
tattcaatcgaaaaaactgaagggttgggcctttggaacaagaacctaacgaggctagaagtgttaaaaacttagcaatatctacgatgtaaaacacgaatatctattaagttactaaaaagaactaagaaaaccccgtgacaagggtataaattgtctctgcacatccaaaaaggggaacgcttgttccccaaatgaaacaaaaataaaaagaaactgaaaaagttcagagcagttaaggctgagcaaagtcatccaatgctagagcatcttgagtttggccctctgggagtgtagactgggttggaacaggaacctcagaggctagatgagcgaaattgtctatgttctcacctataaggctagtggttccaggatctcaatatctgaggctcgttccgtgacttgtccaccttctccaatgccaagagctgaggcaaaagttaatatctatcttcatcatctaagagatctaacatggctttttatgctgccagagaggtatacactgaatgaacaaaagcttgctccaaagccttgacatgttgagcctccttctcttgaagacgtcccttaaaagtggagttttcaccctctaggttggtgattctctgttggtattcttcgcgagccttagcctccacagccagtttgttctctgcctctaaggctctgttcatgacttctgttttaactgcttctgccttctgttgcaattcgagatgaagcttcactttcttctccatagtagattcattgatgaacttgtcctcaatgatcttggcttgcttatcgtactcctgagacaaagtagtgaacttcttttccttctcatcaacctcatgctaggcctgccgcacgtcctccttagcctactgcacttcaacttctgattctttgacgcagaagagggccttggaatgcaagtccttatatttgtctctacattccctctctaccttggcgaccctcttctatcaggataaagacttttccagagatttagagaccatctgctttatggcaacctccatatttgcatcggcttcggctaaggccctctctaccttttctctgttttgttcagcattggcatgtttggccttcaatcctccaagttgtaggccaactgggtgaccagggagcagctcctctctgccatcaaactgatcttcaaaaagggaacataagtaagttgaaacaatttggaacactagaatctattaagtcagaggagtgtcgattttacagcattggcttaagtcctcaaaagataagtaacatatatcggctccctgctatacatcacgacaaatctatcagctaagcctacagcttgtggcagcgctctactccaacagatctaccaagaatggtgacaagtcagtcccaacgcatggacggactctctctcctagtataaccctgtttatgataggaggagcatcctcgttccacttgtcataattaatgaactcagtgttgtggctggaagagattctggtagatgatttactcatttcctcaacctcacagttgccctttggtggtaaaatttatccaccgcttccagtctcacttctgtcaactgtaccgagctgacgagaagtatgaaaggtgctggaggcaacggaggcaactcggtcctctgcctggacaataagattgaggtggtaggaaccactttaggtgttgggggtggtagtggaaggtcttgcttgtccctcacaaacgagtgcttcgtctaggtggccttccatcatcaaaagaggaggttcccttccaggatcgagagtttgtggcctgcctcctcgaagctgcctgttgcaggactttctctttggtttttaccctagccttcttgctaacaccaccatcagacgagcttgcacacttctttttgggcatgatgagcccatcacaatcataactatcttctccaaaattctctaggggaacttgatttagaggttcctcaaacaaagtggaatctgtcaggtccacaatgacagtagacgtcgcttccatactcagagccttag

SEQ ID NO: 243905 - DNA, 2366 bp, Cannabis indica
aataaaattgaaatctacatcttcatgtctcgtttttaaaagtggaaggcccaaatgttttatattctcgtgcaactcattaattcccaaaagctttttaatccctcttttcattaccaaaagcttgttaatttgttgtcctgacctggaacaaaatttcacacattgctaataattattggctatcttttatgtttccattagtgagggcctcctctaagagcttagagagaattttcgcgcccaaataaacaaataaggagaaataggatcaccttgctgaatactatatggaataattcttctaaccgaacccccattgagacatacattaattgagggaactagttgagatatactcatagatcctagatccaattgcaaaacaccttggggctcgagtccccaaaaccacaaaacacaaaattaaaaatatattttgtaattaaaaaatttacatcataaaactataaattaaacatagaaaaagatatttttcaaaattactcttttatcttcatgtaatgtaatgaattttatttgatttgtctattatcatatatttcccttttgaactattctctaaaactgtttcaaaaaaaaaaaaagaactattaaaaaaattaattatgacttaaattttctttattctaaataaactcatgtgcatttacggacataatatgacctacgtacaaatataaataatcatgtcagatttatattatatatgaaatcaatattttttaaaatgataaaataataagtagaagaaaaaaaataaagcatataacttaaaatttcacttgaaaataaagcttacagaattttcattgaagcctcgacataagcaatcgaggtaaatagtgtaagcatggagtacatagattaatagtcatactacattaatactcatcagtattaataccactcaagtaattaattagtctctgaagcaagtagagcctcatacatagcaaaggcagaaggagagatggtggtagtgcaactttttgggcatttcttgacctcatatgagcagaaacaagttgggcacaaatcaagggagcaatcgcaatcatcttcactgcagcctgcagggcagtcgccttctctagagttgttttgcttacacaccaacttcccatgcttatttacattgcagtagcagctacatgacgttggtcctgagatatataatcacacacatatatatatataaatgtattataagtagtgaccttttaacaagtgtacacatgaatctattgaaattaatgatacttaaagataactaatttgtactactaaggaagagatttaattagctttgaatattttatctttctcattctctgcatgcatatcgtgtcccttcaaatgctatgtaaaattattaatattgattttgtgtcatattctaaagtattattagttaaagatgcgaaatcgaaaccccattttctagtagagcatggcctccttttcttttttttcttccacgttgtataaattatgggtcgtctcatatttttgtaagaaggaaattaattgcggtaactttgatgtgaggattgttttgctagattatgacattttacattaataaaaatacaaaatacaaaatacaaaacaaaacacctagaactgtgtcgacacgtaccggctggtgggcaaagggaactaagagaattatcaaaaacgcgcaaaaggttcacacgagcatgagctgttgtagctacaagagccaacagaagaaatgcaaaggaaactttgttgaaagccattaattattggtcgatattggtttcgaatgagtagtaaggagtggtgagtggcaatatcagatatattataatattagcaacgaaaatatatattatatatagagagatgcggaggtagggcattagaggtaaggactttaattcttttgattattttaattttatttatttgtccatgtgaatctcattttctacctaccaaagtttgtttcatcattgtcattatagcgtggtggaccaggaagagttctgtttcccagaaaaggagtagcactttttctactttttttcaaaaatacactccttttaagaaagtaaagttcattttctgacagtttcaattaaatatatggtactatttattattttctaagtagcatgcatgtgagtattatttcttccacagatcaattttctttttcctactaagttataatttttgggtaccaataatgcctttttttttttcaaaaataacaatcagatatatactgtaggaataccaatggtagtggtaccaatactttataagaataaattgaaaaatatctctttctttttatccattaataaaaaata

SEQ ID NO: 243906 - DNA, 1267 bp, Cannabis indica
acatgatagaaatctgaaatttgatcatgatctcctgcattttaaacataaaaaaagtaacagaatgagcagaaaaatgtaaacctttttcagttcagcctcaagttcatctctttgtatctcaagttgtttgatctctgccaccatttcctaaatacaaaaaataagtcacagctaactacttaattcacctaaacaccagaagaagataaatcttttgcatgtgatttcctgcaacaatcattgagagttttgaggtagtaaatagcgcatgccttctcaatatgatgaacttcatctgatttagctacacgaaagctgagagcttcttctttatgagatctgcggaaaatatagagaaaatgaacactgaccaactaacatatgttcacgctgtaaaaactcaacacaaacacccacaactagccaagaacaaaacaatatgaaagaaaaaaaactcaggctaataaattcataatgtaatctataacaatagtactaaaaccccttttatactattctagatcaagatgactttgttagtttgtaaataaaccaagtcttggttagttttgaacgttattggctgcagtcaaaaactactttaccagctaactagactaagttagattaaacctgtgatccaaaatgcgtttttcagcttttgaggtagagttggctagtgactccaataatattttgagtttataaacctgcaatgcagcatgaatataatctctttagatccatggattgaactctatttcattaaggcattaaagagtagtggtatagcattgcatggattgaaaccttttcagcatgcatctctggagagtctccatttctcagtaacttctttttcagcaagagagcctctaaattgaaacatagttgaatttcagcaagtgcctacaagaaaacgagatctttaataagaagctaaagtacatcaaaatgtcacaggtaagataataagaaagaagatgaggtggcccactggttcagtttcaagagttgtttcaccatctttattgtttagattattaagcttttcctttatgctgcagacttcatcatcgattctgtgagttaaaaatgaaaatgttagacagtttcacgttgctaatgtgtggaaacataatagaataaataagatgaataggctacttctcccattgccaattggttttgagataaaactccattcactttatcccatgatgctcaacatggtatcagagagaaaaaataaaacttctaattt

SEQ ID NO: 243907 - DNA, 3088 bp, Cannabis indica
attatttttattttatttttttttgaataatttacatagaccactaataaaaaaaagtaaagtattcaacattgtcctttaacccttatttactaaaaaatcttcatatgaaatatcttacacgtggtaaactttattttttaagaaacacttttataatatttttgtttaatgtatattgaaacttggacattgaacttgagaaattaatggtcgtcaaagatcatcctttaatatattacaatagagaaaaaaaaaaagtttatcgacttagcctaaataattattagttttttaaagtctaaaattactccattgggaggttattgtgctctaattggctagatgtgattatactatcaacttttacatttataagatagtgattgtcaatttgttttcttttaaaaaatttgctctttttgctcttcttttttacaaaataactagtaataagttaccaaatcaatgtgatatgggtgaatgttattttctctctttttcatatgtagatgataaaaaaagatgagatataaattattaggatttcttaattgcatcgattgataaacaaaatatatatatgttaatacaacataagcaaccttcaagtgaataatatttatcgaaaactatgctaacatagtcatacgaactatggtaaaacaaattagtgttatttgattaattaattgtataatcaaatgtatttaaaactttaattttgtatgttcaatgtgttcttcaatcattaaacttactgagaatgtatattgggatgatgtaatatggcaggatggactttgaagatagaattaagaaccaagttaacgtcgatggtaatgatgaaagtaatagttctactacaaaagtagaggaaggtaaatgtgtcactctcacaaaaaatatggaatggcataatttagtagagaatattggcctatcttcaaatgttgaggaaataaggagggatatgttatattagggaaacgttttcaaagttcggatgaagaaaaaacttcattgttagctactcaaaatttatgagatttggtgtatgaaaaatgtagttgaggaagggtgtgaatggtaatttcaataggttactcggatgggtttgctcaagagaagagaagcgaaattattgactggtatcacaaaattattcaaaaaataataaaagggaaatttacggcaaaagttctcaaaaagtttaatttgatacagatataagtccctaacttcgaaaaatagctgtaatatttattttttaaaaattaaaaacataatttagaccaataatatttccacacgtgacaatttataaaagtaaacagtttaattaaaattaggactaacggacaaataaaaagcatgaccttgagaactattatcgctatttttcgaggttagggacttatttgtatcaaactgaactttttgaagatttttgccgcaaatttcccaaaataaaaataatgtaaaagtaataaattaaatatttgtataaaacaagagagagacaccttatggaaaaaaaatgtaaacaattaactgatatattccaatagtaacctagctattttcattcaagaaaaaaaaaagaccaagctattttcaaaatataaccttaattatcttattttatttagtacaatgtatctttgttttttttttttggttaaatgtatctatccttttattttattttaattttttttaataagtttatatcctttaattaatcctaattaagctccatttgtcagaattaatggaagtgtaaatcttattagataagattttaaatcaataaatgtttttgttggaactaatgtttagaatttaaaggctcgtttcgatttcaagatagatttcactcattatattattctcaccaaattaaaaataaaattaaaataggagaattatatatttttatattatgtaagtggagtctaaaattttaattaaaaatggtaaaattagaaattaaaatgtaaactaacacataattatattaaaataactttttatgtaatcagtgatgatgagtgacaacggaaatcaattggactttcaattcattgattactcatatcttctactccagcttctgaaaatacataaatatataaataatttctacaaacaaacagcaccagtggtctagtggtagaatagtaccctgccacggtacagacccgggttcgattcccggctggtgcaaattagctgtgaagaaatttacgcatctgtgatggaggggtccatcacctttatctggattaagatgaaatcatgcgtttctgagctttattttttttccaatatataattgttatttgtttttccttggtattttcctttctaaaagagaaaagacaatcgtcattttaatcttgtgtttgtttgcttctataacaaaatagtcatattatattattatttgtgctatgcatgcattcagcagcctaaccaaaaaaataaaagacaataatcattttcatcttatgtttacttgatctataacgaaacagtaaaattatttatgctaatggatttaacttgatgtacccatggtaagtagtaaatctgtccacttattgttcactgaggtagcctttagcaggacttgatttactgtatacagataatcattgcaaattgcaatatactttcatttttatgcaaattatggttctttcatttaaaaattgttacaaaacatacactacttactcatcaacttggcaccaaaaagaataattgaggcgtttttatgtaaagactgtattataaacagacgtaggtgtatcaaacactactactgtcacagtggtaattgctcgctacattgaccagggttcgagtccatttggctagcttctgctatgaggatacgtatgcactaacgtgaaggaggggttcttcacagtcatctgaattatatgatgaaaatatgtgcgtttctgtagctttttatttatatgtatttatgtttttttatagttaaacaaattaaaatcgaagtgtgtatacataattgacatatcaattttctaggttgcaataaacaaatagcacc

SEQ ID NO: 243908 - DNA, 2816 bp, Cannabis indica
aaaaaaaaaaaaaaatcttttctactttatgaattttgataagaaaatcttcaactttcggagtgaccaaatcaaattaatttccatttaaagcaataaaatattaaaagcctcatttattatgtcagcaaaagaaaaaacacctatttaaaaagaaatacatcataggtgataataggtatatacgggtctataatagtgtgttagggacccacttacacattctattttttattatttatttttaaatttttttataaaatacatcaatataatttttttttcttttaattttttatttacacaaaaataactttaaataataaatttattcttttaataattgtatgatattctttttcttattttataattaatttataattattgtgagttaattacgtgttatttttaattagttttttatctttaaataaacaaaatatatttttataattttaaaattttataaaaatattttattatgaaaaattttaaaatgtaaaaattataaataaaacgtaatttttttaaaaaaaaatttctctttttttataaattacttagagtatttttataaggcacattactaattagcaccacctaaaaataatattttaggattaattaataatattacataaaaaaatcattataactggatgaaacaccttgaaaaaattactaaacaccattcttattttttaatatctctttaaaagtacaaattttttaattaaataattaattatttttttagtaaataataataataataataaaaaatgttattttccaaaaagagccagcactttctgaccaatctcagaccacgtctctgctcccttatccttggtaaagcagctgaccaaaataaaatgctgttcccttgtgggacccacctacatagtacatacgtacataaatacgtatatactcatacatacatacatacatacacacatacccatgtatttccattttaacgtatgcctcatacatatatgccataccatacatgactatttgcatagggaattttagatggtcatcacttatcattattatggtttgtacacgagggtaatttagtcttttcatatattttgttcgtttgaaaatcgaggaagagttcatcaaagcttagtgcgttatatttcgagcctcgtgctcaaattataaatctgattttttcttttctttctctctccaaatttcccccacctattatccattttcttttcttttcttccaatcacaaatggaatgtacgatgaagaaaagagactagtatatatttgaataattacccttttgaggtatatatttctggtattgtgatgagagttgatcaggaaaaatatagttaataataatactaataatagaaagagatatcatttttttttgatttaagcgtttatatattacaacatgttttacctgggactcgaacccaagacctccaacactcacacacccacctatggccacttgagctagccccaagtggtatagaaagagatatcatagttaaccatttgttataatgattaacgactaatgttaatttgtgtaccttaaattattctaaatttatagatatattcatttgatgtgtataacaagaaataatatatattgctaataataattttgcccttatttattattattattttatagctaggcatgcaaggaagcccacgttttttatagtaaattaatagaaacatgtatatatggttttctttttctcatgcatgccaaatttaaatacattatatatatatatcattatatagtatgtgaataaggtgtagaaaggttaaagacaaatgaacttttcccaggtgggtatttttcagaacacgcgtgctgttagatccttttcatgccacactcttatttgttttatagctttttcacagtccaaccacaaaaacattaataaaatttattattaaaatacagataaattaaaaaagcactgcttgattaatataattatcaggatttttattttattgcttagaagatcatagcagtgtaaattatcatggcatctgagtgatagtactctgtttgaagttttcattagggtgccttaaatatagtgaaaagtaaaggataaggttttaagtttttgagttttgactcattaattgactctattctcttaaaaagctgttgttattaacaaagtgaacaatggacttcaagagtggacctctaagctactttcaaacaattctaatgatttataatttgtaaagactccaactggtctctcaacaaggctaaattatttttcaaggatgaccctctttagatctacttcttaagaattaatctttcttttatctttctattattgtaaaataagaataattcacaaaaataaaatattattcacacaaggtatataatgagaaaactaaagaatgtctcatatatatagtcttaaaagtagacaggtgtccaaatgtgagtaaaaggtctaaaatatagtataactaatctaacaataacataatactaattaaagaatattataattcatattggtttatcactaactattgactgatttttagctataggaaaatgatgaattatgcaagctaattgaaaaaaaaaaaaaaaacccaatgaagagggtacatacttatcgtgttacttgaaaacacaaacttacgacatgtcgtttgtcattaaatgattctgtattgccattaacaacatattgttttcctgaatgagtcaatatatgcgaagccttaaaccctcaataagtctttctctggccttccact

SEQ ID NO: 243909 - DNA, 2884 bp, Cannabis indica
ggggcgtggaaggttttgatcctaagaaaatgctagaaatttctagcaaaatcttaaccgatcacaactgaccttaagcacctatatagggacttggtcctttgtgatgcgtgtggtgagttgagtaaaaatcttagtgcacaaggaagtgtgctcaagtaagtgttccaaaactaagtgtctcatatagtaaagtgggtagtttaagtgctcaaaagagtgtgtataaatatttaactgtgagcattaagtgtttgtaaaaataaaagtacttatagtgtgtagtgtggtcaagtattgtattcaaattttattgtaattatttttgcaataataaatgtaattacgttttcacgtgttgtggtgttcaacaagtggtatcagagccaaatcgaattcgttccgaaagagttatttgttgaatttcttagagtgaccttcaagtggccggtagaattacgaaacttaacaaccaatattacaacccgtggtcgatgcatatggaggcatatctctaaggccaatacttttaggagattgttgatggcagtgtagtcacacaaccagaggacgcatcagctttgaacaaatggaagattaaagcaggcaaagccatgtttgcaattcggaccacagtcaaagataaaatgttggagcacatcaggccaacaaagacaccaaaagaagcattactttcgcatcactattcaccaagaagaatgatatgagattgcagcttctggagaacgagcttttctcaatcaggcaacgaggcatggcaatcaaccaatacttcaccaaggtaaaatctctttgtcgctaaatttctgcattagattgtgttgttggtatgtcagatgctaaaattagaagaataattattcgtggataaggctagaatttagaacttttattattgcaatataaggttgaacaagccaaccatctcttattgaattagaaaaattgctagcgaaccaagaaccgttagctaagcaaacatctggagtctcattaaagagtgataaagaagcactatttagtagtaataagaaaggtcgaccccgactgaatgctagtagaaattctaaaaaacatgatgacaagcatagtcatcatggaagctcccaaacagggggagctcagaagaaagacaaacggggtggccaatcaaagaataataataaatttgatgaaaaatgctacaactgtagaaagtatggccacatggctaaaaattgttggttcaagaagaaaactatgtaaggaaataccaccacgtcaaatgcagaaaaggcaggtgatgaagaatgggacgcagaagcatcgtggtagaggaagaagaattgctacactcctttctgatcgaccaccatggacaacagcggtggttcaccaccaagccgtacgatcttcctgtgacttatgaggacttggtgaggttcactctcttcgcgaccacatcgtaactttggctcttccggttggtgctggaatggaaaagttcgttgatgtttgccatcaagaagtgacatctccttaacttcaggtagtggatcgatctccttcttctccatctatggtgcaccacgattgggcttcggagacgacatgtgacacaccaattcgtggtgtttggctgagactacacttgacaccagttttacatctaaagtcaccattgtttcaaccttagcagcatcatctagatgttcgtccttggtcgccactaaggtgtcattggtgtttcgtgcctcttcgaatttctgtattcgatcaattatcaggtccaaccgtttcacgatgggatcaatcataacctcgagagctgaattcatcagttccaattggttgggagcttgctgaaactccaatcgaatttccatcatacatcgccccatagatcgacgtgctctgagaccacttgaatttcttagcactttaggataaatagtagcaaagaagaaaatagtaaatgatatattgatattgaaatgaaaaaagaacaagttgttgggtattcgagagacccaactctctcccaagaattaaagctcacttaactaaaatgattccccctgtctccaaaacccttatactactctcctatatatacaatctcaatactccaattacaattacccatatacttctttttttttatttatcctaaggcctaacagtactgtattcaagttttcgtgtaattacttttgcaataataaaagtcattatgttatcatatgttgtggtgttcaacacaaaatcatattttactacatatataaataggtttcatattaagttcttacatatatttaagaaactatttgatgagaatgaatatttacttgaagtgcaaaagaattattcagtagcgaaaatattttgtgtaagtgttgttcataaaaagataaattaatagttcacatatatctatagttttgtaatgtttaaaatatgtcttaattgatttaaaaaaaaaatacaaataaaataaaaatatatatttttcttctcattttggtgtatcttacaaaaatatgttatttttttccttcttaatttatcataattaaaaaatacatgtaaacaaaaatttggtttttttttaaatttgataatgtatatcaacataaaaatattcaaaattaatacaaaattaattaaaaaaaataaataaaataccatcattgaagaatgaagactttatgtttctaagaaaataaaagtttgggcaccaattccctaaaaaataaaatttgaggactaacttgccaaaatttatatagtttgaggaccaatttgcctaaggactaacttaccaaaaaaatgaggaaattacacttagtatgggattttaaaagttcttatgataaatatg

SEQ ID NO: 243910 - DNA, 2591 bp, Cannabis indica
aattattataatggagcactcaatcaactttagggatacttggaaaaacctctttaatttttactttttttttagttgaaaaatcctcaaacttcattaattagagtatagaataagggtgagcacatcaggcgtcacctccccaaaactaagaaaaccacaatgcaaatttaaaaaattcgaagaagccaagccttgagctgccaccattgactctcgattacactagaaaattgaaaaggaacagttatccaacaagaaaaaaaacttagcaaatagatgaggtagtctccaagaaggcaacttgcgagagtagcaagcctccaccaaaacactgcaatctgaaactagaaaaccactgcttagataaggggcttgggcagcaaggagaccatccactagcgcccgcacttcactctacaaagtagaattcgtcgggaaccgatcaataaagagacgaatgatctccccacactcgtctttaaccaccacacccgaggtacctcgaccatgtttaaacgcaccatccgcatggatcatcacagctccaaggacttcaaatttaaaattttggtgacaaaatcttcaatctgtcattttgtttgtttacttaaaggtgtcattaattttcttttgttaaacaccaaatagattatcattatatacacgtggcatcatgagtccaaacaaatttaattatctaaaaattataaaaattgtttaaattgtcatttaaaatttaaaaaaaaataaaaaatttaacaaatattatagagtaattttttttttctttaacttacaaaaaaattctatgttctcacctatttatggtggcaacgaaaaaattaaaactagagtcaactaatcatttaatttaacttaacaataagcacatgcttttgtgttgttggttcgaacaaagacattgggtaaatgggatctagataattggttcactgttccatcaacatttgattattcgtaaaaacttaccgaggctgaagtaggttgaatggaactagggtagtgctgtttggtttctgttccagtttcaattcacggggtacgggttcgggtggagtttgggtccaagtctgggttcaggtcttaatttaggtctggggcgaagttcaagtccgggtttttgtctcggttagggtccgaggttgggtacggtgttgggtttgggtctgggtccaagtcccggtcccgttccaagatctcagtacggttcctgttcaagtttcagtttcggttcgcgagtatgggtctgggtctgggtatgtgtgcgggtcctggtttgagtttgagttttggtttgagttcttgtctaagtccaagatccagacaccgactatgggtcaggtacaagcatcgagtcctggatctcaggtcgcgaggtgggtcctaggtccaggtttgggtctggggtcgagtcccgaatcccgatccaagttctggtccttgtttgggggcccaattcctgggtctgggtttgccatctatgttcaggtcctagatctcggtccgggtccaagtttgtgttccgattcgagtttgcgtctcgagtcctagtctgagtccaagttccaatttgggtttgtgtccaagtttgcgtcctagtaccagtgtgggttcgagtttcgggtcccaggactgagtcctggttcttaggtcctggatccggtcctggtttttaagtctcggtctgggtctaggtcttggtcccggtctttgtttaggtcccaagtcacaggtcctggtctgggtccaagtcgcgatatgggttatggtctgagtaaaggtttaggtttgggtcatgttactgtcctaagtctgggttctagtcccagacttggtctgattctgatttcgggtccgggatcgggtctagatcccaatctgggtccgagttcgggtttgggtacgaatccgagtttgggtcatggattcaaacactaactatgggtcagctcgaagcctcaggttctgattcagatctcggtcttgttccagtttgggtcacaggtcttgggtcgggtcctaagtttgggtttggtttaggttcagggttgtgtcccagtagtcaggtcctgggttctggatcaagggtcgagccccgtgtctcgagttttgggtatcggtccaccatctaggtctagatcctaagtctcgatctaggtctaagtttaggttcgagtttggatcccaagtttgggtccgagtttgggtcctagtacgggtttaggtttgagtttgggtccacgtcccgatctgagtccacgtccccatgtaagtccaagtccctattcgggtccaggtcggggtcccgatcgaggttccagtcaaggtctaggtcccaaaccaagtttttgtctgggtttgggtccaggttcaggtcctgagtcttggtctcagttcgggtctggatccaagtccggtgtctggatccgggtccgggtgtgggtcctgggttccgatctcgatatgggtatgggtctgggcccgtgtccaggttaggatttagggttcagggttttgggtttagtgtttagggatttagggtttaggggtaagtgtaaagagtttag

SEQ ID NO: 243911 - DNA, 2334 bp, Cannabis indica
aaaaaaaatgggtgacgatgcattatgatggtatcgtaaaaactttaacttttggttgaaaagaatgatatgtaacgatacatttgtaatgatgtcatgataacttgattttggcatacaaaaaaaatgatatttaacgatgtatttacaatgattgcaatgatgccatgaaaagcttgatttttagcataaaaaacgtataacaatgtttttgtgatggtgccataaaaatttgatttttgataaaataaatactgtataacgaagcatttgtgatgatggcttaaaaacatgatttttgacgcaaagctatgtaaacattatttaacgatatatttataataatttgcagttaaatgtgatgatgtataattttgactcgaatatttaaagtgatttttctttattagagagtggaattatttaggggattaccgaatgttgtgagaatttgaaatatttaggcacacaagaaaatatcaaaatgtacccaaatcaaatgtgatctagttttggaagaagaatcacaattttggaattatggattagatttgacaattcatactaattaattttaataaaatacttagaaaatatatgttattgtattcataacacagttattcttacatttatattatactgtataattgtaacttttttcatttttactcttgttactatagtactactcctgaaggtgactttttcgtatttctaacatattgcattcttatttctaacataactacttttatttcccttttgaatttgttaaaaaaaatctgaaagtaattcaagttataaaattctgtcctgatccaataataaaaaatttaaacttaatatgtgttgttaaaaaaattattaaatttataccagttataaactcaaaacttttagtatttatggctaccttaaaaaacaatttatatattatatattattacaaaaatttctcctattttttcattctttattgttttttttttaattttcccaattttgtttctctattctcattcatttatatcatcgttttctcttaatcacttgttctctttttatttttattttctctctaagaataatctctcataatttattttctctctcgctttatctctcctcatttttgtatcactttatttgtttattttactttctgttattatttattgtagaactttgacaatatttttcttttgaaaaatattctcattagtttttctgttgaaggttattttgaaaaaaaatcactaaacttatatgtaattttcttaaaaataataaaagttcttatatattattatttatagaaacacaactttaacaacaaatataaagtttttgaaagaactacttgtcaaattttcaagattcatattaccgaattgttcatgattggattgattaatttcaactcatgcattcaagaattggattgagaataaggcagtaaagcacacaatgatttacaagcttcatctgcactgagaacacatctcagccgactagtgcttgggttccccaaaccagggtaataacatctactaaatccaaaagattcgtattacaatatccagttccctcttaggaatttaatacaatctttacagcaattagtaatgaattaccaacatcaatcaagaatcttgattgtatgaacacaatcccttgtgcagtaactgagttcgtcttcgacacttctcttcaatctggaatcccttcagatctgatgacgaagatgacactgaactccctttagtctgaactcagcaacatcaggctctgatctttcgactatagatcaccatcttcaagctatgcaatcaaacctgaaaaacaacaacaagcaaaacaggatactacactaactcacacgatataaccgaactaaccaaagatatcaattagctagctaattcatttacagaatgaaaatagctatttataggcaatagttcagccgacctaacaataaccaaaaccaactgttaagacataacagactcacataaactttaacagaaaattggtatgcagttataacagattagaaacaccagatacgactggactcactattaatataatctgtcaaaaataatgacacttacaatctccctcttgagagattatgttcaatgacacaaaaaaaatataaagactaataacctcaaaagatatcatgtaacatagagccatggcacaaaaaaaaatgtttttggaattataaacatagcaaaccataaatccatatcaaaaaaaaaaaacttagagaatacaaacatctcccccttcattgaacatgagttgattgctccagttttt

SEQ ID NO: 243912 - DNA, 2272 bp, Cannabis indica
aggtagcctcgccaatagaaggagggaagttgggacagttagggttgtagccttcaactcctgaagcttctttggcaactggttaaccaacatttatactgaagttagtctctttgaaaaattatacatcaaaacgcttttaacactactagatgaagtctgggacatcatttccatggaaactactccagttgaatgactagcatctatgattggcaacctaggttgtgtaaatggcattaaaacataagtcatgatagtaggtgaaattaagcagagcctgatctttaagagtaatcactttcttctccaaaaccttgacttggtccctcaggtcatcagccacaacaacctgcttcttaaagtatcacgagaagactcaccaagatcaggagctttcttcagagttgccagcaagttcttcttcaaaataccttcctgagacttggcacctctagccacttcttcgagtttggtcacctcactcttaagagaagaaactttttccttcaaggcagacaactggcctttagcagcaacaacccagtctttagcaactccaagctagtcagccaactccaccaccttctagtgtttgttattcatggtgtaagaatgatcaacacaagcctgaagataaaagaaacaatgccagttggtaatacaagaaaagaaagttaagtcagaaggagacaagacaaagaacttactctgaagatgtcggtgaagcatctttaagcaatgatatgtggaggcttggtgctaaccaaccgctgcaatggaatgttctcagccctagcaccaatcacgacctcactattagcaaggagctaggagccttgctcacggaaatagtccattaagtctgaacctgagttcgaagaaacatgtttagaatcatccaaagagaggtcaatcaaagtcctctcatctgcaccaactatgtttgacatctccctactagagtcataagcaataagagcaacatcaacatttccactcctcgtcctgactttcttctttgaagtagcaaaggcagtaagaatgccttgaaccaattcccttattagaggctcagcctccttcgacgttagaatcttcctcttcacattcaaaaaagatgccactgtagccaagaagctcatattgtctacaaagagtaaagagcaaaggttagtacaacaacaagaaacaagtcaacaagtaaagatcatgacatggagtgtcaacaatttgctgattcccccatccttctttggaatagtcctagcagaggtaacttctctgtcatcctaatctaagaacacaaatattctctctaaatatattctatgtcattttgaacagatgttacttcttccatcacagtttgagacaaaataatagtagaactctaagcatcttcatcactttgctcaagtggcattgtccaagactcgttaaagaagcctaaattagcatacactctctagcatgacacgatcaaccctgcctttcgaagattttcagcactaaatagggttttaccatctctctcccatgttgggatgtcgatcaacatgacttcaactctcctcttcatgtcgataagaggagcaggtattttgaaagggtcatatttttggaaggtaatatgtctcaacagaagaacgaaggccatagttactcttagtcatgtgctctatgaaggggccaaaattggtggaaattgtaaaaacattgatctctataagttggacttcttttcaagtcgcagaggaagtttatcgcttgaggagttggaataggccagttcctaaaggcaaataaaatatgaaagaaggtggctagaatcctatagccattgggggttatcgggtaggggcagacaatgaagaagtcagctatggatataaaccatggaattcaagaagcaagtaagcccccgcattcatgtggaatctcgaccaagaactacaacaagtattttgggatcgcttgggagcaccatgttgaagctatcgaacaataatttcttggagacagtaatcaactcgaatgatttgagcttgaagctcagtaagggtactagacacaagaggccttaacttaaaggctccatctctcagataatcactctcaatggcaactttgagaagcacagttgtcatcacttttccaccgcgtgccttgtccaagttcttagcttaggcactgtcagcttagctctaattactaagcaagatgggggatcatatttctacctctcttcatcctagccatctcaagttca

SEQ ID NO: 243913 - DNA, 1263 bp, Cannabis indica
aattctctaatatttccaaaaaatagcttttgagattggtaagcatccatagtaatgtatctatgaattcttctgccttagcatcctatttaaatttattataatacttcttataaaacaaagctcggaacatatcccaaatcatggtattcaggtcatgacattgggacacaatctcccaccaaatacgaacatcctccctaaacataaatatggcacaaccaacttgatcattaccctcgactagcataaattcgaagatagacgttaacatgttcatccactatttcgccttcagtggatcataaccaccctcgaacacttgcgggttctgcttcctgagtcattcatacaacgactccaactgattttccacatcctgtggcacaaccagaggtgccggaggaatatggacatgagcaggccgaacttgctgctctttcaactctttgatttgatctccttgttgtcgtattgtacagtctcttgcatcgcaacatacatttgttcctagttttgtggtggtggaggattcccccttcatcaccagcactgagcccagatagcttgtgctgaagcctgtcagatcgcctcgaaggcataacttaatatacctgcaaccataggcttaacaccgattagaccttctgaaccaacaccaatgctaataaatattttcacatttacataaatgtaatattattataaataaccctatcatgctttttctaacaacatatttgtttcacataagcaaatatttcaattaattaaaaaaataaataattaacacttactatactatgagtcgaatgatcgagcctttacaatcaatatatatattcagttagttttcaaaactttaaaccttaattcctctaataccatgttataatgccctaatctaaaagtaaactcattaaaaaaaatcagaagtgaaatctcaattttattttattataatttttaaaaacacgttaaatttagtttttttttcctataatttaactatgtgatcataaatttctttaaacaaaaaatgtgacttgtctatttttatttatttattatttttttttttaataattaaaaatacagtaatatagttttggtagcgtacgtaacgatgaaagaggctttggcagttatccgcagaggagcatttgtatctaagctattccatgctatttaaatgccgttcatcttcaatctcgaccgtcagtttcaaacgacagttacctttcgcgccaacttctcccattt

SEQ ID NO: 243914 - DNA, 1843 bp, Cannabis indica
gacacttctaactataacaaatgccatagccatgtcattttcatcaacagccatattgctattcttgtccataatgatatcacgtttcactgagaaagagttggttaggagattgccatggacatttgtagttggactctctttgcttttcatctctgtcacttccatgatgctctcattttgtttttcctcttttttacacaatgcttcattaaggctaccaattatatactcttctcttcaacttcttccaatagctttgtttttctatcttatctttcctgtccttcgtgatacactacattccacattctttttccaaaatgacttcaaatcaacaaatcatgtattacaacattatcaaaggtaataaagctttatttattattaatattttgtcatttttattacctagctagctatagcaagaacatgtaatggtttgctatgtacttgatttagatagtttgcttgtttcttgtcaatgatatcatcttatgttgttttcacttttataaatatttatattacatggtctacctcggttctagtaagcgagtgtaacttagttatgctttatacacaactttttacatatataatttatacattatactcttattatttatcaggcctaatctgattttgtttttgttgacataactcttaatatatattcacacaactcatttaatatataaaaatatatagaatagaaactttagagtattaactctgatacaagctagcttctatcaagctaactacgtacatagcatataaaggcgcaacaacgctaagctctaagtgcagggtacactttcttaccaaaaattttagtgtaagtgaagaattcaaactcacagacaatctcaatcaagtggcggtagtttaagttacaaatctaagtatgaatacgataagattaatccataatcacataaaatatttatgaataattgaggctcataaactggaccaatgatagagctcttcaagagttttctaatagtataaagaacatccaaaacagagttggagtcaaaatttatggtcaaaacaagttttataaaattctggctttgctgaacatatcgggctgcgacttccaagaacaataccatgactcctaggttagaaacccaaaaaactaaattttgagctccaaaaaagcatcaaacttaatacgaccaatatacaatatcgatcttagtcaaataaaagtattatgaaatggtttatgagcccagaaagagtgtaatgctcacataaaatataatagttatttttatactccaattaacacaaaaatcaaagctttaaactactgtatttatactagggccagcaaaacgggtcagacacgatactacagaaattaagtttcttttaatctctaaaacatgtctcacgtgatgaattttcataatagttccttctactaactgtaattgaactgatccaatgctaattattgagcatgatttgttatcccaaagccttacagttcctccatttattttcttgtaattaagaaattattttttatttagacaaatgtgaaatgagcatccaaaattaattgcccagttagttttcacagaacttttggccaccaccattacatcagtactttcatatccatcatcagaagccacatatgcaattccataccttttgtgatctcctttcttaagttgtggacaatcccttttcagatgtgaagtcttatgacaaatgtaacaccttttcttgtactttgacagatattttcctttgtttcaagcttccatggttcttgttctctctttaattaaatattcctcgagataccagtaggcca

SEQ ID NO: 243915 - DNA, 1515 bp, Cannabis indica
aaaacgtttaaaaattaaaaaaaaaaaaaaaaacatagcatataaggtaattttcgaaaagattataagttgtttaacataattttaaccgaaagaattttaagaaactatttattaaatgagattaatttacataattcaaaatttagttataattttttttattaatatcgatatcttaaaagaatttttcattaaaaaaggtcattatattgaagttatcggcaaaagtaaaaacttagtctatatttacaccacatactaaaatttttaacttttttacttttttttttactgtaagacggaatttttttcaaaagtactgtgttttttttttcaaaaataaagtgtaaattttatattgtatactgtgttaagtttttactattattttatggttgtttttagttgttctgttttgtattctactgttgttttataaaaatacagcatttttgatagaaaaaaaaattcgtgtaacagtatttttgtaaaaatcaactcaaattctagtatttttgtaagctacctcacaaaatataggaactttattaaagctgagtcctagactttcttgttgggttgaatcggcccaaagcccatcaaatttgaacacgaaacctgttttttttggtagagaaaccatgaaaattagttgggtggtcccaaactgtaattcttattaatttggctaattgtaattttctcttctataattcatatctaaaccgcaacattaattttacctatgtgcatgctcaagtacaccgtaaaaagaccggatgagatattcaactgaatgtatatacttttactgtgagaattcaattcaatgatcttaattgaataataaaccacagttattatatgcaataaaagaagaagacaggacatgatttaattcatagaaacttccaggaaagttcttaaataattttgtgaatccaagtacatagaaaagaaatacagtggaagatctagtagtaataataataataataatcataataataatagaagagttaacatctggaagccacttgagcaatggacggtgcttcattaacgaattttaaaccataatatttgactctgtaacactctgaaatacctttgctttaatttagacgagttacaaaatgtattttactccttttatttacccacccctttctttaatttctcctttttcctatttatatattcactttggccaatcattactctccaatttgctacttttcttttgttaataccgctctaattaattataattaataccacttccatgatttaaggaatggtgaaaatggtatcatttgattattaattgaagcagccacatgtacaaatactacgttgcatctatcactatttatttttcttttaaaaatttgaatcctttatctaacactggagattgtctcctctaatttgtgagattcgatctcacaaataagagtgttcatccgatccaatccacactaagtgcggatttcatattttagatccaat

SEQ ID NO: 243916 - DNA, 1212 bp, Cannabis indica
aaaaggcagaaagggtattgcaccttcaagacagatgggacaagcatcctcttcttctttaggtaaaatattaaggtcttgtggttttgagagttccaacatttttgacgagacatccaaggaatttgcattagctttgcagtctgcatcctcaagatctacacaggtagctgaagttttgaaactgctacagctaatgtttcttctttagaagactcagaatcagttgatactggacaaccaaaaactaaatcatatggcaaaggcgcaggaggaggatggtaagtatcaggtgttgatgtgtccagatccaaatgaaccaagagtcctgcagtgatttcggactgcagaccgttgtgagatgccaaggagtcttgctcttccaaaggtggggggtactgcagaaaaaatatatcaatcgtttcaagaatgacaccttccaatgctcagtctgctgcttgtgttagcaacataaatgctcaagcacaagcatataaggtatacaaaagttaagtgataagagaatgataatgtactgacatagtaatatacaggtgctccatgcaaatgagcttttctggaagaacagcagcaccctcccattgcctacaatttattttgttatccagccaaaataatccaaaattgaggcattgctccctgttatttgacattatatgaggcttatttccaacatatttgatcaatgatttaatacgttaataaaaaatagagtacttaggaaatatgaaagtagatgatgctaaaacaagcaaacacattcaaatatctaatcattaaatgtattcgattctgccaggggatttaccaagtaatatgttagaatttcctaccttcccaagattaaatgttcagccaggaaacaaatataaatacaaaacttggaagaaacaaaaaacggcaaggcttatattgaacagaatcttagcataattaactgactgttaataatctaatgaaaagaattgctgctggaaaatgcccaagcagctagagatgtaggagatagcacttttattggcttcctagtacttttttccttgacagtctatattaacaagagcatgtaattcagggaaacactccagttatattttgaagacgtatacttgcaatcgtactatgtctgggaaaatcaccagcaatttggacctgaaattttggcaagcatacataatatagtattaatgg

SEQ ID NO: 243917 - DNA, 2386 bp, Cannabis indica
ttgattataattaaaaaaaaagttatcaaaaattaaactcagagtcctatttttactattttgaaaaatacaagatccattttgtcatttaacaaaacacagagtacaaaacacagaacccaaaaaaacagaaaccaaaataatatttacccttattattattattattattaaacaaaatcatcaattaaatgtttttggaaaactcaaaggagtgcacattttttgatgcggtatagaatgatttgaagcctatcaatattagagcattgttagtgggcactagtagtgtccaatattttttgtaggtagtgtcttacaatattagagcattgttagtgggcactagtatccaatacattttgtaggtagtatcttataatattagagcattgttattaggcactagtagtgtcaaacactttttgtaggtagtgtcttataattaattagcgacattctctaaaatatattttttaaaattatatgagactcaatacttaattaaactatatatagcagtataatatcgaggagggtgctagcaccaatatcatttaacgatctattaatattaatgtaagtgtcatagagtgctccatatacaaaattgtaaaaatataaaatttcctatatattcttattgagttgtttttttctttcctattattggatatttgtgatgttttgaactcaattttattttaaaacacatgtattgattggatattttggatatgatacaaaaatacattaaatctcatcaaattataactacatttttggagaaaaaatttggttttataaaatttaacaacaatttcattataaaagtgttgtagaaaaataaaagataaacattaacaaagatttatattacaaaattataacaatcatacaacatagttataatatgtaataaaaaattgtaccattacatttaaaaaaccgtaattaaatgtaacataaataattagaaagtttaaatatataatgcaattttttacaatatatataacactaaagcaacattataatttattcaaaaaaaacaacattataaatgtctatttaataacatgtaaaatgtaatatgttatcttcttacaatatataacactaaaccaacattatataagtctatattattacctcaactagacttaacttaacacttaacaaagtaaagaagcaaatactaatttaaaaaaaaaaccaaaaagcaatattatcaatctattatagtttattgccacaaaatatatccatcattttattttgggatcaaccctaaaatggtgagaaggtttagtcccatctaggccttgcttggtggaatgagcaatatagtcctttactgtggtttctctatactttggagggttattttctgataacaactctttgatcggtcggtacaattttgaagtttgcagattacctgtgcagaagaagcctgaaatcgatactcgaggacccatatcattggccaaagctactctatgctcaacgcttttaaatctatcatttgttataagctaaaccaaaaaacaaacaaacaaaattaataacattatatttcgaagaagaaaaaaacagtaagaccatatatataatgaaaaaatatagttaaatttctatttttgcttatagttagaattaagtacatctagcataagtgaaagttcttgcttttttcttttgtttggataataggttaattctgtttttggagaatctaagatttctagtgtctacttaaattttaacgacgatgatgtgttaagagtaacaatacgtgtcacaaaaatactgagactaaattaatgaagaatatgtaaagtcatgatagttaattatgaagggtggtctgaccgttagcatgaaagtcagacaatcaccttacccctagattgagtaaggtgggtatctccgagaaggaaaaataatggactaacaccttcgtaagcggaatgaacaatcaccacacacccacatgccaagctagtctagagaatatatactattaccccttataccttccaaagggttggtctaggggtatactctcacctcctacaccctcttaatacaagtcatgcattttagatataatgatattctcagaggtatataaggacatccacattacaccataactactgacaacggacgagtgtcacccaacgaaggtggtggtcacccccctcaagtcgggttccgaggggttcacctaacgatggtggttgtcaccacccctcaagttgggtctgaggggtcactcaacgatggtggttcgtcacccccctcaacgtcgggtcgccgggggtcacccaatgatggtggttgtcaaccccctcaagtcgggtcccaggggggttcaccc

SEQ ID NO: 243918 - DNA, 2813 bp, Cannabis indica
gtaacattaacagatctttatctattaaaagatatcttactttgcaattaaagtgcaagaaatgaatgtagaaccgttaataattgtatttgatatttatttttcttttctctccttataaattctcttctaaacataaagctaattgctttaagtagatggtactttaatggagagtggtcttatactgttctccattctcaaagattagtcatatactaatctttggtttgcatcttttctactctctctgtgtgatcttttcgtgtgttctgagtgctcccttttgttcgtccctagtttcctgctctcttttttgttttcgctttggtgcttaacctttgtgtagtgtcttttcatcattcttgtgcttttggttctatcttaccttctaatccttcctgccttgcatttctttttgagggtggggtccttgtgcgccgttttcttggttgaaactttccttgtttcagtgtcgtgtagtgctttgtttaggtttggggtgggtagttggccgctcagttattgtttcttgtcttttattgtcttgtgtatttggtttttgagtgtcatggagttagtaaatgcccctgctgccacacttaaaggtaagtgcatcacctgtgcggaagcttcaatttctctggcaccttgtgccacctccctgaaggttctatcatctctttgcttgtttggaaaggtggtggcacctatgctggtagatgcggatgacattatagaatttgtaacaaaaaattggcagaagaaagtaactgtttgtctgcttgctgagggacctgtgtcaaagaattgcttcaagcttgggttcgcaagtggtgaagatagagattgggctctggaaaatgctccttggtcttacaaaggatacacctttgctcttcattcctggttttctggtatagaactttcgcagtcggtggatatcctaagagtttgggtgcaatttcataatctgcctcatgagtacttttcgattgagaatggcacccttttaggtggtaaggttggagatgtcgtgaaggtggagttagatgaggagaagccggtggaatggggtccttttctccgtgtgttaattgatctaaacattcaaacccccctgaacgctggttgtttctttgatttgttctcaggaggcaaaaagtggatacaatgcaaatatgagaaaattggtattttctgttacttttgtggtcgactgggccaccagaggaggggatgctctctctcttctccggtcatggtggaagcggttgatggtgcaacgtaccccatgtttggcccgtggttgtcaacggtctcaaggttccatgatgtcttctcgggtgctacatctcaggcgggggtggtcgtccatggaaggcctttgcccgataatgctttggaggggacggtggcccgtccggtcgccacctcgtctcgagcttctcaccgtgggaagaaaaggacagggcgtgcgctgtctggccatcatcggggtacgattcagacttggttgcccaaggtaatgcatgcagggagagtttcaagatttgctgaaaatggtaatagggttggtgtgattttgaatgaagatggaaagtcatctgggccatttccaaatctcttgtcttcgtctcaggagggtcaggttaataacctgttggttagttctgataaggtttgtggtggggcccctttggtctctggggcaaataaaacaaattgtgaattgggccaggggtctcgtgggcctgggggtttaaaggaaatgagttctgggctgggcttaattaatattgagtgtgctggagggaatggtgagctgaatgtttctcgtgggcctaattgtcttaacccctctgggccgcaccttgctcttgaaccgcccatgattaatgggctgaaattaaatgagttttctacggataagcttgagccgaatggagagggtgggctgggccttttggagattgggggatttaatttgagcccaccccgtggcaactttcaggttaacatggggggacctcagcttgtcaattctaaaggaaaagaggcagagaatgatgttgaagagaaaaaggccttgtctcatttttttaaagcacaagaagaattactttatgacttgaaacactttggtaagttggacttgtatgagatcaaacaattgggtggtgatattggagtgccgctttcttccgaaactaatgagcgtactacaccttttaaaaagaggaaattcgagggctccgcttctctatgttcgagacctcacaaattagtgagaacttatcatggtgttgttcgagacttcccctgggacactaagagaaagattcatgaggcacgtgcggttggcgatgatctttctgaggaaccttcggaggagccctctggtgagagctctagttgcaacaatggagttataagagatcacctgattggctcctttgtgattgaagaatctggctctagcttatctgttcactcgactaaccctgtggaggagaatgtcaaatctcctccacaggcgtcatgagaggtgttgcttggaactgtagagggttggggcagacctctacagttcaggagctgaagtccctgctcagatcgcgctctccggattttgtgtttttaactgagctcaaggtggatgccaatcccctggtacgtattttgcaagcttttcacttttattttcatatctctgtgccgcccattggtaatgctgggggaataattttagcatggaaggatggtttttgttttgaatgtatcgcttgctctcgtaatcatatttcgggcat

SEQ ID NO: 243919 - DNA, 1190 bp, Cannabis indica
ttttttttttccttttcaaaacatgtaagtgcatccaattgcagcaatgcccaaacaaaacgcaaaagccaacacccaactgatacaactcccattttgatgaggatcacgattatgatcactgaccttggatttagagcacaaggtagaagcttgaagctcaagcaatctcacccactggcgatgagcaaacagtatcttagcctcatcaaccaaagcctttgaaagactatccttttccttagccataactttgatcttcttctctgcctctctggccctggtttgggacagccgtaaggccttcaaaagctccaacttgtcgtaattccctgctcctacaacggcgtcgtcatcatcatcatcatcaaactcgttcttgtctcctttttctggattattattaagacccatattcatgggattgaacagtctgttgtactgtttcattgaggggggcacaatggtcttttcaggtcccaaatagactttcatcggcggaggaagatcacagttctgcataagatccaatccacccatcttctgagaaacgccgagtcccatcattagcttttcatttccatactctactgctttataattcatcatcagcttttcccccactactatctaaccgaatttacttcaacaactctattttaaatgctcttcttctatctcaaaagaatagaaaaagtctatttggttgctgtggtggtaggtgggtggtttcttttcttttttaattttttaattaaaaactaaaaaaactagagaatggcaagagagagagagaacagaaaaggagagtatacgtgtggcgcaagaaaaagggaaagtcgtaatgagagggtggaatttaaatgccaataggcagtgttgtatagagggatcctttaaatatggtaaacaattcttaatttgtttgcgtgtttggacgacaaacaaatgttaaaaagttggtgcaatgtcttatatattttattccataagaaactattggtgaaactagactacttttttttttttaatttaagtatttattattacatgcataatttcagactcgaacccacccagaactttcaacacacacatcctcttatggccacttgaattaacctcaaatagttgaaactagactactttaccacggaaaatttacacttattaaatttatatatatgtga

SEQ ID NO: 243920 - DNA, 1574 bp, Cannabis indica
aaagcttctggtggattaggtgtcagaagatgcgaagacatgaataaagccttattgacaaagttggcttggagtttggcaacacaggatcagaaaccgtgggtttcatgtctgctcaacaagtattgcaagtttgataattttctcaatgtcagcagcaagagtagtgactcttatcaatggaagtgcattttggatacaagaccaacaatcctccgaggatcaatctcagttgctgcgatgggaaacacaatcgacttttggcatcagccatggattccttggttagagtaccaagattttgtagatttaatgaatggactcaagaatagaggatacacaatcaaaacattggcagacatctcgataggtagcaactggaacgaagagatagtgctgcaaatatttgggagtgatatggggaaccgaatcttatccattcctaggctgcccattccttatcaagatcatatgttctggaaaagttctccacaaggtatgttttctgttaaggctgcttattgtgttgaccaattgtggagatttgcaccagtgaaaaacatttggaaatggatatgggaggtgggaatccatcctagaatctcggtgctgctgtggagaattttgaatgatgccattccagccaagaatagattgttttttttgaatgaaaaaacatgtgacctgtgtgaaaccgaagaggagaatcccctacatttgtttttcaactgtaactttgcaagagcagtctggtttgggggtactttgcctattagaattcaacatcaatcaggagaagacttgatatgtatggtggaaaagatggtgtctatattctcatcttctggttcggaggtaaatagatgtcttattcttaactatgttggatgtatttttgatgctatttggaaccagagaaataatttctatatcagaagtactcctgtaagtccttcccttgcattgataaaagctggaaaaaagttccttgatatccagaatttgcctcctacgaaagatttagacagaagtaaccccaaagatgcaaatgttaggacagatatgattcaaatccctgcgaacaaacaagtgcgccaggctattttcacggatgcatcatgggtgaagggagaagcaggggtagctgccattagtgtcaatttgatgtccggctgctggtttgttaagtcccaaaggattcagtcaagttcagccttagaaggagaattaagagccattctccaggctttggaatgggcaatcgagtcaggttgggaagaggtaatcatcctttctgactcgaaattagctgttcatgctttgaattctgcaagagttagtcctgattggaggatttcaaacgttttttttctctattattaatgtctctaaacagtttctagtctgtaattttcattttattagtcgtactttaaacgcttttgcggatggtgttgccaaaaatgctagaaatactagcaactcggccattttgtatcaaggggagggaaagtccccctgtgattcccgttcactttctaacttaatgaactagtagtactttctaaaaaaaa

SEQ ID NO: 243921 - DNA, 1677 bp, Cannabis indica
ggattaataaaatatttcaaaaatataaaactatctaaatttcacggtattagtagaattaattttataaatatatataaatattaataatatttatttttagattaatataaatatatataaatattaatatattatttgtaacattattatttttaatattgagagtatgccaattttaatattcttaaattttgtatttattttcttcaaattttgaaaactttaaatactgttttttaaaaaattaataattcttttaatttataaaattttaaaaataacacataacaaaaataaaactaataatataacgttgcataataataatctagtatatatatctatatatatatatatattagtttttagtcacgtggtgctataactttattatttttttgagatctttcttaaagaactgtgagaatatcaaatttataattggttagaaaagttagagttaagaattagttagttgtaagagtgagctatcattagtgttagtttgagttagttaatattgtaactaacttcagctactataagtagttatactcatgtactgtttcattaagattaataagaatttgcctttaattcatttctctcatctttctctctattttctctaatagattccaaactgacatggtatcagagccaccattaaagtgtgctccttctttgttgttttcctttctttctacttgtttgttctttcatggcgcgaggaggaagagtacaaactcgaagctctcgtaatgatggtcattctaattagttcccttttctcgatgagaactcgagatcaacgaatgctaatgatctctccaatccttacttcatttctaaaggtgataatctaggagctgttttggttccaaagattctcacaagaagtgagaattacaatacctggaggagattaatgatgatcgcatttgttgctcgaaacaaaattaagtttgtgaatggaagtcaagtcacaacttatacagtcggatggagatggaacgctggctacctcgcaatctcgaacatgcaatagagcggttggctaaggggatggtattcttttagtttggttgaggagagagatagcatttttatgagagtggtaaaatgatgagtatgttaacataaaaaaagtatagtttggcaaaaaattatttgagagggatttattaattattgcataaagttttaagtgcgataaataaaattttccttgataattttattccatcagagatataaaggctatttacataaatatgataaaaaaaatataacttaaaaatactatatttatcgaacaaagttttaaaattttgtttcaacataaaaaagttaaaattatgtaatgagtgtaaattttgtttcaacagttattattattataaattttgtgtgcattaaaactatattgtgagtattatttttgtaatagggatttcctaatgcgttacaagtgtgatttgacagatttagcaaaaaaaaaaaaaaaaaaaacggtagagaggttagcaaataaaatataggagtttaattgtaaattacttataattattataaacttatgttatttgctatgtaaaaaaaactaatgttatttgtataccttttataaaattgaaatttgaacactttatatcattgtctttttttttttaa

SEQ ID NO: 243922 - DNA, 2022 bp, Cannabis indica
ggtcgttacgtttacttttttagttttttttttttttaaaagaaaattgaccttcaacaaaattcttagtaaattaattacatatatatgtatatattttgatatataaataatataacaaattgagtaggtctgatggtaatgactgataaatttaatttagttgcaaatgtcattaaggacattttatttgaagagtataaaaactatttaataattacattgaatatattaaataaaaaaaagttcgggctcccgagattaggggctctagacacaggcctactctgtctactcctagaatcggccctcacttgatactgctatgggtgtatttcaatattgagagacacacattttaatttaataaatgatatagaaaattgataaccaactataattaattaaataagtatcgtattgagcatcgatgctttaaaaataattcatacatatatatagattattgataattgttttcctttcaattctaagtaatattttacagtttaaaatttgatcatttattataattacccatgcacatgcagaccatcgatttgttgattggtgatcatgacgcccaagaagctggtgggataataataaacactaatcctgtgaacaaaactggattcacaccaagagatgttctagatctcattcttcaaaacgacaacagtactggatcattaaatcacatgatcaaaatgatcgaaacgtttcaaaaggcaggagcactcaaatccaaccaaatcgccattaataaaaaaactcaaacagtaaacaatattaataataataataataataataataataataattctaatactaataataagtgtacctcttttcgatttataataaccctttggagagaactaactaaagaaatcgaagaatcctccatagaaacccaaaacgcacttatggtggttgccgttttgatagcaacaatgacttaccaagccatactaagccctccaagtggcttctctaataatacaccagttgactattactccaaaaacgacgccgttttaataaatacgaaaagtgcacttaacgttggggaaggagaagcagttatggcgagtgatccacacgtgtttgttatatttactgtgtttaatgcgattgggttttttgcttctcttgggatgatttctgtgctgacaagtgggtttcctctacgggctgggcttagattggctatactttccatggtggccacatatgttatagcagttttctatgaggctcccactaagatgaggactgtttttgttgtgctgtggttgatgggtcttgttgttctttttgagcttgggaggtttggcttttggttgcttagaaaatgtggtattctcaaatttagtagaagatcatcaccaccttcagttgacggttatcctcatgatcagcaaaacaatcatgaccagttagacttttgaatctatctatctactttttttttcttataaaaaattgagttttatgaaaaataaataaatgtactgttgcgacttgccactgagtaataaagtataatcaatttttattgttgtaacatttccaatcatgcttttcaaactcattagctaaaataagaagtgagatttgaaaaaataaacactaatcatacaaaaaataactctctataattactaaatatttttaataatattcaataaaaaaaattattaatttttcattatattataaaattaatttatatttaacaaattcaaattataaaatattattaaaaattgtcaaataatgaatacatacaaaatattaaataagagaaaaagataaaaagcaatcatcttctctgctgctctgctaggaaaagataaaattgtcaagtccacattagcgacggttttttaccgtcgcttattttactcgttttgcgacgatcgtgtagacgataattataaaaaccgacgagaatactaaacgactatttaaaaatatcaaaaaaaatcaattttgtagtaatgatagataatt

SEQ ID NO: 243923 - DNA, 2458 bp, Cannabis indica
cactgaaaaacatgcatgcatccagttttggcagacaaaatttttagaagtagcagttattttcattcgtctactattcttgttatttgcaaattattataatgaccaatagatcagaagatacctctctctctctctgtgaaagtaatatgtaattatagtaaattctgtgtctttactgaatggtgatcagatttcacatttttcagtgtaaaaattttgaaaaagaaaaccaattatagctgtagcactagtaaagtggaggaatgacccacacagatatacactatatgtaaagatatctccttgtcgtttaaatttatttaaagtctgacaatcataattaaatgtagggcgcaaattcacacatatatgtgtgtatatacgttggagttatatacacatctcgagttatataacaaatctttagaaaagaacaaaacgaagcataaaatcatgacacattcaattactgatcatcgaatagattgcatgccagcctaaacatatgctcagtgacagcctcttttatttgcagtgaaaaaggtgaaacttgaataactgattcatgaataaatatatatatatggcggctgtttcttcatatatatatatatatatttgatttgtattgaggatgaaatcaaaagtgattttattgatatgaaattgaatgaattacaattaagaaaagaggccttatataagcaaccaagaaaagaaaaacaaatcccacaaaattagggattgtatcccataaaaatagggactccaataaccaacaacctaaactaaaatgcaaacagaacaaataaatgaaaagaagctgagaagcagcattcttgttacccccctcaagatggaccatagatatcatgaatggccatcttggacaagtgtgaagtaagtatggtggaggggagaggtttggtaaaggcatcagcaagctgaaggttgctgctgactggtataagtcgaatggctgaagttgcaatcttttcacgaacaaagcggcagtctaattcaatgtgcttggtgcgttcgtgaaaggttgtgttatttgcaatgtgaatggttgattgattatcgcagtaaatgaaggcaggagccggttgatcaatgcggagatcgtgaagtaaatattgtatccacgttattttgcttgtggtgggagctaaggcacggtactctgcttcagcagagcttttcgagatggttggttgtttcttagtcttccaagagatgaggcagtcaccaataaagatgcaaaatccaatagtggagcgacgtgtcattggacaagtagctcaatcagagtcggagaagtcgcggagatgaagagaggatgtggatgagtaaagtattccttgtcctggtgagccttttaggtagcgtagaaggtgatgcaaagctgtcaaatgaggtgttcgtggtgaggacatgaattggctgagagtgttgacagcgaatgtgatgtctggccgagacaaagttaagtacaggaggcatccaataacttgtctatagtgtgaggggtacttgtgaagaatgtcgtcatcttgatcattgagacgttgtcgagggtccattggtgctttggccggtttactgtcggtatacccggtgtcttgaagtaattgaagtgtatacttacgttgagagagaaagggatttgagttggctcttgtaatctcaaaaccgagaaagtacttgaggggggccgagagttttaagtttgaatcttgcttgtagagcatcttgtaaatggtgtagaagctgtaagtttggtccaacaagtataatatcgtcgacatagacaggtaacacaacaaaggtgttgtgtgttcctcgagtaaaaagggtgtaatctgcttgtgattgggtgaatccttcttccaaaagagcatcgatgagcttcttataccattgccttgaggattgtcgaagtccatagatagatttatgaagtttacatacaaggttggtgcccgtgatagagggaggaagggtgagaccttgtgggattcgcatgtaaacttcttcttccaaatctccattaaggaaagcattattgatgtctagttgtaaagtatgccattgtttgatggtgacaatggccaataggagtttgaaagtaaccatctttgccacaggtgagaaagtatcaaagaagtccaatccttcttgttgggtatatccttgtgcaactaagcgagctttgagccgttcaatactaccatcgctattgtactttatcttgtagacccaacgacatcctatggcacgtttgttcgatgggagtggtactacgatccatgttttgttggtgatgagtgccaaaagctcattgtccattgcttgaagccactttttgaattgaatggcctgcttgtagctttggggttcaaactcggctgttactgcaagataaagattttgtaagcctttgaaagtttgg

SEQ ID NO: 243924 - DNA, 2415 bp, Cannabis indica
aagcaatgatattcatcacgattggcgaggtcaaatttttagcctgtagccaagaaagcatcacttcccatctgccaacagtgaaagatttagacatttcagaagagggattaggtgttgatgcataaggttgtttgtagaatctgagagaggagataatcttgtgcgacatcatttcaggacagagtgaacacttcctcctgttgtaacaagtttccttttagaaaacacagatgacagtctattttcattcatcattatggaaccagatgggtgattaattagttgagttgtagcagatgaggcttctggttcaaggttgattgttggaggcatgactgagactgccgtggattgatccaatacagatgtaatagagtgaagatgagccatatgagtgtaagcagggggtaggcatgattggagtcacgggaatacttgtaacaggtcgattaaatgaagagtccatgttatgtggattgattgtattcataagccttgattcaccattatctttaattgttttaccatggtctttatatattttagtgtatgatgatgaaagaagagtcgggcctagagtaacatgcttatcaatgcctttactagaagcaggggaggctagatcagtggtgttattctcttgaatagagacattagggaatagttgatgatggggtagtgaaatgttgtaaagaattggcaaaacttcagatgtagcaacaagtttttatcctttttcctaagtagttattttctcaggaagtacagggaaatggttggtatgaggaatgatatgtgagatggtatttctggcaaggcgggtgataaaaggccatggaccaaccttagaaaaatcttgctatacctgtcatggacagagtttggaagagcagagccctccatccacggaccatagggaagagatggttacaagccttcatcaactttttccaagaatatagggcatttatcaaacacatgccctataattccatactcataacagaagtccgacaacctttcatagcaataatcaagccacatttcatcttccatccatgggaaggagacctttgacctctaagcaatggttttgagacatcaattccaacccagattctaaggaagggaccccacccttcattgagagaatcttcatgaacatctaagtaggtaccaatcaaattgccaagaattcgagcaagagattcgaatttacttaggaaggataaatgaaaaacttgtatccaaaagggagtagaagtgtaagaagtcagaggagcattttgtagagcacttggagagcacaaaatcatgtgttgattatggaagtgccatggttctttagaaagaacccttttaaatctccttcatagccaaaggagaccatataagaattggatttagtgtcatagtctgagatagtcatagcgaaatggccaatccaatggttgagaataaatttttgagttgtttaagattatgtcctctataaaggagtcaataagtaacatggcgtggaggaggagtggcaatatcattgatagtgacgacttcacgttttctagtagagagagcatttgaaatgtctaggtgaaagttatccatggagaatcggaggcaaaatctagtgataaagtaatgctgaagaatgacaaggaaaagaggaacacggcggtagatggttacagggaggcgggagcggttgagaaggaggttaatggagaaaatagtgggcgaatggattgaagacagttaaaaagaaaaaaacagaatacaactgccacagatcaaatattaagggcaggcaaagctcattatttgtttacctttaatttcttattttactttaaaaagcatttaacatcaatgttatgtagtggcatcaacataattttttatgatacatatttaactccaatggtataagtttttgtgttttgctaaataaacaatttacataagtaagtattctccaaaatttaaccattagagatgctctaagaaattcctaaatctttacatttatagaaattttgtacttctttgcttgtaaatcatattccctcaaaataaaaatgagaaaaatttaatatttttgtaataaattttttaaaaaattaatttagatcttataaaatatcattttaaatgattaagaaaattaaaaaagaagtggtcataggcattgcttagtggttccacaattctcttttcaaagaagaggttctaactttcaattctctctcctccaatataaaaaaataaaattgaaaactaattaagagatttaaaaaattaataatttttttattaaaaatactattaatataaaaatatatattaaaattaattttgtaaaactaaatttaagggtaacaagtttgagtctattttttttcttctaaaaat

SEQ ID NO: 243925 - DNA, 1900 bp, Cannabis indica
aaaaaaaaaattaataaatcaattgaatatgacatgaattttatatatctaaaaaaaaatgttaatttaaatttttatcctttaaattttgatatgtactaaatcatattaaaattttagattgttaaatttaagaatttttgtccaattttattgaaaaaagttatgcataaaaatttaaatgttccagaaattataatgtagcatatgtaaaagtttaggatgaaaaattttacttagctaaaaaaaaacatattttgtcgaaaaaaaaaataaaatcttccaattgagttgaagatttttccaaggttctttggccatatattattattattattattatttaatttgaaaatggaaaaagaaatctggacatgaataaatccgccagttaaactgtcaacggtacccttccaaaaaaaaaaactgtcaactgtcaagtcatatagttctatatgactatatgtatagatacaaacatatcaaattccatagaacaatttgagtaaagattcttcatttctcaattctcatatcaatggcagttgcaggtctctacagaagagtccttccctctcctcccgcgattgaattcgcttcccctcaaggaaaggtaccaacaaaccctaactttactctttcgcgattattcattcattgattttctcattcatcttctttattgggtcactttgtgaatttataaatattatgtatttgcagacactttttagcgaagctttaggagatggaacaatggaagggtttttcaagcttatttcttactaccaaacgcaatctgagcctgcctattgtggactcgctaccctttctatggtcctcaattcacttgctattgatccaggaagaaaatggaaaggtatttcaaaattttcaattctttcggtaaatctcgatatggttgattcgaattggtaccttgtgttttcaataatgctcatcagttgtttgatattttgagatcggataatttgataccccgaactcagatttgatcaatgtatttgaatttcaaactcaaatttgattatattatttgattaagaatagtttagtcaaattgttgattttatagtactaaatttgtacaatttcaaataatgagaaagggttaatttaatgtgccgtacttgtgtggatttaggcccttggcgatggtttgatgattcaatgcttgattgttgtgaaccattggaaaagattaaatctgaagggattacatttgggaaagtggcttgtttggctcattgcaatggagctaaagttgatgcttttagaacgaatgagagctcgattgaagagttccgcaaatttgtgatcttatgttcttcttcagagaattgtcatttgatcacttcataccatagaggacattttaagcaggtatgtggtgatgtttgtttcatttaggatttggctcttattttcgattctttatagtaatgctgctgattagatgtgtgtagcattgtaatttgatgtacaaaacattttgtattactatgtgtttgcagactggaagtggtcatttttcaccaattggaggctaccatgctggaagagatatggttctcatattagatgttgctcggtttaaatatcctcctcattgggttcctcttacacttctgtgggacgccatgggcaccatcgataaagcgacagggcacccaagggggtatgcattgctatcttcagtttctatgttgtaattgtatttagagaattgtgagcttttttgaattgtgctctatttgctgctttgtttccatttcagcaagtaataagttcattggataggccactctcaactgttttcattgcaattgacatctctacttttgttacttcattaggtacatgattatttcgaggcttg

SEQ ID NO: 243926 - DNA, 2720 bp, Cannabis indica
cttgctgaagaactaatgggcccagccccaatagataaatttgaacccgccccaactctgttccatgaacccggttgacgtctcaaaccttgttcacgagtgcactcaacagagaaagaggaaagctggtttgacattggtgtcgtatgtacaacgcactgaagaaaatacaagagaattctctcaggaaattcttgaaatgcctgagttcgcccctagaccgatcgaaaccccattcaaaatgggttcgggagcatctacttgatcaacatctcggggagttactaagagaaggagaggtccaggatcaaagtccactccaagaacaaggagacaagctaaaaatgataggaaccagagcgatgatacagttaaaaacatggaagaaaccctgaatttaattgaagtacctgtggagagtgatcaaagcttaattacgggcgaggaggcggcccttatcaagcccccaacctccaaatgaggttcctttcatggaattgtcggggccttgcgagggaccccacaagccaagctttaagagcttgggtgagaaagcataagccggagtgtgtgtttctcatggagactaaggtggataaaggaaagatggattggatggcaagaagtttgggatacgaaaagacaacaattattccaacaaaaggtttggcaggtggcttctgtctcttttggagaagtgatctgcagttcatgattttggaccaagataacaatgtttttgaagttgcaattcatgactcccaggggcaactcaattggagactctttgcggtttatggtcctccttatgatagagataaaactaatttttgggagatgttaactcacaaagtaagagcttgtgacaggccctgggtagttatgggagaccttaattgtattctcaacaatgaagaaaatatgggaggcaagaaagtaacaactacagacacttgttggctagaagacttccttcaggaaactggaggagtggatctgtgtttcaaaggatgccaatttacttggcaaaacaaaagatttaatagaggtctaattggagaaagactggatagatgtattgggttttatgattggaactctgcttttccttcagcagggattctaaattttccaattatgatatctgatcatgcccccattttgttcgataacttcatgtttaaaagcaaaggcttcattcctttttgattttatgatgcttggtcaagggaagacacttgtcgagatgaaatttgtaaggcgtggtagaaggtgcctcaggggggagcaagaagtctcttgaagaatttcgataacattagaagggctttacagatgtggaggaaagagaaagtgggggatttagatcaacgtattagtaccttggaaaataggctgcaatggattcaaaggcaacaaattacagaagagttttgtagagagaagtttcttatacaagatcaacttcaagaaacttggcgaaagaaggagtccatgtggagacaaaaatctcgtaggctgtggttaaagctcggggatagaagcacaagattctttcacacagcggcttcggttagaaggaggagaaatcaagtttggcatcttcaagacaaagatgggaatatgaaggataacaccagtgagatttcatgtatcataaattcttactttaaggagctttttacttctgataaacctaaaatacctgtggaattggaggatctgttcgatagcaaaatagatgagacaataaaccacggtctgactaaaatcccttcaatcgaagaaattcgggatacagtcttcagtatatatcccttaaaatctctgggtacggatggtcttccgggttatttctttcagaagtactgggatgttgttggagacaatgtgtgttcggctgttcaagaggtgttcaggtcaggaattttccatcagggattaaatttcaccttcatctgccttataccgaaagccaataatcctacaagaatggaacaattcaggccaattcgcctttgtaattttccttataagatcattgcaaagattctagctaatagattgaggccgtatatggaaagcttgatatctcctcttcaatcagcatttattccgggacgttggatcgctgaatcgtcaattttaacccaggagttagtgcatactatcaggaagaaaagggggtgggaggcttaatggcaattaaattggatatgcacaaggcaaatgataggatgaaatgggattttgttcggaaggtccttcaggcaaacagatttgatgataaggcttgtggtcttttaatgtcgtgtataacgggagtctcctactcagtcttgatgaacggtactcctctaaagaaattcaagcctcagaggggtcttagacaaggagatcccttgtctccctataattttctcctttgtcaagaagacatttccaagattattcaaagccaagaaaacagagggaagattcatggcattcgaatagcaagagctgctattccaatttcacatctcatgttcgcggacgacacgattttatttgcgagagcaaacacggaagaggcaacaaacttaatggggtgtcttaatttgtatgagagatggtctggacaagtttgtagtatagctaagtctagtgtccttttctcaaataatttggatacagacaagaggaaggccattttgaagatgctcactatcaagcaatcg

SEQ ID NO: 243927 - DNA, 4642 bp, Cannabis indica
taaatttataaaaaataaaaaaagaatatgagagtttaaattttaaaaaatttagggttttttattttttaattaataatttaatatatatataaagtataaactgtaataaaaaataaaaaatatataatatatttaaattgggggttggcggattcaccccgaaactcgtactcctaaaaactcaacccgcgaacttgcccgaagggtaccgggttgaacccgacccgcccgaacattttttttaaaaaaaattgcgcgttcaccgttcgggttcagacgagttgcttgggtttgggttcgggagggttgcttgggttcgggtcgaacccgctcgaaatgttcagtcctatatatatattggttgtctcattaggcaacactacaagattaagttattactttattttgaaatcattgttaggtttcttatatatcagttatctcattaggtaatgatattgacattggttgtctcatcaggcaacgatagaaaggttgtctcattaggcaatattattagaaagattatctcattaggtaatagtatcgaaaaggttgccttgttaggcaacagtgaataatagttactttattaagtaacaacattagtttatcttatttgacaaatattttgttattaatgattatttttctttggatagtgtgattttctgcttatggattaagcatgtgattatttggttatgattaaatttgtatatttgtatttatctgtgtattgatatgaaatgcttaagttattactttttgtttgtgacttacatgtgttttgtggtgcatgtaagagaaagaacaagttaaaacaaccacgagttagaggtcttccctggtaaatttacatatcgacttatccgactagcagtgtcgagttgtcatgattctttttatgacactttcgacttatgtatattttgatgtaatactgattggttatcttttgtataattttaaaggggatcccaaccctaacaagtttatgatgccatgaatttatattttaaaatacttagtaaagttttaattaaatcacaattttatttaaacgattattttattattataaattaatttataaaagcacacatgtagcgtccttacgagttagggcatcacatatctattaatagataaattacacaaagttcattagatgaaagtatagcttacaaagcaaaatcaataataataggctaaccaagtcatttacaataaaaaggaataaaaccctaataacaaccccaactggagttctaataagctaccagcaatcaagcatcaataaatatgttgcatactaggtttccaaatcaaatgaacatctaatatagttcacctaccaatggctatcagccaatgatcttctaataaaaattgagacataacaatcctattgcttaaattataactaagagaaataataatctcattatttaaatcataaataagggtaataacacgaccaaaatgaatactgccaaccaacatctacggaaatagtggaaactttctccaactgtcagtgaaagaactaaaagttttcgaaaactaacttaaaagaagattaagttaaagaaaattagattaaaatggacaagaagagattttttatgtggttggggtgtcaataaatcttagttcacgagtcaacagtattaagctttgaagttatggagtatttactattttttcatacaagtatttcttgccaaaatttctaacctttgcatgaaggaaaaattcaatatttataggctccttgtctaatgggttgggctgacctggacccattaggatttgtaggttgaaaaatctcaaagatggggtaaattaattttaaatatttattttggccaatttaaggaggctcaaggttggggacaaccttcatccgtacatggaggtcgattgatggtgacagctagggtatgagttgtcagtattgtcgactggaaaaatagccaactaattaaataaactgattaatcattaataaggagttaggagtaataaataaatagaaagaaaactagtgcttaaagaggctcgaccaccttgtatgggtaatgacttactcttttttttttgttgttgtattacttgtgagataataccgtgcagatcactaaggaagataaagtgaattctagctatgactctcaaagtgtttacagagaatatctttcagaaaaattctcttagaagcgtgagtacgattttaggtttcggtcccttgcgcttgtgaattcatttactatttataggggaaatgttgttacatgtggctccgtaaaaagagtgattaaagggaaaatatccttatattttagggtgcagttacgatctgttgaatctcctttaatctcgtatagactggctggatcttagtttgtaggatttaatttgagataattgttgaagcttgttgaagaagaaatcaaggctcgtgtagccttgtctggtactcctagcaaggttgtttctagtcagcaggttaatcacccagccaggccttcctcgagacttgtcatccttgtgggattacttgtggagcttctcttacaaggtgttacttatatcttcttttgccagtatgttgatgacccggccagatgcttcatggatcatctgtagcttatgaatgtcagctccatatgggacctgctaggcacacttctgtccggaagattcttgtcatgttaaatagttggctggattatgccacgtgtaagtgtcaagtcagatgtgtaaactttgggatagcaagtatgttgagggaatgtcaaagtaatgggtgtttgcccaaaaatgtgatttgctttttgttgtgcgtctttccaaggcttgacacaggggataagccgctagattttttgagattcttgttagagttgtgccacataggatggttcccaaacattcattttgtatccttccctaatgacccctaaaggcatccatcttcatccctttgggtacttgttgacagaataagttttggccttatagatctacacgttcaacttagtcattgtggagagtggtggaatttggactctttgtccaactctgctcatggacagagcggtcactccaccttggcttaatgaatgggcatgttaagctaaatggggagatctgaatttacacgtgaggcggtagatagtagttgataaataaatacaaattaaatacttttcactctttttactttaatgattaaaaaactataatataaatataaacaattatataaaagaaaaagaaattctatgatttattaaccaaaaaaaggtcaaagataattaatttacatcaatttataaactaacatccaccacttcactcatttcataataaaattgaataaaatgtgatggaactatattagtgtaaaaactatattttgaaaagtattattaacaagccatacattataaggggcacaacttgataatataaaaaaattaaggtaaacaatactaattattgttagagaaattgagaatcgcaaaggattctcttaatagtggctctatcataaagccatggccattggtattgtgtatcttggggcttgaagctgaaaaaatctagatttttagggctcgtttggtacgtcgtattgtattgtgttggattgtattatactgttactacaaaaaattaccctatgtcggcggttaaaaacccatgacatagacctatctcggcggttcacaactgccgagaatctgaccgtcaacatagatgtgttgatctatctcggtggtttttaaccgccgagatagagtaccctatctcggcggttcataaccgtcgagttaggctatcctatgttagtattaacttgtattaaaagattgtgtaaagttgtaatatattttcaataaccttgaccccaacatcgactccaggtcaggtcaggtttgggtcgcggttcaaagtttaggtctggttcttaggttcggggttagggatctggctttgggtcccaggtctaggttgggtttgggtcccaagtcccaggtctgagtcccgagtttgagtctcgggtcatggttagggtcagggtgaaggtcctagttcgggtttgagtctgggtctaggtctgagtttaggtcctaaatctcgggtttgactcagagattgagattggtcccgaatcttttgtaaatattataatacaagctaatacataccatttattatgtattaaataataaaatttatattgtattaaaaattttagttgtaataattaatttaatacattactttatttaaatataatattatttattatttaaggcttatttgtatcacaggtccctaaactatacatattttggcaagttggtcctcagactttattttctggtaaattagtctccaaattatataagttttggcaaattggtctccaaactttatattttggtaaattaatccccaaacttttatttttttagcaacattaagttcccgctattaaatattgatatttttattattaattttacttactttaatttatgtttttgtgttaaattcaaataattttatttttttaattttaatattttgagaaaataattatattaatatttttaatacttta

SEQ ID NO: 243928 - DNA, 840 bp, Cannabis indica
catgaaggtataaagggatatttatagggtaggattcagatatggacatatccatgacccgatagggttttgtgtaaattgaacccactattagggtaagtacatgaaatacatgaattttaggcccactagcagtcttttggcttgtggggtttaggtatctatacagatggggaccacgcggtatgggacagatgtcctgcggatgttgcacctatgtattgtggtgtcaaatacgtgttattggacaaaagggatatttttcctttggtggtgtgcacactaccttgttctaacataggagacaagatctgataccgcgggagccgagtctaaagatagccacatcaccatacaaagggcttacaaaggcgcctcttggaatactctccccggaggcatcccacaattcattgagagggcttcatttattctgtcttgggaaggttgagggccttccatttctggacaagccttgccttcgaagatgagccttattggccttagatgggctcgagcccatcttccgtctagaatgggcttgccttcatagaagggctttagcctaagtcattctagattaatcctcctttggagatgccacatgtcacccttctaaaaacatagataacactagtatatcgacattaagtatttagccatagataagcgtaattggtcattaaatacacaatactaaattgaatgattgcaatatctttgacttaaggcatgttgcaacataaattgaatgatcataaagtaaacatgtgattcaatttctccttttgcagtttttgttatacaactataattattcaatgaaactctaatttcgat

SEQ ID NO: 243929 - DNA, 2687 bp, Cannabis indica
aagatagcaatcctcacaattttgtctctgcccaaatcctgtgctacaaaaagacaagcagtcacatagaatattgttttgatatttttttgtaattgtcctatctttaccaacaattagtatgtcatctacatacaacaagaggtaaatctgattgttcaaatacacacaagtgtcatatttgcttttggtatagccaacttccaccataaattcatcaaacctcaggttccattatctcggagcttgcttcaaaccatataaagacttatttaaagaaaaatcttatctggatcattattttcatagccttctgaaatctccatgtagatttttcttccaaattctcatgttaaaatacagttcttacatccatttgatccacctcaagatcaaattttgtagctaaggaaaaaattactcctattgatgtttgcttgaccacaggtgaaaaaatatcattgtagttagtgccctccttttgaataaaccctttggcaattaaccttcccttataccttgttccttccactcttggaattctttctttccacttaaaaatccatttacatcttataagtctcttattcaattgtctctttactataatctaggttttattcttctcaattgacacattttcctcttgaatggcactcaaccattatgcaccatctttacctgtaatggcctctatgtagcttttaggttttacactctcaagatcttcagctactgataatgaaattgatgtaaagtcagcatatccatacttttctggtgctttggtgatcctcctctgtctgtccctagccaatcgatagcctttcaggcctatttaagcatcttatgtggttgtagatttatgtagatcatcttgtgattcatcaattataaatttagacactaagtccatctcaattcgaggtctactactccctgcttcttgagctgaggtaatatgtgtcttctttaccacgaccatttctcttcattgaagacagaatctctgcttataatgcacttcttgtagccaagctctaaacaccacaatttataccccttcacaccatcaggatagcttagaaaaagcttgtcctacctaatatgagcatatgcaatgcatccaaacactctcagttgttcaagcttaggtacttgacctgtccacaactctggtggagtcctgaagctcattggacagaaggacatctattcaccaaataacaagctgttttgacagattctccccaaaatggtctttccagaccttctcctttgagcatgcaccttactctctctatgagagttctattcatcctctcagtaagtccattttgttgaggtatgtctcgcacagttaaatgcctagctattccatgttctttgcaaaattcatcaaactaatttaagcaatattcccaaccattgtttgttctcaacttcttaatcttacatctggtctgattttcaatcagcttattccatgtgacaaaagtgttaagagcctcacatttgctttttaacagtaacacccacacttttcttgaataatcatctataatactgataaaacagctatcaccacccaaggtcttaactctgaaaggaccctagagatcgaaatgtatataggccaatctctccttagcagtatgcacatgtaataaccgcatgattacaatatagattagtagagcaattaacattaattatctttattttatagttgtatatatattgtgggtcctatttttataaaatggacattaaagttataatttctcaatttcagatattttagtaaatcgaagtgtattattcttaatatatgtgaaatttataattttcatgatttgtcctcgataacgatggaaaatatgatggatggccattagagttacatgggtgagtttagaaccttttacctagtgggataaacattagagatatttagaatatcgagtttaggcggggtggtggtttatgaccattttacccctaagccttaagtttgcataaatgtaaatgtagggcaaaatgggaatttaacatgagatttcattttgtctttagtattttaactgagctttatctagtataatctgaagttatttttaatttaaggaaaatagtattttgatggataaacatgatgaattaaaccaaaaaccattctcttagtctctctccctctctttctcgttcttcttgaaaccaaagaaccaagggttcatcttagttttctgttgattcttgttgaaaattaaaggggatctagtagcttttgaaaggggaaaattaaggtagccctagaattaatctcttttaagctttaaaaattccttttaggttatgcatggaaatattaaattagattttgtttgttaggatttcgtttgagattattttctacaacttagtaatgatgttttatgcttgttttagctgaatttgttggtttggtgagttgttaaacaagtttgagtttgaaaactcaaacttgactcaacaatggagttttgaataactatatgattttttttgctgttattggatgtttttacatgtagtctaaaaagttttgtgaagtttgggaacgttttgagtgagatatgaaatttttaaagttttccgccatgaaccggttaaccggctctgctgtaactgtagaactggttaaccgt

SEQ ID NO: 243930 - DNA, 1708 bp, Cannabis indica
attgataaggtgaaccaaaacatacacaaatgaatgaaaaatacttctgtgtctttattgatattgaataatccggattacgttgaaatgaagttttatttagggcataaaacccaacattggtttcttctgccacttggtaattcttgtaatagaatatgctgagacacatgtcggaatcagaatgtaggagcagggaattctctgtgtggaattagaaggaatgaatgagcagtagaattgatgagtttgtggatttgtttttgttacccatattctctattcagctcatgtttaaagtaagctagatgcaattaagattggtgttgaggcaagtgaatgagattgagaccaaagtgactgaattcatttttcatactctctgcttgtattccttttttagtgttgagggagagtaaaaattgatgtatacattaatgtttaatggttggcctatataaattcatatataatacatatcactgtatagttataatgttagatataaaaagatgcactatgagaatgtatgttataagctatatatagaaagaaagtaattctctaaaaaaataaagtaaatgttctgatttccaataatgaaacaaataaaattttattttttctgaaaaagaaaaaaatatactattatgtgtgcttacaatgtgctctattttacatataaattcaacttaatataatatttctatatttatgccccaacttacaatttaatccctagtgttttcatcatgaatttcatacatacctcactgccctttacatattagttcacgtgaggtggaggtctaacagcagctgtatcatcaacgacgggattagtaaaatcaaacaagtaaaacaatacacattagttcccgacatgacctttcggtccttcttctagcataagtttactcgatcgaacctggttgtagaaggtggagatctaacaacttctacttcggtatcatcaacggtaggagacaacctgaactaaaacaagtaaaacaatacatattagtttcacacatgacattttggcccttcttctagcataagtttactcgatcgaacctagttgtaggaggtggagatctaacaacttatacttctctatcatcaacggcaggagacttcctgaactaaaacaagtaaaacaatacatattagttccccacatgactttttggcccttcttcaagcataagtttacttgatcgaatgtggttgtaggaggtggaggtctaacaacttctacttctatatcatcaacgggaggagacttcttgaaatgaaacaagtaaaataatacatactgtattagttccccacatgactttttggtcattcttctagcacaagtttactcgattgaatctggttgtaggaggtggaaatctaacagcttctacttcggtatcatcaatggtaggagacttcctgaaataaaacaagtaaaacaataacatattagttccacacatgacattttggcccttcttctagcataagtttactcgatcgaacctggttgtaggaggtggagatctaaaaacttctacttctgtatcatctacggcaggagacttcctgaaatcaaacaagtaaaacaataaatattagttccccacatgactttttggtccttcttcttcgattgaatctggttgtaggacgtggaaatctaacaacttctacttcggta

SEQ ID NO: 243931 - DNA, 1634 bp, Cannabis indica
ctccctatgtagagaatatttcacttattaatttatatgtttgatgaatatccctttatcttcttatatatatttaaacattttaattttcatccacttacttgacaaattatttattttttaacggagttacatatagttttgtaaaaaaagaaggaaaaaaagagaatatatgttgttttagtatcttattattattattattattattattattattattattattattattattattattattattattattattattatttaatagaaactattttcttttcttttttttaattgaaaagaatatgtcttctaatagtgttttttttttgggtgtaatggtagggccactctccctatgtgtgcttattctcttgtcttttgagttttggctatggactaaatttgatttccaattaaaatttactaatatttacacgaagaactattttttagtaaaatatttatatttttatatttttataatgttctgtaaaagtaacagaaaagcaacggaaaaataatatccaaataacatcaaaacaacataaaatccctacacaaataataaaaaaccaacaacaaaataacaagagtacaacataacatggaaatatcaaaataccgtattttcggtaaataaaatcttaaaaacagtaaaaatatttaaaattttataaaactatatttttaatattattttgagtaatttgcgacataaatagctaagattgtagataaatacctaagttttatttttgacggtgttatatttttaaaacttctgtaggcacctgaccattaagagtcaagttaacaaccgtgtggtagtccctggttagtttaggtcatttaaatttttattttttatttaaatataccaataagaaaatgacatgtggataataacttactaaacttaatggccaagtaactacagaagtttacaaaaatataacttgtgtaatatttctatacaaaaataaaacttaagtatttaaatgtaatgaaagttaagtttaggtatttacgctgtaaattcctctatattttttgttttgtttatttatgaaataatacctaaaatatatcccattatctcattttttgggtatttatgaaaacatcccattatgtcaaaattcaaaagtcaacagttaagcccagcccagcccagtccaggtgagaaaaaggcccgacaataaagaagtcggccgatattttgagttgggccccagaagtgtacatatcacaaatccaaagctccctacaccgaacacgtggcaacacacagagcctcaaatttgctaaaactctatccaaacagtcaactacgtcacaccaggtaaccctatcacatgcaagattcgactctttcaaaaggaaaaaaaacgttatttcgccgcgtaacgacacgtgtaactacagtaaaattacacgtgtccgccagaaaaactttactattttaactattgttatttggccaagtgttaaggtgatggatattttttaaaaatcattatattaagtatcaagtcctatgtaatttaaaaaaaggaatagttaactaaagtactattttttgtaaattatttatattttcgcgttcaaagaatgtttttttacatttt

SEQ ID NO: 243932 - DNA, 860 bp, Cannabis indica
tgttaaatattcattttgattttattatgcaatggaatatcatcaacttatgcaactagtagcgtatagtaatatttaactatgtactcatttttaacctactgtattagttatttttctgaataatgttcgaatattttatgcagactaatttaattatgtgttgtttattcaggattaatagtattaacatatataatgataattatataattggtaatgtatagtattatcatcgggttataataagatagaatagacattcgtactaacactttcggagctcatagacaagttctaaaatatctttgatcaacttattagagccaaaacaaactaattttttcacattaaacatgtagatacaattagtctataattaattaatgttgaataagtgtggctacgatagaaaaatagaacacacaagctctatttttatgtgtagatcaaaaaagtataattaagtacactctttatttttgtctttatttttttctctaatttttaacagttactcttataaataaaagtgtaatcagtatggccattggagatcaatgtcagactagaggtatgtgttaatactttaaaatttaatgtgtgatcttagttaagatgagtatgatttgttgttgtttattatggtgctgtgtgtagtaatttctcaacaattaattgttaattttcttgattagaaatgccaatcaatggacattataagaaaacgacattactcttttttcaagagcatatattgtgatcaaagtgatgaaatgtattttttttttatttagttttgaaatagtttgtgttttagataattataaattacttatactccaatataatggacaaaa

SEQ ID NO: 243933 - DNA, 1466 bp, Cannabis indica
attgaataaacataacgggaagaataacattttctgaagtggggtgagttggttattgtgtcacaccacaccacaccacaccaacccggctcggcccggaaggacggcgcgcgcgcgtgtgtggtgggtcaagtgtgtgtgtcctcacccattcgcacaaaactgggtaccccttgggacccaaacccaaatgccaaagttgcactctttatacccttgtcaatgagggttcatatcccatgtgggactctttccaactcacacacactaagacacttatatattttgttaaaatattcacaacatttccaacagtttcttcatgtactctcccgactgacgttggatcataatgtgctaattggaatttgaattagcacaaactaataatacctcgaatgatcatgggctgaaggttataaatacaacttgccttttgcctttatacaaatttattttctttaccattttttttagagtacaaactgaaaaaatctcactagattttttttttgttgtttctcccatagtgtcagacacaatactattatcattgttatgtcgcaccatctttgagtttagtgatatttgatatcaaagcttcttgtaattattttaatttgtaagttttaattcttagcccagaattaatgtgaatgtttttcgcaaatactttaattaaatttgctctttcaacaacatttaatacaacaagattatgatactggtacgccgtagtgcaacaaagtttaaaggatatagttttagggccggcatcctaattgtcatgccaacaatttagtttttttaaaaaaaacaatatataaaagacttttaggtccgacaagaggtcttttggcacgactactgtcgtgcctaacttttcttcggaaattttcttgggtaacaagttggacacgatatatatcggtctcaatagtttgtcatgtggtgcctattggttcttttggcacaaaatttgtaaaaaactaggcacgacaatgccgtgccaactctacacacctaataaacactaatgcctccttttttctccgctctttcagccatgttaaaatttcattgcatttatttaactaaaatgataataaaactgtgttttggtccccttccattcacatatgattctagcaaacacatcccttaatccctcctttttgaaaaaaaaaaaaacttaattttgtgacataataaggtataacacacacattaaactcataacctagaaattttttgacaatagaatttataattaaaactccatgacccaacatataataaaaggatgaagaagaaagtaatatttcaggaaatttatcctcttattattaacaaatttccttattcaaaaagtactagtacaataatgtgcatcatcatgatcaagtcttttgatttgcaagagaaataaataccaaaataaaaatcaaaatactagtactatatat

SEQ ID NO: 243934 - DNA, 2294 bp, Cannabis indica
ttttttttttttttgaaagggctcatttcattttattaacataaatattatgataaagaaataattttttcaattttttattaatttaaaataataggtttgttacaataaagttcaaacaattaccgtgaatcattcttggtcgcgtgtaataataaacataaaggttggatttaaaattaaaataaaatccataatccaaattttaattttgatccaaactaaataaccggtcaaagcaaagcaaatattaacggatgtctacaaatttctggtcaacgatataatatagaaaaacagtaatttattaaaattactagtagtaaaagaaaaaaaaacagtaatttattaaaattactagtaataaaagaaaaaaaaatcttttgtttgtttgtttattttaaataagaaaattaaaaaaaaaaaaaaccaagagtagatttatttatttatttttgtttatttatttaatttttattttgggaaaaacagttatattttatttttcaagcaatgaccaatatcattaataattaaataatgtcatacaggctaaaggactatatattttaaataataaaaatagacagtctctagtcaaacaagttgtttacctatccgaagagcatgcacaactaattcatatgcagctacattagccgactgatatatatagatcagagacactttgggaaatccagataacatgcttgttacatcttttaacaatgatcctaaatcactgaaaaaaaaaaatgtctcctaacaaaggcaaacacaattgctaagacgtcagatgcaataaattcaacaaactttgaaaggaaaactatccaacatcgctaatatgtcaaacaatatgcttgaattactgataatctacatcttccactccaatggcagcgcaattattttttcagcaaacacttcacatgccaattagtgagtgccatgaaagataccttgggtttccttcttattcgggtcgtgacaagaaggctttgttcagccacatcaaagaacaaatttggaagttgatgcatgcttggaatgaaaaattgttttcagttggtggtaaagaggttctgttgaaggcagtggttcaatctataccaacttatgcaatgagctgctttcgattaacaaagaccttttgtcaacaccttgaaagcatgatggcaaacttttggtggggttcaaacaaggatggctctaaaatacattggaaaagatggaacttactttgcaagtcgaaatttgaaggaggaatagggtttcgttctttcgtccattacaatcaagcgctacttgcaaaacaagcttggagaatctttgatatgccctcttccttttttagcagaattcttaagagccgatactttcctcgcaactcttttttagaagcaagacttggtaattccccatctcttacatggcaaagcatacattggggacgggaactacttgctaaaggccttcgatataaggtaggaaatggctttcatatacaaagtggtcttgaaaaatggattccgggttatatggagtttcgtccaattacttacacggggcccccatcccagccggttgctagcttcatcacagatcaaagggaatggaacattattgttcttcacaactacttcagtcagattgacattgatagaataatctccattcctttgagtttttttccttacagctgaccgtctaatatggcaccacacaacatcggatgagtacactttgaagtccggatttcatttggctgcaactttggatgagcaacaaaattctttcacttcaaatttacatagttcttggtggaaaaccttttagcacttatcattaccgtccaagataaaaaaatttgcatggaagattatgtataatgctctcccaactgctgcagcattgcataagcggaaagtacttgattcagctgcttgttcgatgtgctcttgtgcttgggagtccgatcgggcatgctctctttagctgccctcacgcaaaggctagtatggaaacagtgttggtttcatcatggactctaccaaggcgcaacaaatgtttaatggtaattatattttctacctttctactctacattcacaaagggattttgagctaatcatttgtactttatgggccatatggtcgagtagaaataaatctttacatggcagtacaagatctaatgggaagcaaactgccatatttgctaaagattatgtggaaaaattcagacattcgtccattcgaaggctaacacatcatgtgttgggttttatgcc

SEQ ID NO: 243935 - DNA, 1322 bp, Cannabis indica
atcatcaaatacaataacttgtgcttcctcaaatctagtataacgacaagttgtcgaacaacccttccactatgatgtattgtagatgattcttgaattggaattagctaggtttctttccaacttccaattttttttattcttacaattaagtaattcctcgagtacaactttacttagaggtttcaagtttctcatatagtcttttgccaaaaaagtagcataggtagaaataaatattttcttgtctattcgactataaaaataacctcctttagtgcctttatcatatcctataaatagtaatacttcatatctagattctaatttcctaatttttttctttcagcacgtgtgttggacacactcatatacgtacgtatctcaaactatatttttgacatgtccatactgtaagtgttttagctatggacttagatggaactagattaaaaatgcatgcaattttatgtagtgcatatccccacaataataatgatcacaaattatcactacacatggatctaagaatgtttagaaatattttatttcttctctctacaacaccattttattgcagagtacctggtacaatgagttttgaaactattccatgctctattaataaattctcaaactcattatcaaggactctccacgccgatataatctcaatgttttgatggtttttcttaactgatttttcagctttggatcaaaattcaataaacttttcaaaagttttcgattttctttgtagcagatagacagatccatatctttaatattcatcaatgaagatggcatagttctcaaaaccacctcaagcttgaatttccatgggacaaaatatatctgtgtgaacaagctacaatggttctttggctctaaagtctttagtggagactttgtattaccctctagacaagattcacaaactgatagagtaccgaccaccaaatcatttaaaggtttgtctattacaagactttgtattatttctaagctaatatgacctagtcttatatgtcaatgatatgtaatgtcaaatgaaatcttttattttttgggtttagatttttcacttttgaacatttcaaaattaagcagtaaagacatcttagatctcacaatataaaaaccctcctctaattcttctgtaaagtaattttttggcaagttagatgccaaaatattttttttttgtgatgatatttcttagcttacctaaccgattttctcacctttaatattcaattttatagctcttttctatgttaggaaacttgcatttttagttggacttttcttgtatagaaact

SEQ ID NO: 243936 - DNA, 3502 bp, Cannabis indica
ccatcagtatgctcgatatcaagccacaacacatcataaggaatatcatgctcgtcaaacttggagtccacattctcaacatcctcctcgtctctataattccacctacactgatgataagcagtagcaaaaagctgtggcatcgatggccggccagtcacactggtatactgccttacaacatctttaggacccggaccaacgaaaaagaatgtgtcaacaatgcctgcttcgctcatccaaaatgtatcaatcctaccctgagacgaaggcagagaaattccagactctgcatcccatccagacccaagaacatcaatctgcatttcagctgagttcaaccagaaaaacccagaagtcccacgagatttcccatgggaaatcatgaagggtattgatccataaagcccaaatggggattcatgaacgtactcaaagacatccaaattaaacaatctataaggttcagattcctcaatcccaggtcctctggtgggcttaagagcaaggcttgtggcatgttcaggaatcccataaacaaaatcagcatcataaaacgacacgtcaaagctaatagattgagagccataaggcctcgtatcagtatgtcctttaaacctctcttcccattcttcaccttctttcttcaccttcaattgctcaaaatcaaacaaaccatgggaattaatagagattacacgacgcttaccttctttttcccgaacataaacttcgaacgggtcgtggcgaagaacgacctcgtagccgtcggataaataaacgacagacaacgatgaatcttcctccgtcgaaagcttctgaagccaaagcttcttatcatcaagctcaggcaaaatcacatcagggacctcaaaccgcttctttcgcggttctagcttggggtcctcatcgatctttagccgcacgatcccgtcctggtaaacggagagactgagaatcaatggcttggattgttcttgatctgggttttcgtgattttcctttggaaggagcttagctgtgagctcaccattgacgatggtgacatcatgggcaacgagggcgcatgaaccagggctgcgatgccgggcttgcttgcagaatggggtctggttgcaggtcctgaattcttccttcttccatgagagaactgagctcagatttgagcccagaagaaggagaagaaataggagactgagatttccaatttgggtttccataatggctgatgattgcaaggaaaatgtgaagcgaatgcttttaaacccaagtatttttctagtaatggctacttggacagttctattctatggatgcaaagctactacttggaattgctttcaaggacttcagtaaattaccacacattgagaagttatgtttaaagaatataaaatttaaaatgcataaaaaaaattattatatcttttttcatcatgtattggaatagtctttcttttcatttcaaaatagaatagtcattccaccaaaatgataaaaaggtcattctattaaaatgacattccaatactttaatatgcaatcaaacaaaagaatagaatgaagattgtttgatttccattatatttcattacctccaactacaacgccacattttttttcttgctaatacccttctaagctttacttatgtttgcagattaaaaaactgcgagaaattacgactaatgttacagaatcaaatcagttaaacattaaacaatacaaacaattaataatgacaagatttacaaacactaaatcaaaatcgaaaaaaaacataagggcaaacagagtatataatttcagaaacaataaaagcaagaaataaaaaaaaaaaaaaaaaaaaaaaaaaaacaacaccaatatatatactaattcaagtacgatagatcaatgtgatctatggctctactccagttctggaacaccaccgaaatccttctttcttgattgagcaaaagtagatacaatacagtcgggatgagattctttgttgagttctcacaaaatatttcaactctcacacttacacccaagaatcttcttcatttatagaagattcttcttacaaaatccaaatccaatctctattttctctgcacctatctctccacctctcaatcctctcaatcttttctctctcaaattctcaatctcatatgaactgagttctcaatctcgtgtgtcgaaataacaagtcaaggtggtagttatagccttaagatcaagatcctaaagtcgatagttgcaaaaaacgaggttgttaagttagttagaaataaccaacttaaccaactcctctttgagccaagtctccacatcagcgtaaatatcagagctttcgagactcatggaccaaggacactcgctgatgacgctttcagatagaaatgggcctactagagtcgactatccgtaactatccttttaggagggataactagccaactagagctctatcccggagtgagctaactatcctgaagactaaacctggagtgaacatgatagttattcgagaacaccctttcagactcaacgatcatttcataagacaccttccgggatggacaagttagttgttcaagaacaacattcgggagacatctaactttctagggacgactttccaaggatgatattggagaccttttcatttagaggaactataccacaaattccacctagttacttcaaattaaaagaatgacgatgatgaataaagaatgcatccatcattgattggtgttccaggaatctcagtgtactaacttatgagattaatcaagttcaagcaatgcttgaacttgtttaaggttaagaccttagtcccaacatcaacaggattatcttctgttctgaccttctccaaatcaatcattcatttttctatcttctctccgatccagtagagtcttatatttatatgctttctcttttaatgataaactaaattcttacaaaggtggatggacgattggctatccaaaaacacattcactccccctttgatttttttcaactcataaaaactccctaaagccataaagcttccttgattgcttttgtagttgccataaattctgcttttgaggtggaaagagcaaccacggattgtaactgggccttctagcttatacagttccggtttgttaagaaaatataagaagtggttgattttcttgtatctctattcgaggcatagtctacgtccatgaacccttttaactccaattctccttctactttctcataggttagaccataatctcaagtgcccttcaaatatctcaataaccatttaagggcttttcaatgttccatgcccggattggacatgaaccagcttaggatgcctaaagcgtgagatatattcgatctcgtgctcaccatcacgtacattaaacatcctagagccacaacctaaggtacatccttcatattttctttctctttcgtgctgttaggacattattcttttgacaaaacaaattgaccc

SEQ ID NO: 243937 - DNA, 1180 bp, Cannabis indica
agatctccacaaatgcctaaatgagggggagttagttcacactatactctttttcttatgacctgctataacaggttgctaataggtaagtgtaatatcttaaaaatatatttataattaaataagcatattttataaaatatgacattatgtgtgtgtggtaaaagaataaatggataagataataatcttactatgataattatgtgaattaaatttattaattaaaattttacaaataagtgatatttattaattatggagattaaatatatgggagctaggggctgcaagcatgcaaactagggagctggacgctgcaacatggatgttggggcctaaagtggggaggggtgcgaggagcccaagcactgcagcatggaggctaggcgcaataacgtggagctgggtgttgtggtgtgtggaggctgggtgcatgtggtgctttggagcttggttgtggtgcgtggaggttgggtgcaggtggtgcgtggaggctgggcccatgcaatgtgtggaggccatggaagaaagaagaagctaatatgatggggagatgtgacgaggagacaaggacaaaagaggtggggaccatcccttgttccttttgtttgtcttgagaatcttgtattattcctccatcatattttttgttcataggaacactcatttattgaacttctacagttaacacttgcccctagtccaaaagagcgatttgaagtgatctttttgactacaactgagccgttctttaagccctttgcgacgcacctcatctggtgtgacacttgacatgacatactaaaatattgatgagaccattcaatgaggtaggtgggtcacatgtttcttctcatgtgtgcatgtgaccaaccccaaccgtcgatctcattttgatccaacggtttccatccatctcttcttcttataaataggctctcactttcacctattctcatctcatccttacctcccatcacttgttatctcttttagcttcatactcttcccaaacacttcttacatttcgagcccttcgacgcttgctctttcttcgagttctgacgttgtgagcctcttcttactcacaccaatcttgttaggtaccttcttgccccatcaacattactttttttctcttttatatttatacacctactacacttacgggtaccac

SEQ ID NO: 243938 - DNA, 2168 bp, Cannabis indica
aaaaaaaaaacttttggacattttgtaattttctcttcatagacaagtgtctcgatcttcatgggagacaatactcttagccacctctttgaggaggcagtgcaagtgacaactgacgacttaacgtacagactagacccaggggaaattgactcacatgaaccgcaaggaaaagttctccttggcaaactcatttgcaaaggaaagcttggaagaactgcaattgcaggaactcttaaaaaggcctgggcttccctcaaaggatggagattgaaagaggatgacgaaggaatactccacttctcctttgccactaaagaggatgcgtggaatgtattacaacggaggtcgtggattatatgtggagccatgctagttattatgccttggccgtcttggttaacaccgacagaagtgaagttcgataagtctcctttttgtgttagaattagtggcattccacctttctatggaaataaaactaatctcgaagaacttgctagaaaagtctctccaaattacaaacttcctagatatattgacttcgagcgaggctccttcggcatggggacggttagatttcgtgccaccattgacattgataaacctttgttttcgggcttcctcatgaaacgggaagccataaaagacctctggctgcaatttaaatatgagaagctcttttaaactgtgccttaaatgtggaatcatatcccacgctcaaaagttttgtttcaaaccgcctacggttatcaaggatccccatggagcattttttcctatgtttggcgcctggatgaaacacgaggagccggcgagatcaccattttcttcccacttccttattggtttgaagaatggatcatccaaaaacgtttgactgttgaccagaagttcaaacaacagtggaagatgtgtaactcattaaagattgttgatgcttgggacgcaagggagacaaggcgtcaacttcctgggaagagaagattggtcgaacaagtcatggaggagctgccggcgacgaatgaaataagggtaagtcattttccgatggtcactcttccgggtgttggagaaagtttgccctcttgaggacactgccaccctagtggttcgcaaggaccctgagaacttacttgttttggatccacaaagtgacaaacatgatggagactctaccatagccccccagtcatcgggcatcgtgaatggtggtatcactacatgcgctcaaactgatccaacctctgaggagcctcctcaaccctgcatacttcagacgcaggtaaccagtgattcaaatgccgagtttacctctcaagctcaacaccctctgaagctttgactactgggtctgatatttgccttctaacccaaacagattcttctccccttggaccaactcgttactctatgggtatgggccgagagggaaaggcccacagatcttacgacaacctccttggcagccaggcccatgaactcgcatggccctctaaagatctatggactacaggctttagggccctcacaggtttgggcacagttgacaagtacatgcgtgagccatctttatttaaccccttgttggacatagagcactttagatctttggagcgcgaccttgggccaaagaaacgaaaagcccttaatggaatctctataggcccatgtcctaataaggctccttcatctgaaatatcgactcaccatggccaaacctcatgtgatgctacaacgtcttcacaacttactgaacagggagatctccagaacaaaacctcccttactaccacatcaggtttttccccagatcctcaactgcctctactacaaaaaggaaaagaggaagaccgtctacggccagcctcactgatcctgttaaaagcccctctgagtcgcatgagccctcgcctccgcctaggagaaggggacgcccttcaaagtcatcactcagctgtaacttgaattcatttgtcaaaaaaaaaaaaacaatcaaagattgaagcaagaaaaaggcagagcgccatcagatcgaattgggagaataaggtctttgatctaaaatttgacttaaacaaccacttcgtaattgtcgattgtaaaaaaaagtcatctcaatcgtgcatcatccaggaaatttcagagactaatggagactcgaagct

SEQ ID NO: 243939 - DNA, 2164 bp, Cannabis indica
tttttaagaaaattactaattattacctaaagcattctgacgtcttagtaacaatgctcttataagaaaatttaaagacaaaataaataacaaaattaattaaatcattgatccattcagctcttattgttcttacgatatacctctgttttggatttattctaagaagttgtagaatataaccatcttaaatttacttctactagttgattgccaaaacataagaaacaagcacaagtttcacatttgtttaaaagataatgcaaatgatcattccttcgtgctctttggtttaacacacataagatattacgttttaaaaaatgttaataataataaaaaaggtagtaatggatataaattgttacttatgcattcttcaaattttcgctgtagtttatttaataacaaccactataatgtttagtgtttactctcgactttaaaacttttattggattattagctagccttacccgacactaaaatgaatatgctcacctatttgtatctttaaagtggagccaagaattaagtgcctctttgcggaccacactcacaaaccaggtcacacactctcatgaagtgggtgattatgattgggacccttttctactctgattgaacttaagcttataccattggccacaatcccaacctctttaacccaaactttttaattaaaataggatccaactgccaagctaacccttatttttccttatttactgtcacttttcgtattttctttctcaaaaaataagattaaaagaaagaacttcacatctcatcatcatcatcatcaacaatgtaaatatcaaacaaagtacgttgtttcttttgtttttttatttaatctaatgaaactcacacgtcactttttaaacctcgtattaactctaattttttaatgttcacatattaaggacaaaattgtcattaacaatcttagaagaagacagaatggtttgcagtttggtgggaccctttgaaaaatatagctgttgagaggagcggttgaagcaataaaagtgtacttgggattcaatccacccatggccatgagatcgagacacaaaagaaaaaaaacaatatcaataatgtaatggtcagattgaaataagaaggaaacaatttataattgaaaactagctgttaggtctaggatttgtaagaagaagagccacccttacaaattataatgcacccaccaccaaaaactcgacattctctctctcatacaaacatggtcacgtgccatttcacagtcctaccgtaggaaaacaccacctctttgctctcactacttaacattatcaaagtgatagaccctgtttcattcttctcgacttcctacttatttatcttagctataactaagtagaaacacttaacgaaggagagagccaatatagatgcttccttcttcttcagttttattcttcctactttagactttagaattacccagttgagttaagtctttctttttctggtttaagatgaaaagagtggtagattggcttcacatttcgaaaaagaagagagaaaagtggaagatttcttctgggtcaataagatataaccatttcttctacttttctcttttgctattgatatgggtctttcagccagtttcaagccaagatggggatggtgtaatagttacagcagctgattttcaagcccttcaagcatttaagcaagaactaactgacccaaaagggtttttgaagagctggaatgacagtggctatggagcttgctctggtggttgggtaggaatcaaatgcactcagggacaggttattgttatacatctttcatggaagggattcagtggtcagatcactgagaagattggtcaacttcaggcacttcgtaagctcagcctccatgataatcttattgggggttctatcccttcaacattggggttccttcccaaccttagaggagttcaacttttcaataatcgactttcaggttcaatccctccttcattgggttttagtcctattcttcagactcttgaccttagtaataactcactaagtgggactatcccacctagtattgcaaactctactaagcttttcagaatcaatctcagtctcattttgttttctgggtctatcccttctagcattattagctcaccatc

SEQ ID NO: 243940 - DNA, 1838 bp, Cannabis indica
ataaaaattaaaagtcacccataaatttctcaaaaaccaagaatttcagttatataagcacactttatatagaatagatatatatatatatttaaggaatgaatatagtggggaaggtaaggactttttatattctattgatggaaaatggaatggtgattaagtgttaggtgatatgatagtgggttcaaatattagtatacttgattaattttgtgtattttatattgttatattaattttttattggttaataaacggtatacttctatctatttgttacttttaggaaagtttttaaatattttttgttcagtatattataattatttggaatttttttttgtaaatatttaaagaatataaataatttaccgaaaataatatttaaatatttaatatatatatatatatatgcataattttttttttcttaaatatcttgaaaacaattgattgaactttattttaatacagtttattattcagaatattctaaaaacttataagtgattctataaaaataatgtatgtgaatgtaatcataatttttttactaaaaagttctgcttagaataggtgtactaaagatttttccaaaaattaaaaacttaaactttattatctatatttacattaaaaaggcactttagtcaaagaccttttgaaataaatatacatattttcaatgaaaattatgtctaaactatactcattcattaatatttgactatttatatatgtttaaaaatgaaaaagttgtaaaaattgagtttagcttttcagttaatcctcgtacgtgtgatgtgaaacgagcgttttaaatgaaatgagagccaaaagagtgtgcctttttggataaccaatgactcactcactcaaccttattcatcaaatataaaataaaattatataattattatttatttttatatataattaatttgtaccctttaataattaggttattaaaaaaaaatatatggatcctatatatacagacaaaataagtgtaattaattaatgtataatatatgtattagttttgtactaattaatggtatttatttaaactgatattcattattactacactgaattacacctacctacctacctaccatacgtactctctctttctctctctcttatatataagaatgtataggttggacagtgacagtggacacagtcaccactccctcccactccctcccactctcctccgtaccataccatacgtactctatccattttctgttagagggttttgagaacgaagaaagaaggtgcctcaaccctaatcattattatcagtcatatatacattattcttggagggttctcttaggttgctgctctaatttcctaaatctatcctcatttttcttaattttttccggctttgagtagcaacaaaattcctcaaacgaatattataagatgcacgttgtttctttttattttattgaaaattacataaacgagagaaagaaaccaagggaagggaggcggcgactggttttgtgaaaccctacacagagctcgaagctcaaagctctgcacattcattctttgaaggtgtctctctctaacatctctcttttttgaatttgtgctattgttaaagtgaactttgcaatgaatgaggaaatgcatttagaatcatgaattcgtgtttttctttttggctcttgaatgaggggatgagtgttgctccgtaaatgcaagtgttttttttggttaatctgatttcgggatcgttgaatttgtttgccatcagagaaaattggcacttgagaaataactatagggtttttcagatactagatccattg

SEQ ID NO: 243941 - DNA, 1489 bp, Cannabis indica
agtcgttattgatgagccatgagtcgttattgatgcatggtgggacaagttatgatttttccttttcctaccctctacttaactctagcacataacttatattaatttaagggtataatagaaacatcatttatgaaaatagatatatatgaaagaatataaaaataaaggtaaaaattaaaatagataaaataaagtggtatactatataatttccccaagattaaaagcaaaggaattactaaagaaaacaagccacatggggctttgcatcaggttgttatgagacgagatggattgggttataagaggagagccttagggttctatttgcttgttgcgtatttaatactcaagaatttaattctctggaaaaggcttgttgattggtccataatcagagaagatattgctccagaaaattattttctttctcgggcaattaaagctgtaactcaagacattcaattaagagtgcagtgcacatcatggtgccttgacaactatgcatgggttgctgaaccatatgatcatttccatcaactcactcttggaaacattgaagcagtgaaaaccagtgccaaactgtacagaaaatgggatcaacctgcacatttttttccgcctactgaaggactcccttaaatgtcatcctactgagtttgctctaagtgtgattcatttgctggcttggttttttgacagaggagaaccaaaggttataaccacaaagattcaagttgatctccttcaccttcttgaggacaaggtgaatttcgggcgaccagtattgttaggccttaaagataaataaaaagggtacattggtcattgtaataagagtattaagatagtgtatatgttaggggtcatttggtatgcaggttttatttcgtgagaataggtttaacattacttggagagtgatgaatggaattgtaaacctagaaaagcaacattaccgtgtttgattgtccagagtgtttggttgacataggaatggaatgtgacaatttttttttcacaataataacttgattttttttttgtaaaataaaaataaatcagtactttttttttctttccaagtgttcaaaatactttttatttattatttttatataattttataaaaaaaaattaacaataataaatgattataaaaagtaaaatatatatatacacttgtcacaaacaatcaattgcaaaattaatttgttaataattttttcaaaaattaataattcaaacaacaattaaagttctttaacacataatagcatatcttaaaaatattggttaaaatcactcaagaaaaataaatattgattaaaattttcaattctaaaagtttgcatattatctagtttataatccaaaagatggctattatattgccaaaagtttcatccaaaagattaaattaaccagctaattaaaagtttttccaaagtaaaacacatataaattcaccctaatagtatttttt

SEQ ID NO: 243942 - DNA, 1425 bp, Cannabis indica
tatatatatatataatatgttatatcgtaattttatgctacaaatgatatattattttgttcttacaattatttatgttgtattaagtttggtacttcttaagttacaaattaaacattaatttcttagttgtggtttttgtcagttcttaatcacatatatattgttgtggttatttgtaaagaacgacttactattgctatattatggttaattttttatttggttaattactattttagaaaatacgtctttaatttcctttttttcgtctactttttagtcactttgaggatcaaaaaaaacaacacatgaaaaaatataattatcaatcatccaggaaatatatataattatcaatcaaatagtgcataataattattatgttacttttaaatgtgttatattattgttttaattactttgttatatattttttttatacttaagttcttacaatttttttatttcaagatcgacgtagcagcgggagctgtggggtttgtaggatcgtgatggatgccagaagtatttgctattgatgccattagtgacagaggtcaatggcgattgatactatgtaaaggcttgacaatggccagtcttgaattggaaagaaagcaaaacataaaaccagaaaaaacaaacgagagagaaagagaatagccaaagaagcttaaccaaaatggttagcttatcactttatatatactgattgaataagcaagagtacaaaacagctaacagaaaaaataacgactttaactaactaagctagcaaatcaaaaaatacaattactagtttcaccttgtattggcaataattggcgttctatattgacttcacgatgttaaaaaggagaggaggaaggcaaaacggaataagagtttttaaaatgagaaagagtattgttattgagcactagtaatgcctagcatctatagatatgtcgtcttgtggttggctagcaatactccctaaaagttattatattaaactatatggaacccggccgatgcttatttagaccaataacaatatagatacataggaaggtgttaggcactactggtgtcttttaacatttttcaatggaaaaatgagttccataaaatttattttggttataaaagtattatcaatgacggatctataccttattgaaccctaacttaaaaaataatcaacctttattttattttatttttatataatttctttaaaaaaaaaattatttttctacttaagttcttcttacaattttcttttcatttacgcccctcctcaaaattaaaaaaaatgccccaccctaatattctagttattccgttaaaagtgtaatattataattaaaagaagtgagtacattttctttttttgtaaagttacataattttttttgtaagagtacatgtacttagttc

SEQ ID NO: 243943 - DNA, 3315 bp, Cannabis indica
attgcagttatattgttgtgctctttaaatgtgattatatatatatgtacctattgtatatgtacaataaaagaatgaattttattgttattcgtattttatattaatctcgttatattaaaaaatattttgataaaatttgaatttgattagagaattaattacttttaaaatatattttatatattatatctaaatttatatttaaaaaaaataatgatagtgataaatacaagaaagtatggttataataaattgtaaatgaaattaagatttaaatatatattttatgtatagttgtgattatatataaatacaatgtttatttttaaatatatataattaaattaaatttttttatttaaaatatttaaataatttttattttaaaatacatataataatattataaaattaataaaaaatattctattaaaactaatataaagtagaaaaaaggaagaagactaaccaccattttacataatgagaaatgttaaaaaagtagtatccttctcaatattatgtaattaagtataattagaatgaattaattggcaagctttaatcattcaagaataattactaaaattcgactgtgccagctttaagattctatctactaccagttgaaaactttttttttattcctctccttatttaatcttaataaaaccagaacctaggtggcatttacggaaagttaccccatacaattacaataataattcacagcaaactaaataataacacaataataaaccacaaccacagccaaattttgcatcaaaacattttttttttgagagaagcatcaaaacatgtttgattttactttattatttagtttacatcaatttaactggggagcaaacgaagaaaaagaagaacaccaccaaaaaaacagagaagagaaactgaggagaaaaagaaaaccagagaaacagcttaaccattcattccaaaagaaaaggaatatagtaggttgcttttttacttctctgttttacgtggctgcagctgaattgaatgaggaagtagagaagcacaaaaacagaaatgcccccagttttttctgaaagctttaccattcattgggcggaaaggaggatcgaatcaatggttgtccttagcctcatcattcaaaccatattgagcatagccggaagaagaagaatgtattgggctagtagcatagtcagatgctttatatggatggcctatctatcagccgactgggttgcagtactctctctcaccttaatttccaataccaaaagaaccgatgcaggtgcagcagaggatcctagcccagactacgttataaaagccttttggtcttctcttcttcttcttcacctcggtggccctgacacaatgacagcttattccttggaagataccgaattatggttgcgaaactttgttgttctctccacacgattcgtagtctctctctacatctttctcaacgcttggtctgaagatttgctcaactatctctcccttccaatacttgtggctgccatcatcaagcttggacttaggatttgggttatgatgagtgccagtagtgaatattttagaaaatcattgtttcctgatcctgatccgggtcctgagtatgccagatacatggatgagtatagtttaaagagagaagagggatttcaagtgtcttcaagaagaataattgacatgcctaaagtaggccatcatcttaattctgctccagcaaactttacagttcccaattcgaaaagcttgttagacgcgtacactttctttaacatgttcaagccacttttcgctgacctgatcttaaacatccacaacattgtcaatagccaatccttttttcaaaacagatcatgtgaagaagtgttcagggtgatcgagatcgagcttggattcatgtacgatgtgttctacacgaaagtatttacgttctactctaaactaggcgtctttctccatttctttagtttgtcatgtgttatttctgtatttgtggcctttgtcgtggctaacaaggaagctcactccaccattcatgtcatcatcacctacatactgctcactggttccaccattcttcagatatataccttttttgttctactctgttctaactggacaatgctatgggtaagcaagcgtaagaaaattattgctgatctcttgtaccagcctatttcctatattccaaatatgttgatacccaaaaacaagacatggtccaataaaattggacaatacaacctcataaaattttgccttagatataggcctggcataggcgctaaatatctgaaaccctggataagtttttatgatgagttagtatatgggtactatttcaagaaccgtagcattactaaggagctgaaagaggagatctgtaagcagcttcaaaagaaatctagagatacctcagataaatttagggattgtaaagaattatgtgatcatagaggtgaaactgctcttaaaaatgaggaatgtgatgaaaaacttggctggagtgttatgggagaatttgatgaaagcattcttctttggcatattgcaacaaatttgttctacaacactgatgtggatgaaggcttgaacgattgtaaagagatcagtaagtacttatcagagtatatgatgtatattctgctcacgcggccattcatgctgcccaatgggattggacaaatccggtttcaagacacttgtgctgaggcggtcaagtttttggaagagagaaaatctatagtaaacaatgagaagacggcttgtgatgcattactcaaagtcagcaccaaaattctcccatcagaagtgaaaggagatagatgcaagtcggtgttattcgacgcatgccgccttgtccatggcctaaaaactctagaaacagatcgaaaatgggagaagaaaaagaagtgggaattgatatgcaatgtttgggtggagatactgtcatatgcagctagccaatgtcagaaaaaccaacatgttcagcagctaaggcgaggtggcgagctactcactcatgtctggcttcttatggctcatcttggcataaccaaacagtttcaagttacagatggtcatgctaggactaggttgattgtgcagtgaaaaagatatatgtgatgagctagctagtccagctacaacacttgcacatcaacaataaaaccacttatttcaaagatggcttgaaaaagagaagaataatatgtttctataggcagggtaggtatccttgtaacgtagttttcataatatgtgaaatatttcttttgcttatcatccggtctctta

SEQ ID NO: 243944 - DNA, 2136 bp, Cannabis indica
ttttttaaaaaaaaaaacccatttttcatttcttaccaataatttcactttaagaaatgaaaaaaaaaaagtctagtattcttctataaaatcacctctgaattatgaccttattgcttggatattgattgtggtaaaatacaagtaaagcaaaattacacaattgaaataaaaaaacaaaataaatatatatatatgaagtatatataaatatcaacttcaagttacctttttctatacctaactttttattcattggattcttccccaattggaccgttagcttgaatatgaaccaagtaactttacataatcctaattagtacaatctaattagtttttaatgtctatttttggggttaattagttgtgaattgaagatatgatgttacactaaataatcccatatgttaattaatttgtatttgatgttaatttggtctctaccgacttattcaaaactaaactaagttaagttatataatgttccaaaatatcatcattacaaacttcaatcttagattatgatcattattaaaaatatatttggcttaaagaaaaataaaattaaattaaaattgacatatattaaaagaagacttggtagaatgtcatattcttatttggtgtacacaccaaggttttattttgccaaacaaagatagaatgtcttaccaatcaagacaaccaaacataattttgtgtataattaaatatattttattaattaacatgtataaatatatggaatcattataatctatattaccaaaagttaatatttttacattgcccacaagttttttttttttcaatctcatactaagataaagttaaaaaaacatgtgtgtaaaacaaccaattcattgattcataatcacaacaccaaaagaaaataatgataataataaatatatataattaaatattatgttgggttcttcttggatttattcaaaattaagtttaaatttgaaattttgtttaaaacatcattgtgttttgtaatccatttaaacatagaataatggtcaaataagaccaaaatactcataaccactactaattaatttggattaaaacatatctaacttattataattcaaaaatcaaaacaattaaggctaacaatcataacataacatgttaccagctgctcaaatcatcttatagtaatttttccattaattcataataaaaaatatacattaatcacaataataatgataaatgttacactattaaataattttattaacagtataaatattaatattaataaaattataattttgtcagtacaaaatctattaatatcttgaacatacagacgtaagaaacatattctaaatcataaggtcttgaagagatcgagtaatataaattactttcaaatcttcttttaaattaaaatacttaaaatttaatatttaattacataaataacaagtaataatatgtatattggtatttgacaacacctatatcaatctaacatttcatcaaattgctttttctgcaatagtgggccaatgcccacatgctcaggctgagcttttgaattccaatgccaacaaattttgtgcctctgatttttatttttcaaaagaggctcttcttctgacccaatagaagaactccttaacttacacagcacatatatatatatgatatgtatatatcataatcataatacaaagataaagataactcttcttatggtacaataatacacacacacagctgtggtccattctagctaaaatctttctttttcaaccaaattgcaatgcttcttataagctttttcatatatgtggcttaaataatgaattttttcatctctttcttcttccatatgcatgtgcaccatttatatatatacatatatatatatgaagttagtctctatcattttcttcttttaaaatgttcttctttctttttaatggatgctatagaaaatttgggtgaaattcatagcatatgtgcttattttaagatccttataaagctatatagcaaggcacattcaatgcacatttaacccaagaatggttatatataaatattgtgattttttttaaaaaaaatatatctttatatattaaaagtgcctatctaacggcatttctt

SEQ ID NO: 243945 - DNA, 2261 bp, Cannabis indica
ccactatcgccatatttatttcttatatgtgctgaaggactctctcgtctcttgcaatatgaagaattggctggtagtttagaagggctcaaaatttcacgatctgctccctcggtatcacacttattctttgctgatgatagtgtcctcttctgtcgtgctaatcaacaatctgctcgagcaatacatcgatgtctccatacttacagcagagcttcaggacaggttattaatcctgaaaaatgtgtattatccttctctgaaaacacacgacaacatgagcaagattttcttcaaagatttacttggtatgcctattcaaccttgtcatgaacaatacttggggttaccttccttttctggtaaaaataagaagcagctttttggaggtattactgataagttttggaaacttctaagctcttggaaggagcatctcttttctgctggtggcaaagaagttttactcaaagcggtggtccaagctattccaacttatgcaatgagttgttttcgattgcctgtaactttgtgtcaccaaattgaaagtatgatggcaaggttttggtggggatctactgcttcaggtaaaaccattcattggaagaattggaattttctttgcaaggctaaagttcaaggaggactaggatttcgaaatttcattcattttaaccaagctctattggcaaaacaagcttggcgtattattgagtttcctaattctctgttaagcaatcttctccgacatcgatacttctccaatggtaattatctcattgctggtttgggatctaatccatcactaacatggagaagtttggtttggggaaaggaattattgttgaaaggattgagatggagggttggctctggtgaaagaatcaattgtaaaactgactcatggttacctggccatacaacttttaaaccatattttttcaaaggtccagacctcaatctgttggttgctgatctgattactgagcataggacttgggatatgatttcacttgagactaatttcaaccaagctgatatcgatcgtgttctctccattccattaagcctgtttccgcatgatgatgttctgatctggaatcaatccttcacaggtgtctataatgtaaaatcgggataccactttgctgtttctttagccgaacaagatgactccacttgtagcacttcaattgaacattggtggtcaaacttttggaaattgaaactccctcccaaagtgagaatttttgtttggaaagtctttcacacctctcttccagttgctgcagaactttatcgaaggcacatagctttttctccatattgtaccatctgcaactcttgtgaagaaacagttcatcatgcattgttctcttgtcctagagctaagcagtatgggaattatccaatcttagcattgattttcagacaatagaaagaagctctactgctgatactttactgctactttcaactgcactatcctcttctgaattagagttgtttcttgtcctctgttggagtatttggcatgaaaggaatgcaattttccatggtaattcagttcgcacaccagctgttgttgctgcatatgctccatcgtacctaactgagtttcaacaagctcgagcaaagaatgccaaacctgctactgcttcaggagctgcaacaccatctcagccatcatctgaattcatacatgctccaaaatggacaactcctccacaaggaaggctcaaattaaatacagatgctgccatagacaaagagcacaatattattggcattggggcggttctcagaaattcagatggcattatagtcgctgctctatcaaagcattttcgagggaatttcaaagcagaggaaatggaagctcttggacttgctttaagtttgaattggctactctcgcacaatctgtctgtagattttatagagactgattcattactggttgttcaaggacttaagtcgtctcactcttttttatctgcttttcatgctcttcttaataatataaactatcttgtatcctttttcccacgagctcagatcgatcatgtctcacgatctgctaacacttatgcccacactttggctaagtttgctcttacggtggatactgattgtatttggttggagacttttccatctccagtaatgactcttatgtaattctattgaattaatataatagtcttttctccaaaaaaaaaaaaaaccttctcccagcccagcccaggtgtaattccaag

SEQ ID NO: 243946 - DNA, 2767 bp, Cannabis indica
aaaaaaaaaaagaagattttctctaatcatatgaaacaaaaaataccaacaaacaaacaaacaaactctcatttgaaaatctcccaagcaattatttttattatttttttacaacaatgagtgacagttcaaactcaagaaacatatcattatgacaaaatcaatgaaaactaacacatcagtgtcatcaacaacttctctttaaccccatcattttattttttttttacaagaacagaatccaaaaaaattaaaatatatatctatacatattctctgatcattttgaattttctattcaccaactatataaatcattcaaagcccatttttcttcttacaatgagtaacaattcaaactcaaaaaaacataaccataataacaaacacattgagatcattataccataatcaatgaaaactcaataacagagccataaattttaaacaaatatatatgtataaataatttaaagcctgttttctttttcttaataaaaatgagcaacaattcaaactaaaaaaaaaaaaacataaatataataataacaaacacaatatgatcatatattctgatcattttgaattttctatctacaaacactatatatatatatatataaatcattcaaagccatttttttttctttttccttaaaaacaatgagaaacaattcaactcaaatcaacataaacataataacaaacacattgagattatatatatataaatataaattctctgatcaatttgaatttctatcaaccaactcaaaaacttaacataaaacataataacaaacaaacacatagagatcataatcatactcataatcataatcaaaattcaacaaaacctgtttcttcttcctcgtaagatgccaaatacgccaacacatattctccaacctcgagcttcgttcgcgcgtgttgcgcgtagcaacaactttgatccatgtccgatgaagatcagattcatcaacccctgtaacgacctcttccacaaaatacttagtcggattgaaatgaattccagtattattactactctctctcaaattcacagtactagtactacttatttgcttctgatcttcattaatggctgaagctccactgtctaatatggcttctaagtacccattaatccactcgttccccgccattttttttctttccttaattttccttcactttctcgagaaaattttgttgagaaaaagattgaatgaaagaaaagagtttgtattatgagtagttatggaatatacgtgagttatggagagactgacacgtgtcactaaatatatacgtgttaataggatctgttttttttcactatttcttttcaaaatatattttggattcgatttttgatgcgttatttaagttttttttatcataaaaaatattaaagataatacaatattaaatattaaaaatattaaaaaaaaaggataattttaaaaaaacacaaaaacaacgacaaaaattataaaaatacaatcttacaaaatttttaaattttaaacattttttaccatttttttgatttttttgtagcaactatgttttagattttatttacataaaatgtagttttttttatgtatttttatgttgtgttattgttattttgtcgttaattttttattatttgtatattattttgttgttattttgatgttgttttgttattatttttatgtgatattcttgttgttttcttgtatttttataaatactattaaaatgtaaaaaacaaaaatttcaaaaaataacaatttatgtaatttttcatttttaaaaacccaactagctagaatataaatagttatgtggtaattttttaagtaatcgaattcatgtaagtagggccggccctaggcataggcgggctaggcccgtgtttagggcccacacttttccggggcccaaaatagaaaaaaaataattattaagcttttatttaagtaaaatttaagtgtattataagcaacaaatatttatagcttagttggttaaggtggataacataatgttcaaggtcatggattcaaatcttataacactcttcttttaatttttttttttgtaatttaatgtaattttagtcacaacaaaaaattacttgtgattaaaatatagtatttagatagtcactagtttagttttagtcacaataagtactttttgtgattaatatctttagtcacggaccttttagtcacaacataaaaataataatttacaattagttacaattttttcacttttagtcacaaattttattgtgactaaaggtaagattttttgtagtgtgacttttgtttaatttaaatgttgtcatgtttcttttccaactaacatgcttttttttttttttccttttagtgaagtattgatcaattgtttttttattttattttatttttttttactttgtgttacttcttcttatcgtagccgtaggtatgatacatcatataagttattaaaaatagttttttaattttatattttaaaatatatatatattttttttaatagaaactcacatagcaactaatagagcaacttaaatcgcaaccaaaattcacataacaacccatagaaaccatcggaagaaatacacatagaaactcacataacaactaatagagcaacttaaattgcaaccaaaatccacatagcaactcacatagaaaccaacggaataatctaaatcgtaaatttaaaaaaaaaaaaagttaaaaaaatggtatat

SEQ ID NO: 243947 - DNA, 1818 bp, Cannabis indica
acatgatgtatcacaaatagcagaaggcaaatcaagtttttgtagtaggaaatagaaatgtctaatccttttagaaatctcaatcctcttcttctgtgaacactgaatgatgcagcaagaattagtgaaaaaaaatactacttgttaatgtttggagaaaggttgggacactaaacagtttaaattgaaagttaggaaccaaaaggacattatgtaaatatagtgtgtctgaaaaatttaatgttacctgatttatgaatctttatgttcatgccattaggtaatttaattgatgtagcaatagaaatgtcaagtaatttgtagaaaagagaaatgtcacaacatatatggtgtgtagcacaactatctactatccataaagagtgtggagatgattcgatcttaccaaaaatattggatgcaaaaggttgagatgcatctgaagtcgaaggtgttggctgaagtttttgacttaacatggaaatgagggtctaaatatcctcctgtttggttaggttagccaagagggagagtggatcagtggaactcaatgcttgatttgtagatggttggttattaattttcctcttatctccataacctagtgggaacctaataaagaaaaaacttttttctttgaggtgaccaggtttgtggcagttggaacataaggcctcatgtgtttattgcgtccttagtttgcagtagcagctgatgtagagggattttgagcaagagctaagatctgagatgaatcttggatagaagcaatgagggaaggtgtttgggggcttttgagttttcactgcctttcttcatgaatcaccattgagaagactttagaagagaaggaaaaggatcgataaagaaaaatttgagctctatcagggaagaaatattcatttaggcctgttaggaattgaagaacttgttcttggttcaagaacacaagattattaatagaggcgggacaagtgcaatggattattggatggagctcttaaatctcatcccacatacattttagtttagtgaaataagaacttatagtgtcatcaccttggtataaagttatgagtgcttccctaagttcgaatattcaaggactatttccttgatcatatatcttgagttgagttccttccaaatttcagtattagtgtccaagaacatgatgctgttcttaatttttggtgaaacagagtggagaatccatgacattacgatttggttgcaacgaagccagtgattgtgtagaggatcatcgattggtggttgtggtaaggtacctttatgaaagaatgttttgttacatgcaccaacaaacagctcaaagtcacgatgccatggttggaagtttttatcagaaagtggtggtgtgactagagttaattcaggatgatcaccggagtttaagaaataagggctggagctatcttcgtgagcatgtcgagtattggcgacgacttgttgtgtgttattatctccggtaagggtagaagcaggaggaatgatcgaagagtatctggtacagaagaagaattgttcagcaatggagtttgcccagaatttcttgaaccagtagctctcattctcgccatggatgaaaaacaaaatagatgatttcagagagaattataaacgtcttataccatattagaaagtaaaactacatttttattatgtaataattgagtatatatacaagtgctctagtcaaagtctattactaactgatattccgtcttttaatattcccagtttgattatttaattaagtgattaattaaatgcggaataataaaactggtactgaaa

SEQ ID NO: 243948 - DNA, 1143 bp, Cannabis indica
tatcaaaatactataaaaataacttaaaaaaaaaaaactatataaattagtcaaacttaaaacttaaaagtatcatatttaactaaacaacttttaaaatctgtctaattattacattttcaataacttgtaggctcaaagcttaggcccacgtgataatgttttcaaataagacattaaatgtgaagccaaattgggttgcatttatgttaaaataaaaccaaagaaaagtaagctatttgagtcattcgaccaaggccctccccttgggccctaagacctgaaggtgaaccccatgtttaaaatattgtttttatttttaccattttatggtaaaagtttgcaaaagatataacttttttttttctaaaaaatattttttggaaagaaaaaaggttaagaatatgcggaaataatataaggtaattttttaccttaaggagataaatgattattctaaaaagtaactgattacctaaactatttttctcattctaactttttttttaggaatttttcccctaaaaggactaatataaaaaaaaaccatatttttgcattgaataaaaactcataaaagtgtaattttcacttaaaaatataagttttgagttattaaaaaataattgctagaagaagattttgttgcgtggacaaatttgaatcgttgtcttgtcaaaatttaattatttgaagagcttgagaccgtgtatacatgtgtagagtttttttttaattagtttttatttttaaaaatagaaaagtaaaaatattttataacattaggttttataaaattatttttattttttaattttttaattaagaatttaaatttttttaaaaaaaaaatcactttcaaaaatttttaaacagttttttttaaaaaaattaatatttttaaatcctaccccaatttagaccttgaaaaccgaatctagatccagccccagacttggacttgcccctggtcccgtcctcggacccaacttaaataaaattaacaaataaaaataaaaataaaatatatagaatacacttttatttgttatttttaaaattgaaaaaacaaaaatggttatcaaacaaaaattttacttttatttttgttattaaaaaatttaaaaataaagtgttaccaaa

SEQ ID NO: 243949 - DNA, 1546 bp, Cannabis indica
cactagctaattctgtttgtaacggttttgcacccatgtgcttgtaaagctttgtttgagctatatatactaatgacacctcgaatgaggtcaagcttttgccatagttttttagttttttattctctctgttctcctttgtttcttttctttcatggtatcagagccactggcctttgtcaatggtgtcttctttcgacaactcatcccctacaagtgtgtctgatcctgctgcaactctggctgctatggtgactccctcctagaatcctttttctcactctcttacctcttctctcacgatcaagcttgatcgaactaacttcctagcttaaaagtctcaagttctacccctagttattagtcatgaactggatgaaatcttgcacacaaatttgtctccacttcagtatctcatcaatggtgatccaaatccttcttttacacaatggcgcaagaaagacgagcttctcatttcttggatcagatcatcgatgatagaaggaattcttggaatcgtggccaactacactagctcaaatgctgtttggaaggccttagaatagaaactctcaagtcaatcgaaggctaggtattgcaactgaagagccaactgtccaatgcacataaaggtaatcaatccatctctgactatattgacaaactcaaagttatctgcgattcccttgttgttgctagacactctattactgatcttgacttgattcttcatctgttaaatggttttggacctgagttcaatttttttttgtttctggtatcatatctcgaagtgacacatggtcttttgaggaagttcaagcactgttaatggctcatgaaaccaggcttgaaaggcacactacaatgatggatttttcaacaaaaatggctgctaatctcacttttggatcaaaaaatggtagttttaggtccaacaatgatggtgagagaggatctgggtctgattcttcttcaagattccctaattatggaaatcagtcaactcactaccctcgataagctaatctcaatcgaccattgtgtcaagtttgcatgaggtttgggcatactgcccctacttgtcattataggttcgataaaaattgggtcacacccaaagctgtagatggaaattcccaaccccaagctcatcttgctgggcaatttcttgattatgagcatgttgcctttgttgctgaaactgttcctaactttggagattatcaaggttggtatgtggatatataggagttactcatcacatcgtttttacaataaggcttgtctcaatagtgaagtaccttactctggccaggaagcaattgctataggaaatagtaagaaacttgttatatctcatattggtaaaatcctttctgcctgataaacacccttcctttttacacttaaactctgttttacaagttccttctatcactaaaaatctcattaatatttccaagattactaatgataataatgtctttcttgaattctataaaacttgttgttttgtcaaggataaacaaacaagagcagttct

SEQ ID NO: 243950 - DNA, 1863 bp, Cannabis indica
acataaggatcactataagaaggctttttcttggtttgtatgatgaagttcattgctatttcttttctttttgtaaaatgtgttttgttttgaacaaattgaggtgatttgtttgagttttatgcatatttataattcagctttgaaatcatgcctcggaaaattaataccggagttgattattacgacgactatgaagattatgattatgatgaatatgactatgatggagaagaagagaatggttagttgcttccttcattttgttctcatttgtttatctaccattttcctttgttgtcatgctttgctccaatgttctttcatttcgagcttgtttaggctaaattgatttaaaggaaaagagattatttattcatactaccaattaacttactcaaaagacataataaaagattgccaagtttcagccattagttaagtgtattggatgcctacaattttctattcatttttagggtcactgggacatatttttaaccaaaattaattgtgctttgtttattagttgaagttgtgcagtatacgccagaaagtagaaggcccgagacatggagttgctcaatatgcacgtatgataatgaagagaggatgaacgcatgtgatatatgtggggttcttcgcaaccctttgcccaaaaaagcaggtatatatatatatcatactcattgaattatttgtaaacttagtcttgttgaaagtgtgcattatgtaattttgtcagcatataagacactattctccaccacggtgatatttcaaagaacactagctaccatctctttcatgctctaggatttaagcaagaatttgtttaatttcaatactcttagtcttaggtgatcgaaagataactcatcttctaaatccacattccgtgtcagttacctaatgtcataggtttcgattttaaattcattgtcctttcatagagtagatctctttcatgcagttgaaggcatatgcaaacatgctgaagcatccctaatggccaagtctctttttgcatcactgccgcatcagaaagatggttttgagactgacaatggcaataacgtccacaagcttgggaaattccaagggcatatacatgaattccataagaaattttgtactagtaactatcacaagattaatataggtctgcacctgttctgaaagaggatattaatttgtaggataagaaattagtccctttttgtagttggcatcttttgtgtctgagaagttactttcttttactaatgttttgcgagaactgtttatttcatataatgggatttctaaatgaacttttactcttgatacagctcctttcaagtttgaaagtccatctcctgatgatttggtttcaattggattgcgttcatccaaaatgggtttgaaaggtatccatccttttccaaaaaataaatttcatttttcgtatgatttgctgcaagttcatttttacattgaacagacatgtcaagtttttatggagcataatattacaagttattctttagttatgctttattactctgtaagttacatttgattatttcatcaggtaatacatataatttgtagcctgtgtgagagaaagtaatcttttccttgttcattgttagtgttagtaatgagaatatgaaaaagtaattttgactctgaccatagattattttccttgcaaaaatgtcggcgttcaccaacatattctatctttgcaactcttcctgtttggtgttttaaatttaaatttaacttttcttattttttttatgttccagccaatgttgtataatttaaagacatcagaactttcttctagctgtcattaaggatcaacttctcgtaatg

SEQ ID NO: 243951 - DNA, 1387 bp, Cannabis indica
acatttttcttatctagaaaattctagtattaactatacaaaaccaagaaaattgagagaaaactagaattaccttgaaactatatttgtaagctaagaaattacttagaaaattttagaagttcttagaaagttaaattgtaattcaaaataaaaaaaaaattagaaaattgtagtatcaacccttagctccctataaataccaaatttgggttgaggagctagtgtaacaaccaacaccaaacaaaccaacatccaaactatcaataaaccttactatataatttctcataaaactctctcttctaagtcaaaatcattctcacatactaaatctacaactctactcattaacatcactacttcaattaccataataatcattaaatacttattcttcatatctacctaagcaaatttaaatcaatacaaatttattctaattccatcattacaaataagtgtatagtaagatgtatgagttttgatattaaaatcaattggcattgagaacattattattaagactttctaatatatcatttatagaataattaacacttactttattacttttcaagaaaccacaaatatctttgaccatccataatctactataattttccaagcacttatggtttggtccacgagcaattgaccaacccatttcttgcaaaaaatcatgcatttgaagtgtatcaccatcagaaacagttaccaaacacctgtcaaaaagaacttccatggcaatgtcaaaatcaccacaatcatccaatatttctttcacaaaacattttttttcaccccgaaagaaacatgctatgtcaagaaatatactcttctgtttaagagatagcccatcaaaacttatttctaatttacttataacttttttatcagggtctacttttatttggcgtagcaaactttgccatgcttctctgcttttcgaaaataaaagagaacccaaaactttaagagctagtggaaggccttgagcataattcacaaacttcaacgaaagatcttcgtaactttcttcgggcgattttcttttgaaggcatgcaaacaaaaaagttcaagagcttcctcctcctttagttcctccaagttgtatatcatcctctcatcattgccaataatattccgaagtacttgttgatttctgcttgttataataactttactttcagagtttaaccaagaatgactatcttcaagtaagcaattatactcctccaaatcatccacatcatcaagaactatgagcaacttttgatagtgtagccttttctttagcccaagcaaatcttcataatgtacattttgtttctttcgacaattgacgaaaaaaatttaaactttactaattaatagtggtcgact

SEQ ID NO: 243952 - DNA, 1325 bp, Cannabis indica
tagaaactttacattattataaaacaaaaggaataacaagagatagtaggagtcttatgtggaaagccacaatattacatctattttttttcatactaaacatatgcaaattaactccatcatatatagaaaacttcatcagcaaacccaccaatctgaagaataaaaggcaacaaatatcagtactcaaataagcagacaaataaaaaaaaatcactacttttaggcagtaataacaatcaagatctcaatagcttaattttatttggatatttaacctccgtttaatacaattataccatacaaaaaaatattttaaattatgttttcaatatactaaattatttaaaaactagtcaaatactttaagacactattatgtaatcaaaataaatgagatatggttttttttttttaattgatgaaaaaagagacaaatctaggaaatatacttttcatgtagtctttttaagtgtaaactaatttatttttttttttcaattttaaaagatagttttaaattaaattttaataaatctataaaaaaaaaaaagaaggattgaactacaatacgtacattcataaaagtattaatactaaatatattgtttgcaatctactttttcctatgagaaaattttatttacaagcacggcaattttacttactaattaaagaataatccattagtatgcatgcaatatatttattattacaaaataaattatatttttattatattatataaaaaaaaaatatatatatctgtaagggtaaagtgtctcttttatttagttgttatttttatgagaagatttcttgaaattaatactaaattagggatcacaattaagtaaggtatggagaaggtgtaaaattaaaaaatgtgacacatatagtcatgtccatggcaaaaacactgagagaatatatgtattcaacaaaaatgtgtgggaaaggaaaaaaaaaaagtaatttccttgttaaatatattaatgtttggttcttagacgattcattttctttattattatttatctcaattcattactcgcctagagagggaatcaaaaactacacaagacaagctataaaatgaacaaaactagtagaaaaactatagaaatggagaccgttatatgtatgattagcatgtctaagatggctattgtgctgtgaaaattagttgaaattacatgttagtatgaaaaaagcttcatattaacatataatttcaactaacctcaatttcagtcttcaccgtttgatagtgaacttgcagacctaacctcaaagttccaaggccattgtatgtaatccaaatc

SEQ ID NO: 243953 - DNA, 2565 bp, Cannabis indica
ttttttaaaactaaaaatctatttttagataaaaagtgtctccatgatctattttttaggtgtgacaaaatattattttaatgttggactattgtataagtcattattaattattttataattattaatttgaaatttaattttctaatataataaaaagttttaattctattattattttagtaacttcatcatgaacataggggaaacttgctaccaaacttagtgacaaatttatacttttttcaaaagaaaaaataaataaattatttagttctcaatgggttgaacaacccaagttaaaatgtcaaacactcaattcattgtagtgtaactatttttatttttcacaataagaaatattgtttattttttctttcttttttgaaaacaatattataaattgcttacttgtcaaatgatttttgccaagaacatcttaaaaaagatattgtgaattgtgttgctgttttattagttctcttttcaaaatgatatattataactttatttttttgtaaaaaggaaatgttttaggttttctaggagaagtttaatttagttaattaaaattttaaaacaaataatatggttgtctgaaaatttgtaattatatttgggtgtgcaagaaactatttagtgggattaaatactaattaaattaatattagtttttgataaaatcacactaaatatatcatttaaatattaaattaatattagttgatcatatgaattcgataaattaatgtaaaaagtcaatttaaaaaatattaatatactaaattcattgcattatgatcaaagaaaataatctatattttggaaggatatagattaatatggtataatattacttcatttgcatagtaattatttttccaaacttaaaataatatctcataccaaacaatgtgttctttaaatttatatctaaacttctctaacaaaaaatgcacataaacattacataatttgtattgtttgtaaaaaacattatataatttttcaaaagctaattatatgatatattatatttttaaggataaccttatattaaagtgtatattttggttgtagatattttacattaaaaaaatagggacattaaataagccaacggtaaatgagagtcaaacctacttggcacacatataagctataaccatttaagccattgaaaacataaagcaacaaaatcaaataaaaataaataaattatccataaattcaacaaaattattggtaacagtccaatcatatgacattttaggttcatttttgtgtttttactcacaaatctctactttctcaaaatgttacattttagtggaaatggtcaaatataaagttaagaagaacattagaagtttagtcttatgttattttgattctcatagatttgttttattataaactaaagtatgagaatatgctatagaaatctaagaatattctgaagaacctaaaaattccaaaaaataatgctcaagttacaatcataataggacccttttattattattatcatatattcagtgggattattaatattgaacctttttcttctaatgtttgttcctttcaacttttcatgtttatttctctttgagtaaaacatgatcctatttctttgtattttatatccatcccaatgattttttatttgaacagaaggaaaattctattaaaagacaaaaaaaaaaaaagtatgttcaatacaaaatagtcaaagattagagacaagacggtaaatcagaccactaaattcgagaaaatttcagagataaagccaaacgtacaagagaaggaaccatagcgttttgagcccttttacaataagagaaataaaagataaagaagactaaatatgtaaaatatcatgaactattattcttgtcataataggttggataagaagaagacaatctaataaaacaataatgaagttgtaccccaaacaggacaacgacccccactacatgagaatgaaaggaggtcgccgttggatcacttgaagaacacgaaacgaaaccacctcatcacagtctattaccactgccctgagacccacacaactgtctcattgatactggtatccacaaatagattaaaattacccaacttcaaagtctcaatcaaaccattagaaaattcaaccgcaatcgtcgccaacttcattagagaatagattattttcatgaacaaaagtgttgcgtcgatatcaaatcctccaacataacacaagaaattcttctatatcctactttgaataaacatccatacaacccacaaacaatcatagaaacaaaaaccctctaacaacccagccttttcgaaaattatctaccctaatgattaatttccaactttattttctattagaaaaaaaaaatatatattttatataaatagtgaattgtacagagcttttatgaagtataagattcaacacaagtgaagaaataaatctatcacataaaaaaacaaaaaaaaatcatagtgtcaaaattaggttataaaagataatttactttctttttcttaaaagaaaaactaaaaaat

SEQ ID NO: 243954 - DNA, 1376 bp, Cannabis indica
tgtttcaaaaattcacttttttttttacgaagaaaaaaaaaagaaaatcaaatttctttgatattatttccaggagctaattttctatagtacaatattccccatcatatactcatttccattgtgataaagattccaatattttttaaaagattccaattaattaaaagtagctttagctaactaagcacattcatactacttgatcaatttatatatatatgttaccaaaccctacaggctagggccacaaaatttatatatataatatagataattagggcctaggcataacaaagaaattaaagattagctccaagaaaatctatactatagaaataataataaggaaaatgtaatcgacgaccattccaaacagccactttcgttcaatatgtactacagatttatatattattttcaaatattatggaatattatatttgtgattataattgcaaaattgcataacttatccttatctaaaagatatatataaaaaaaatctacgatctacgaccattccaatgtttgttatactagaactatcataataacgttgttgattagtctaattctttcacctaaattacaaaacaaaaccagacaaaataataaagttttgtccagctagataaactcattaatgaacaaaataattgaaatgagatgatgtttaagtgtgctttatccataactactagcatagttaagatgatgttcaatatagtaaaaataataataaaaaaaacaattatatattttcgcttacaaaaataaaaaaaaataaattatctctcactaggattggtcaatatatatagttgcctactttttatatgaaggagatgcttcaatcttttggaaggtaataatttgtttgattaactatgtaatagttctacttttatttttcaattttcacacatatatatatactagtaaaaaattacgtgcgaggcacgtatactaattttattttaggtattttttattttatttaaaagatataattaataattaaagaaaaaatattattacttattaggtgagattattattatgtatatttaaataatataatttataattttgacaattaaaaataatactggatgtaatatattatagtgtttaagaaaacttgataatttaagtgtaatatgttcttaagataatccaaaaataaactaaaaattcatgttcaaatactaaagaaaacacaacttaaatgtgtgtgaaataaaaaagaaaattaaaaatcaatctctaaattattgataattgaagataacatctatctaaaagttgtagataaaaaatctctttttcacaaattataatgtgaaatgttctagttaaaatactttatatat

SEQ ID NO: 243955 - DNA, 2178 bp, Cannabis indica
aaaatgtaattaacctcttatccactacaagattaagataagaattcttaacagtgttctccaagatttgaggatatatatgctcatggcataagtaagcaatgttacatttatatctcgaatcaaaatgaaacaatagagctttgcaaaattaatccacaaacttgtaatgttgggcttagataatcatttgaggttccttttcaaattgaaacaatagagctttgcaaactattactctaatactcagtccactaccttataataataataatgataaaaacttttaaaatctacaacactgaaagactacaaatcgagctctgtgttttcttaagcgcagtccttctgtgtttggcattctttctggactaccagtactctcccaacccaacctatttgaacccaaaaaaaaagttatattatatttattttcattatgaaatctaataaacattataacaatacaatatatacacttacgcaggaaaagcaaaagagcctgaactagcatttgatgaatgagcagaatgatcacttgaattgtgctcttcaaaattgccaccataaatacacgttgaatctaagtaaaggttctcttctaccatctataaatagttacgatttcaaattaaaatagaagaacttataacacaattatatgtactttttagtattaatagaaagttgaaaccaaaattataaggcatacatgttgattattggtggggtagaattcatgtgataatttcctagttaagctctcatgatcattgtcaccgtaattaagctgtgtttcttccaaataacaatgaacaaattcttatgaaattaataataaagtttttcggttttgaaattaaagaaggaaagaaaaacagatatcactaacctttcgatttacgggtctggaatttctggaagaagaagtataacgatctagacaagaagatggtagttgatcatgattttgatcagtacttttgttgccattattcttcacaacttccaaagctccatcttctctaaagcagaagataatatagtcttcttctgtaaactgaggatcaatcatgttgttattgttgttattattattattattattagcaacttctttgctaataattcttctgtgatgagacgaattttcttttattactagcttcatcaacattcttatgatgattgcctgatgatctttcttcctttgcatcagataggatcttgctctttctcatcggtattagatgaacatgttcatgatcataatgatgatcatcatcatcatcatcatctgtcatatgaaagaaaaatagaaattaatttgtttataatatattgttgaacatatatatgtaaataggactatactaatgaacatatattataataaaaattattacctatgaagcacaatccttgaccctccattattggactagtaaccttgtcattgtccatggtgtgtacattgtatattaaatgtataaggttgaagaagatatatattatatatattggttgtaatgagagtgggaaataggagtatttgaatttgaaaaaggaaaaaatgaaaaggagaatgaatatttggaaaggagttacaacagttgattggtgccaacctataattatgagtaatgggtcatttatgtttctaactcatcttcttcttcctcacttctccctatttaatatttatatttatttataaataaaaattgaaaatttaaagaagcagaagaagaatgtacgaggcactgtaatttgtagtcttccttgtatgaatgtatggcaacatattcatagtgtttacttctgttttttctctgtaatttttttttttttgtcttgactatataacctgcctatcattacatattatttacaaactgtttaacatgcattaatgtatttgaaacacatacttcgattaatgggtgacaatgaatgtcaaggaacactttacttagtatataatagatttacctactatatttcaaatagacaaggaaactctttatttcttacctactatataatataggtgttgaatttttgtaactacgacgatggcttgaaatttgaatagtatgatttggatgaaaaaggagatgcataaaaatgaaagagcttatattgctgcagttgcgtgtagggagcgacaatgagtgc

SEQ ID NO: 243956 - DNA, 759 bp, Cannabis indica
tattttatttttaatataaataataagtcactaatttcttataaactaagaattcggttacacaggcacactttatatagactatatatatatatatattgatgattggagttaagcagtatattgatgattggagttaagcagtttataaatttggttgaacacccgtaagaattactatttactacagcatatataccatcccagaatttcgttgaatctctggcaagcgaaatttgaggaagagggttcaaagatgttgatcacattaattgacaaagttatttttgtcatgaaaatttaatcccaatcctcatttctttgaggtgaaccttgagcaatctctgtggaagaagatttgggaaaaattctttcaaaagtgaagcctctttattatctcccttgtatttggcgggagtcgagttcagagatcgaattttccagctccgactccagagccaaagaaagacgatatcaatttgatgttttagcttcgaataaattgaaaattggatattgtttctgtttttgtttgggtaaatggatgagcgaagccgcgactgggatttttatctcagaagtttatcgaatagtgccagagactccaatactgccagtgatcccgcttctgattcttctcttgtgcattccgtgagtgtctctgattaatcattttcttaaagcttatacgaaatgaaaactttgaaaaatgagtcttaattcgggttaggtactgcgtggtgtggtctctctctctct

SEQ ID NO: 243957 - DNA, 1659 bp, Cannabis indica
aatatttaaagaaactaattattttagatggattttacttgtgttgtgtccccacacacacatgcattgattccctacacaaattttataataataattaaactaatcactaattataatactaattgcagccatacccaccataaaacccatacacaacgacaagttcaaaccaagtacatccaaactcatttaaaatacaaatctccattcatatattatgcccccaaaaactaattaaataatatatcatcttagttactagcaaatcatattataacacatttatttaattatttatttaaagaaaacaaaattaagaaaaagaatgatgggtgagaacagcattagaccattaatcttttttgaaaccagaagagagaatacaatagagtgaagaacttgattgtgggtatggcagttctgatgtgcctacaaaattttagttggggtggtgaaatgaaaagtatagcaaaggacagagatagggctaaagctaaatggtatttcaaggagaggtcaaacttcacatcacatgggctttgactttcaactttatgggcttccacacattgatttttggggatttaacacaattatacaaagagcatgtacttaacataatgataaattcctttatgtaaagaatcttttaaatttgttactaacatattcaccccaaataaagtttattaaaaaagatttataactgacataagaattttaataacaaactaaatattatacttaaatatataattattattgaaaataatataattattatgcctcaaagaaattataaaatagaaagaaaaataataaaattaccccaatcttataaaaatcaaagaagttactaaatttgcattcaagataattaccaaatagtattctttattagttaccaaatagttgtcagacttttattggggtttaaatttttggaatttttacaccgcatattaaaatttttaattttttctctttttcactatggggcagattttaaaaaaaaaatactgtgtaatgtgttaagttttcacggttgttccacgattgtcttttagttgttctgtttcgttattttacggttgttttaataaaaaaaaaatagtatttttgtaaaaaattctgtgtaatagtaaaattataaatttttgtctaaaatttaatatttatgtaaaaacccctaaatttttattgttttattaaaaattggattgatttgataattttttgctgtgtaagtctatattattagtgctcaataattgatgggcttaacatttgtgtgtaaagtctagttgaaggagaagtgtgggcttttctagttaactaaaacctttgatgagcagcccaatccaactagggttatatagctaattcctctccctatctctataaatacatattgactcatcacaattgtatacttttgataactagataaataaaatagcttctgatttagaatgacttagttgatagtattgcaatatcaatgtggtaattgttatggatcaatcagtacgcatgccctaattattatatattattattgtgtctatattatatacaaattgtatcttgatttattattaatttttctaacatgtggtatcaaattgctaactatatatgatttaagatctataa

SEQ ID NO: 243958 - DNA, 3860 bp, Cannabis indica
tcttctttttttttcttcattcttcttctgaaactgttattcccaagtaccgggaagctttgttacctgtgttttaacgatgtcaggacctcagtgttgctcaaaccctccaacccttaatccaaacagtggagcaggccatgtcgagcaacttggtggtcttccctcctatgtcgtcggctctccagactccaagcttgccattcttcttatttctgatgtatatggtacttttttcttttcttattgatcgcttggatggtttttccccggtttgtgattctatttcagtattgttcttttgggtttgttggaattttcttgtttgactttctttactctccttctgatcaaaatggtatctagaagggaaaagaatgcgtacttaatttgttatttaaagactgttcactaactttttttcataatcttctttttgggtattaaaatttatgcctttatccttatggctttacatagtgtgatgtatattccatcctcatcaccagattcttactttatatccttaatattgcaggttatgaagctccaaacctaaggtattattatttctgtatggtgtgaagtactatgttcaattgatatgggatgagaatgctttgttgattaattggaatgttcgattcaaaggaaaaactttaataaaggagggttcaggctcatggagatgtgatttgatttacatatagccttttttgtgttagtgattctgtgcctgtgtatccttttggaaactaataccagtttctgtcttttgtaaaaggaaattggcagacaaggttgcagctgctggattctttgtggcagttcctgactttttgaagggagatccttatgttccttcagatgctaataggcagatcaaagtttggattcaagatcatagcacggttggttcaagtcttttatattcatacttagtagtccttaatagtttaaattcatattactaagtgatacttataattgtttgtgcatttgatactgaactaactttctggtgagttagtgggatgtgtgaagtttacatgttttaggctctgcaaaatttggtctagatccggctaggcttttaattcctactgttaacgtcataatttatttccaactgtcaagctagtttaccttcagaggtgtaggagaattgaatagatgttatttttgtacaagtcaaagccagttccacaataatctcctcttgttgtaccaacttcataatactcggattctgtgaatatgtttcgtatatatactttatttatttagtcttgcttacttagccttactgctattctctagcattacattactagagttttgctctccaaaacctgttgtaaactttcttgtatttgcctatttgaaggcagaacatataaatgagaaaattatctcttctccaaaaccttataattttagttttgttttaacttactagcagcatatgttgtactttgacttctaaactcaaagacttcttataaacacttttccttattttaataggacgaggggtttgaatatgccaaagtagtgattcaagatttgaaaaataaaggtttttctgcaataggtgctgcaggcttttgttggggtggtaagtttgtttacatacttctttgttttccattattttaagctatttcatgagatctggatgagtttcttgcaaattcgacaaatacactatgaacaaattcaatcacgagcggtgactttgataagttctattctcagctaaggttgtgatccagctcgcaaagtttgactatataaaggctgctgtgctcttacatccttcctttgtcactgtggatgactgcaaaggtattacatagtgatagtgtctttgaaacaactacaaattaaaagatcgtttttcatttacttgaaatcttatgtatttcacttctcttaaactccaacttcggcttttcaatcaaccacgactcgtgaatactgattgattcattcaacatactttcagaggttaaggttccactggcagtacttggagcagagactgaccagctctctcctccagagcttgttaaacagttcgaggaggtcttaaatggaaaacctgaggtatgatttcatcatttttgtatttcacagtttccttgatcatggcgagatattttctacatttaatggtgtttcatttcattttcatgtatagattgagtcctttgtgaagatatttcctggagttgtacatggatggactgtgaggtatagtgttgaagatgaaacagcttgtaagaaggcagatgaagctcaccaggacttgatacagtggttcagtaagcatattaaatgaaggctttcgtaataggaaccttaaatgttctatgctaaaactattagaaaccaagtatggagcactatctatctcccatgttttaaatagtagctacaagtgatttgggttaatgtcaaagacttggtctttgtctttagagtttcataaaagttatgtgaagtattacatcttaattagtacttggatgttcttgttgagaataatatgattgtaagatagttcaaatatgatgttttattattgttatttgttaaagagtatctgttgttttcaactcaataaatgagacactttacaagaaatgacaatgattttcttcttggtccaaccatagaagacaagcttagcacttgtcctgtgcaaatattaataattttttttttaaaatttgggacttcttgtaattttggtgctgttttgtttaggctgcaaaatttcaaaaatggaaaaactccatgggagttatttatgtaggaaattcaattttctgttctgctatgataaattcaagcaaggggaaattacctttaaaagttattacttatttagtgtaatgatgaaaatttcaagtatacattttttcctttttattttaactttatatgcttcattggctttggaacttgagtaatagaagtgaagtgggtaggtgtattgagtcatatatgagataggaacactttattagaagtgtatataatgtgtaactttagcacatgctctgctgagctagcgagtgtagtcactttatttttttaaagaaaatttatttattaagttattatttttatttaattagttaaaatagtttttaaatgtgtttaatcaattagtaaatagaaacgatttctcattcgcaattttaataacgttcacatgatcttcagtcttcactatcagaaaaaatgattttcttttcgttacttcattctgtgtatatttatataatgcattagaaccagcggaagaaagatttcattttcctctcaaaaaaattatatacagttttatacgattatattacaaatgtattctgagtagtagtacgattatattgggggtggtattttgacggttctctatcgtgcaatagagctacgagatagtgttttgactaggctgttttatcctggggacggcgagactgatagtttgcttgcatagctctcgacaatgtcgtgaacgtctttaagagagcgacctagtctgtgactcaattcaaactttaattcggtaaactcgttccttttattttttgcagcaacttttttcaacaggctctggtagagcttaaactctttaccacccaggttgggcgagagaccaccatgaatgctacaacactgctagtttgtaatatcctgataagcctaatagtaaataattagggtttatatatatattatgggtcaattaagtaataagtgggattatgattctgctaatctagttcaacataaattttaaatttgctataagtgggtaaatacgtgtaatttgtaaattacggaga

SEQ ID NO: 243959 - DNA, 1445 bp, Cannabis indica
gtaactggttattctaaactctggtttttcccacaaaataattttttttcaaaaaaaatatatgtttttattagtagtaatctttgcaagaaaaacaaataaccccacaatattaattaatcatttatttcataagtctcttcttctttttcttttaacgataaataatttcaagaaatattaaaagctattaagatacaataaggacaatggaatcgattgtggtttgtaatttggccaaaagaagaaataggaaaaagaaaaaagaaagagactgaaatgttaaaacataaaaaagggtcaaatgatttgagtgagaagtggttgagttagtcttttctttgcataggagagtacagaccatacagagaagcaatatgagtgtgtgtgtgtgccatgacagcatagcatagtagcacttaggccttatagctcatgacttagttagttggccggctgggacatttatatgcatatatttcacagctcacactggatttggtggtccaaacactccgattctgaccaacaatgcaaacaatattacactacacactctaattttatggtcccatctaatcttctctgtgttaatacataaataatctaattatgatcaccattaattgcaactcacttcagtgcaagtctcttagcttaacacaaaaactatgttagttgacactttcgcaattatgttttagacccctcgacagacacgcccttatcatcatatcttttttttctattattatttgtggataatgctaagacttcatcatggaatttttttaagcaaaaaaccaaaacataatcatactggctaataatcggttgcacctttaaattggataaaaaataaattgtttacataagttgtaagaatcgaaacttgaagtagcattgttgtcaattaatgtatttactttagtttggaatcttaatatattttggttaattaggacttttatctctaaactttgatatgtaccaaatcatgcttttaatattttcaagttgataaaaattctccttaaattattgtgattgttaaatttaagaacttctgtctaaaatagatctgacattgaggtttattgtttgatgtagaaaaccttcctcctctcttgacacctcttgacacacttccagatgcacgatcattaagataaaaggaactatttgaggaaaagttatgaatgttaccttgagcaaaattgtttctgttgaaaggtccattataatttcctcttagagtatgaaactgattgtgatttccttgttgatattgtctaaagctcctactattggtgtagttggcctcaggatgaatatcagcttcatttgttgtgacatgagcactgagatccaacttagtgtcagttttctcaatttgagattctgaggcaaggagcaaagccttaatttcagctacagagtagcct

SEQ ID NO: 243960 - DNA, 1665 bp, Cannabis indica
agaaattttgtcctcgaaatttaacttttccaaacacttggagtattgtgtcttcatatccctttcgcacctaccacgttgcctttctatctctcacaggaaccaaactgacaaggttttaaccttgccatattatcaaactatcatataacatgtactacttaatttaaataatattaatctactatacattacttaatgacataatatattacttattctattataatttaaattttaaggacttataaacacataatatgaatacattaatattgcaacgctcaagcacatgcttgtaatatcgtaagtttctctcctcttatgatcatccttacatgtcattaaagagtaaaacgatttattcttttataggcatccttacatgccacgtagaaaatattatgcaatacataaactaataatgaataaggagtagggtagaagaccttggttaacttccacttaactattcgtactcttcattggaacattactacacacagtaaacttaatttctaccatagagctacggttccattaagtttcataattgttactctatcagcgttagatacttgatccatgacactgggaaaagcacacatgccaccttttaaaaaaatgtcctttatatttcttatgatccatcctagccatctatctgtctgaggtgtatttatttttattttctttagtcgagtattcactgcacttggcatttgtttttttttcttcaaataatattcttttgttcattttagagtttcttgattcttttacaactctactgtaatttctttgccacactctcttctggtgcttggtcctccactactcctttcaattaagttgacttaattgtgagattatctagttttccgcaccaacttttctatactttggtgataccttgttatagtggtggagttgacatctgtaatgttgataggtttgtgcaaatatgctcaatgattgattcttctattatactaaccctctgaggtatcacataacttcatacttataataccattgattgttccaaccatatctcaacttcttaattgtacttctaaaacttccaaatctcttaaacatacattccaatattgtctatttacttatgactataccatatatgcattgaaacatagaatgcacactaataacccctttaaaaataagttcaactgtaccttgggttattgtagccaaaatatttacttacatgataggttaaccataaactatcataatatattattcagacaagtttttggagtaaggatacaataaatataattggcaaaccatgcagaacagaccttactttgtccatcactactatacctcctatacccccacttgtatctgcttagtcagggctctttgacttatacttcctaaactacctttaaacataagtctatactctgtttaagcatttcattccatgttcgagcacaaccacattattaataattatctttccactactacaaaccaagcttttagaggcaccttttttcagcaaatattaaagaaccgatgtcatagggttggaagtttttggaagggattttgacactacctatgggcgtcggttttttcaaaaactaaccgtacgccaaagggtcgtcccccctactggcgtcggttatt

SEQ ID NO: 243961 - DNA, 1582 bp, Cannabis indica
ttaattttatattttttttttaattttttgtcatacaacattataacaaattaaaatattagggaaaaaacatattgttgatacaaaataaataataaaaaaaaacctgagctaataacacaaatcattataaataaataaacttgtttatagaaaactaagttacctataattaaattcaaataaaaaataatcaaaactatttataaacacaaaacggtgtaataatatatcttataaacacaaaacaacctaaaattcaacgcattaaaaataaataaaattctttataatcaaagtatgtcaaatataaatagatataaataaataatatgttacatttataggtactgtgtactaacataaaattaaaactcatacaaagttaccaaattcactagattgttatggtgagaagagtttagaagagaaatatttttgattgatatgctcagtttaaattgtttgtaatttgattcttcttggtacattctatttgtttttctctatagatctacatatctgaaataagaacaacattaactagtttttttatagtacagaaaatatataatgatctacacgtctgttatgtgggatacaggcaatgggaaaatagaaaaaaattccttaaacttgacaataacatctttatagtgctaataatagcttgacacccaactaaagccccagctatggttctgagtgaaaagagcaccgtcaacatttactttgatacaattagcatctagtttgattcattggtagcaaagtaaccaaagaagaccccaaatttctgatcaaagaactctatttttatatgagcattactattaagcactatagtgtttagcaccagtaactcagtaagagatgacgccttataaatagctagcagtctctataatcaatagtaaaataagtggaacccgatattaaattgcaccaatattaatatgacatctcgtataaatgtatgaagcatcatagatgcccttttctttttctattccaaatagtatcaatccaggccttccacaaagccaaacatagcatcatcccttccataaatttatcctctgaggcaattagacaacttcttattctacttaagtaaacaacgagttacaactaactaaccgtacaaactacaaaaatgtcaatgagaaaaattcaataaaaaattactcttagcattaagtacaaagtaggagaggcctaggtagtgatgatgtacaagattttgtatggatgcctcttcttaacaactttgatacaaaagtagtgatgaaaaatagaaaaacgcaaaagatataaaatatttattaaaacaatataaaataataatgcaaaagataaatataaaatttataataataataataataataaaaataataataataatgcaagtcattacaaatgaacatgttaattaaaatttaataataaaatattaaaaatgacataatagtaaatataaaagtatatcaattatattgtgatgcaaattttgcatcgtaatacaaatttgaataattttttgtttatattatttaatgattaaaatgtatgatttcat

SEQ ID NO: 243962 - DNA, 2280 bp, Cannabis indica
gtgtgattggcatcaacaaatggcgtgaatttcagaacaaaccagtggttttaccccacggatcccaagcttcaacagcaatcacaaaagtagccctagctttttcccctgaaactcaaataatttccaggtttttttgtttatttaaattaaagatacttttttgtttatcaataaagacaatttgagatgtttagacctttgtaatgtaattaattttatatattatgacattattattacaaatacagaaaaggggtttcacagattagtaatggttttgaggattttgtggattgtgttatgaaaagagctgaaggtgtaatcttttgtggaaataatgaatgaattgcaagaatttttgctttgtttaattaatcttaagcttgagaaacactttgttaactgttaagtagtgtttgatttgtattttttttgcttcttttaaggatgataccttaaccttaaccttttctgttcattgatatacaaaggtttgtttactcatatcaaatgtgatcagtagagttttatgacttttcctttataattcttaaaattattaggaggaactatctttagaatctgatgctaaactacccttttgataccttaggggatccattcttatacataagttagattcttaataagcagttcttgttgtatctcccccgaagcgaaacaagggaagtaaagatgtcaaagatgagttttttcattactttacatcgaacggttagagaatttagaaatagaaatggaactgccaaagaactaggtagaaagaacatgacaccctaatggattttaggctttgttatataagtgcaagctctggatcatatcttaatttcttcaatgttgtttattactttgttcacaattgataaattgacttctgatattactagatataaacacttgattctgttgttctcaatgattgtgtgttaacagttattgtgcaatatcttaccatttttaagtgatagggggaagttggatcatttttaagttccaacattgtatgaacttttgttgatccaaacaggtatagttaaattcttgtttttgtttgttttgtcttaatagctttctcctttcttaactgaatttaggattcaaattcaataaaactaatgtaaaactctttattggattggtaatgacatgaacaaccaatgtccataggtactttgtagattgttgttaaagttgggtgcatgaaatttatatgttcatcaagttgagattcattaatttctacaagtgattttgcttatgattgaaggtaatgaaatggaatggggatttgaatcaattttcattccgctgttttgtttggttgcattttaaagtattagaatgacttttttcctattttggtagactattctatttgtattcacatcctcattttcattcatgtttttattcctcctaattaagcgtattcttaggtagcgtttagttggaggtaatgaaatgcaatggaatagaaaagaaacaatgtttatttcattcatttctttagttgtattttaaaatattggaatgttattccaatgaaatgactttttcatcattttggtggaatgactattttatttttaaattagatttaatgaccattctaatgcaggataaaaaaattaatcaaaaaattatcaatttttgtaagcattttagatttgattctattctatttctaatcctattttcactccttctaaccaaacaccacatttcaaaaatcttaaaacattctcttgttacttatttaagcttgtaggaaatattgttgcgacttgcgagagttgagccgttacaaattttgattattatagtctattattcatagtcaaaaaacattatttagggaatgctgttacgaactacggtgtcggggtttgaatcattccttgcccacaactagccaaaaagagaaggatcctcccaaaaggaaaatcatgatcagcacgactgattctactacagaggctaacgatagacaaccctctcccccgaaaatagcttacaactatatgtaatccattaggtcatacattgtcattttctaaaatatatatatggatattatatcgtcgtttctaccatttattgtcgtttctattgtttattcgggtatggttgttttgtttcgaggaggatttactagcacttttcttacatttatcattatttcccataatttttgtatggttttcaattcttacctgatttacaacaaatcaagtttctaaagtaaacaatata

SEQ ID NO: 243963 - DNA, 2483 bp, Cannabis indica
aaaatcgagtatcgagtgtgtattttagcaaaatataaaaaaatggtatttttgcaaataattatcgaaataatgttggcgtacctgactatcgtcgtagcggtcactcctagcaccaaaatcgtcgacattgaatatttgaggtgaggaagacgaaggagaaggcaatgatgatctagttgttcggctaaacctagtcatcagaccatgagtgttaccattttcgcgattagggttaaaagagaaggaaagtgagccattgaaagttatgaaagatagtaaaaataaaagaagaaaatgaagttttggaatgttattcttattattcatgatgttattgattcttttgccctatagtaaaaaattgatataaaagaaaaatagacaaaggcttgaaaagatagagaaaagaggaaaaggggtttttgttattaagacaaaaaatgaatgtgatttgtgtgttgagacaaattgggtttctataaatatatagaaaaaaagattggaaggtcaaggtggtgattatgatgatgatagtgaaatggggttattttattttaattatttatttattttattgggttaaaaaaagtgagaaagatatggaagaaaatatagaagtagaagcaattaaaaaaagatagaagaataaattggtaaaactaattaagtttggtctctcacaatatttttaattttcaatcaatttatttggtcaagttagttaatgggtgtggcttgtttttgtgattgtttaccaacaaacataatcacatatatgcatatatggtatatttactttgttttcaaacaaatatgactaattacttaactttatcaaatacatatacaaatataaattttggaaaagaaaaatatatatatatatattttactatatatgcacatgtataatgattttctatgtcaacacaagacatgaatctagtctattataactcttattaagtgccaaacacaccatcatattcatgatgatgatgatgatacaagattcaaatactctatcaccactaaacacatcatcaaaattaatataattttaaattaattaaattattattttaaattagaattaatggtttcttttaaaattcaatgttaaagagacataattttcatgagcaataatattaattattatgtataatatgtatcagataataatttgcgatataaatatttaagtttaaattctaattgcagataaatatttaagctttattttttacggtaaaaatacttaagttatatatttctggatctttcataagaatctagccattaagtatcaagtcaatagtcatgtgacagtccttaattagtccagatcattaaatttttaattcaaatatactaataagaaaataacacgtgaataataatttgacacttaatagttaggtacttacgaaagttccagaaatgtaactttatattattaaacttaaaatatttatctgtaaccgaaagttaaacttaagtatttatgctgccaattactttacatattttagatgcacatatatattttttatgaatattgctattgggcaccaatagagtctaatacttttcataggtggttcaatgttattgcttagtgatattctctaaaagctatttttttaagttatatgaaactcaatacttatactaatatgacatcaggatgctaaacactaataataccttttagtatttttctattatcgttatcacgtaataaatacatcaaataaatatttgacatgtggcttgtgatcattttgaatttcctatatttgttttagttttggtggcataaattgcttatattaattaattatttttcttgaaagaaagatcataaaaacttgaattgaatgaaatatgaagcataattagtttggctattgttaggcaaaggtttgtactacctatttggtcttgatccacttcatattggtaatattaattattcactattctaatattccttggaaaacggcttaacatattcaactgattataactgtcatgtgttataatgtatggtgaacttgtaaactttgactttaaattacaaaacaaagaaaaacaaatatataggtcaaataaagcttattatgtttattattattaataactaaataaataaataaaagtatatgatcaacagggcgactcaagcagtttgggggccttagataataaattaaaattgggccttttttttaaaaaaaaaaataatcaaatcagtacttcataaattattttttttttttaaaaaaaatacttcgtaaaattctaaaataaacaaaaaatttaaaagtcaacatatattagaactacaagatttattatttttatttttttgtaagtattgctaaagatttattgttcttattgaatatttattatgtatattatatattatataaaaaatatttattattttatatataaaagaatgataaact

SEQ ID NO: 243964 - DNA, 2142 bp, Cannabis indica
aatgtttccacagaagattctaaacagcaaaactccatgacggcaggaacagattaccccagaataaattgctgtaagcacttcctaaacatgatcacatacttaatttaaatcatattcacaagaaaattgtaaagattaactacctgggagagatccaaataccaaaaatatacacatttctagaccttgttaataatattggagtagactatattttggtggctccttgtagaagaaatgaggccttgtcacggacctgagaaaagaaatcattatgaaaagataacaaacatccaagaacagacatgaaagataaaacaaacggagctcaataccttcgatgcaaaagtcctcagatcggtgctgcttatttgacaagagcagtttcttagatataagctgtacatttctttcaaaactccattgtcttctaaaagattcttcgacaagagccagttttgagttaaaattaagtacatgtacatcttatatagatcacactttttgtccttcaaattaattccaataagcaatcttaggatgtcatccgggtgggcagcctgcacagaaggttaaataatcaatctgcaatgctgagttgtcacacgcctcgtaaagtggacaaatacaagctgaaaatgaagggcaagggcacaggaagtgaccttcttatcaaagaaaccaataagaatttcaaaagcaactgcacttctaagctgcttactgcgatcatcaattccagaaatgcattctacaactcttatgcagttcatgtcttttggtactctgtaaaagaaaagaatccacaataacacaaaagaaagagaggaggcaccgaaacgtaagttatacatatattgagttttgctgttcttatgaaagaccacaaattgaaatatggccaaggtcattcacaagataatcaaagacttcaaattttatcttggtattgaacataatatccctaatgggtggtagaaaaagcacgctggagtgtaattaattcagcaaatgcaatctcaaatatataaagatgcccctagcatattattaaatatccattgttcattatgcaaagaacaaattactgaagttaaacatataatatattattgaaattgttgttttaaagccaatgtacagcaataaacaactgtatccatccatagaacaataaatcaatgcagtaagtcatataaatattttttttctgagaaaagtaacatattagcactattaacctgcatgcaagagattttgcaattttctcacagctggcattccattcctcgtttgtgaagtaaccaataactgcttgtgcacattcatacaaaagcacagacagaccttgaagctggcggtctaaaaagaaacaaatgacgacttcaactaactcttcagcttctgatgttgaaaaaatagaccacttacttctatagagaaccaaacaaaaaaaacccgtgaaaattctttccaagttttttcggccttcacatgaagcaagtgctaaaacgaatatcatagcagtataaacaaggaagaaacaaaatgcaaaaacatggaagcttaaattgtagtaagacttattttaaattcactgcttacctaaattgacaagaagcagtaacaaacttgatccaagatctaatattttgagaaggccccccacaactagattctatgacaaaattacaagaatttgtgagatgtacaataaggggcaaagatgtcacaaatgtagtacactgatgtccagtaaaaatagaaacaaagaataagtcagaaatgcaacatcagctgtaaaccatttcgaggtggcgttggacataaaataacaattggaaccttatgcttatgaacactaccattctatctatgctacttgcaatcatgcaccaaaaatgtatgcatatgactcgtttgctatgacacgtgtaccaaaagtgtatcacatgacatgtgctatgaatgtaccaaaaatgtattcatatgacccatatgcacacatgcatgataaacacgcattgaacccttaaaaacagatggaacattatcaatctcactctactaacatatcagaaaggacacaatatagctacaagtagtttcacggtcgatagaatattgcaaaaaaactta

SEQ ID NO: 243965 - DNA, 2795 bp, Cannabis indica
ataacaagacactatttcataatattatttgacacccactaataattaatagtaaaagtataaaataatagataatgctacataaacacaagttcgatctatatatatagtacatagcaaataaaaaatgagagaattagattgaagagagagaggagtaattctataagattaatagataaaaatatataccttcacaactcatattttttctagctgaagtagtctctgatttttgtaatatatatgaatatgatttattgtattaggtatagttatagattgattttgagaatgggttagaaagggatgccctatttatagatagattttgggttggcttgctggcccttaattatatatttttattacatatggtatgatctatttgtgtttgtccattattgactatgcatcaccacaattttcacaccttaaaaataaatataagataagaacataataataacatagctagtgaaactaggggtgtttaatggattagaccgacctatcttgatccaatttagttatatattaaataataaatttaactattcgttcgatttaattaattttagcatccaatatagcgatctaacatctaatagatattagatttaatcggttatatctattagatgtatttcatgtaaatttatttaatttgaatttatttaatattttagacctagtatttattggatcaaatcggatccatttaatattattattatagatccaatatctattggattaaattgaatctatctaattcaaaagaaaaagtaaaattttaatataaattttcatatatacatatatttattttctacgtataacaatttaaaatctaattattcatttaaactaaataaaaatattaattaatttgattaaatattgaatgtattagatttatctgatttaatccgattagatatttaaaaataatgttcaaaatattataattgaatatttaatatttagcaatcggttataattaaattggtcaattattattaaattggattgatttatgcacgtttctaaatgacaagtgtatttgttataatcttattgagggttatctatgaataatggtatcttaaatatctcaatatatatatatagcccacgtgagatatatatgtgtttatatagaaagataagtacaagaacacacaataaaatgtcaataaatgcatacaaaagactataatatattacttgatatccactagtaatattatataccaagagggatattaattagttttaatatgctcttgttgtatatagattctcaccatatcttaatgagagattgtaaatttaatttgtagtaagtataatagaattattaaaaattgataattaataataatatgaatttaaaattgtgtatattataattaaccaaaacaaagtaaggcaaaaggaaaatcattctgaatttattgtaggtacatttctttttaaggaaaaaaaagtatgtagtattactaaatgtttgaaccttatttttaatattacaaattattttaattttttaaaaaacaggtgagagaagctgttgtaataacaatgtacacaattttataagaaaaattgaattataatttttctaagcattaaaattgagagaaaaatggtagcgatatgcaagctctcagttggtggcggagctgatagcgatatgagaaggtattacagccgccattcaacgccgagtgtctttgtttgaggttcgctcggactgcttgcaagttgtccgtcttattaatggtgctgaggtaggttgtcggcaggaagacagtctcattgtggagattcaaagtctacttcagcatcattctgttactggggtgcggtttgtttttcgggaagcgaatgtagttgctcatgtattagccaattatgttttgaccaacaaagttagtgctatgtggattggggtttctccctcttgtgctcgtcaaacgattgaacgtgacttgtcatttccttgtaatcgtttaattgtttaatgaaatgtcttttcctccaaaaaaaaatatatatatataattttatttcttattattagtaaaacgtgtatatatatttatatagattcaatgtatgcgtgtattcttgtatacataaaactacataaatatatacacaagtatgaaatgtttattgtgataacaaatacttgtcattatatactcttattatatttaatttatttgtttgtgtagctatatgaaaaaaaaagtcaataatgaacaaacacttgaaaatctataaatagggcatctctcaaagctattctcaaaatcaaataatatattttcttgtatacacaattttagaggcttggtctttattgtttgagcaaagatgagttgtgatgaaggtatcaaaatttaccaaactttttacaatttttatttaattttaatttatatatataacaaatatttaacattattaattttataaatatattgacaggaaagacatcgtggccagagttggtaggagtaagaggtgaggttgcaaaagagactattgaaagggaaaattctactgtaaatgcgattgttgtttcagaagattttattggcgatcatcagtttcggtgtgatagagttcgtgttgttgttgatgacaatggaattgttacttcaactcctcaagttggttaattatatatatcatttgcaacatattttaatttaattagttttataaattggtaagtttttatttatgcattgtttcttatgtgttgtaataatgtgtgt

SEQ ID NO: 243966 - DNA, 3960 bp, Cannabis indica
acataaaaatattgcataaaatacaattcaatataatacaatacaatacgacctaatacggcttttcaaacaaaccctaatagtgataaataacataaatagaggagtgttataatattacattttattttttttttcttaattattgtctccaaaaatacaatggaatattttttaaattttttatgataacgttcgttataatattatataaatttttgaaatttttaaataatttactgtattaaaaataaatttcaagataaaacatgttaaaaaaaattaaaccctaattttttattcgaatctttcaaaattttaactataaccacttttatgaatttattttttttaaaacatattttaatatgtatttttggataaaaataagaaaatattttaattagcactctacttaaaaataataatagcaatgaaaggataaagagaaactacatttgaataatgcagaatactcaaattgattatatttatgtaccccatatatactattttcattttattcggtttgagtttttaataacttttacttgagttgtcatataaatttgagttgctatatgaatttaaattctgatttaagttatctattatttcctatacgtattttcataaaaaaaaatactttcaaatgtaaaagagaaaaattataaatattaatcgtttatatttttctcataaatttatataatattacatttttcaatggcaaaaatagagacctgccttcctccaccaaagaattttccaatacatattatattactagttttttttttttctaatattaatattttctaatgtaaacgaagtaataagtgaagttttttttttttttgtacctcaacgatggcggtgaagacagagtttgtggttgatttgcaagtaccaaatccaacggctggaattgaacgaccagtactggaaagcttaaacgacactgcgtttttagcatcttgatcatttatcaaacttgcatctgccatagttattagttatctttctttctttcaacaatttattttggtgaaattaattaaaaagtgaggaagatatttttactctgaaaactctcttttgtatttctatactattttatatacacacacctacatacatattacacaagttacgaagcaattattattattattgttttgaatatggtttgggtggagaaacgattagatggcatatttgcatgttggacacacccaaaagtctaataatgtctcggtcattactattagatattagcagtctctagcactttctgcatatatcaccttatatttatatttagttagtaatacgtccagagccggcccgagaaaattaaaaaaatattgtgccttatttaaataataatattttaatattattaaaatatatatttattaaaggttttttttttttttttttttcatttagtccctaatagaagtgagctctaggcgcgggcctaacctgccttaatttaggaccggccctagatactccttaaaaattagggaaatttacatagtatactaacttttgctatttttttacaaaaatactgccaggcggtattttttacttttttactgtgtttttttataagtttcatactgcagtatactgtgttaagtttcactggtgttctactggtattttactagtgttctactattgttttgagtgatactgctttgtgttttaatggtgttttataaaaatacagtatttttgaaaaaatttccgtgtcacagtatttttgtaaaacttaaccaaaattccagtatttttgtaagtttccctaaaaattattacattaaactatataagaaccaatatttaattagaccaataacgatattgacatataagaaaatattagacatcactgttaccctttaacatttgtctaataacccctacatacaaacgcctccggcgttccaatcataaatgttatgggaaattttaaataatattaatattattattgaaataatttaatattaaattttaataattttacattaataaaaagtataaaaaataataatgacaagactctacttttagtagcactaaacatcttggattttgacactttagacaaaaaaagagaaaattactacaaatcgaaagtattactataaaaaccttcattgtaggattgggcctaagctaaaatgggctaaactcgtgtttagggctacctaactaaagaaaaaaaaaatattttcatttaaaattatacatatttatttaataatcgttaaaaatacaacatattttattaataaagggccttccagaaagattgtcctatcaatcctccaaactaagatgcattcctgcctagcaaagctatttcaatcagtttcaaacctagctagaaatttaataatttttgttaaggtccacccaatctcagggctgctcttgtttcattactttcggttttggactgacatttatggtaattgtatcggtcacaaaactaatgcgtattcagccgacacaaataatttcatgttttttttttgtgtcgattctcaagtgatgaatctaagtgttattattaatttaaaatcgaagctaattgttacaaaataaatttacacggttaaaattgatacaaaaagaaaaaaaaatatattgatattgtagaaaacaactccaaatggagagtatgttgtatgtatgttacttatgaaattagggaattggaataaagaacgagtttgattaacttgtttatttctctaaattttttgaggagtaagaataaaaatttttgatctcacaccaatttgagattatagaatggctgcggcaatccttccaaactcatggaattgtcatttttattctaatttaattatttttttaattacataaaattaaataatttcaaatatacatataaatggcaattaatgtgtattatatatattttaaaataatatataatttttagttaatgttgtgaaacaacacctcggcaagaatatatagaacaagaaagaccaatgaaaccaacaatgacaataatcacaactatgcagtaatgtttaaaccagaaaacatgagcattaaaacataaagaacacaaaatgattttacgaggttcgaacaagataatgtatcattaccttgcctacatcctcggccagaaacaacctcaacaatggctgtgagagattttattgattgagcttgaataaagagagattacacaggtacaaattacacaaaacttggaagcatagcttcagtaatctactgtctcgaatggcagtgaacacagacaatgtgttactccaattacaaacattcaattcacctcactctctctctcaatcacacctgaactccctttcactctctgtttttctattctccaagattagtctatgtagtagatagaatggcccttttaaatagtgaagttgcagcattgatgcaaagtacccgaacaccaactgtcataactgatagttggttaaattagttaagttcggtaagggtacaagtgtcatttgataattggccaactattttaacaattatccaccttggacacatatcaattgagcagaggcatagagatgaattcagctgttctagacttgagcaatctcagccagtgagaatgcgagcaagttcagacaaagtctgaacttggtttgaggaacatatttggttaacatgtcagcagggttttctttagttccaatctttttgatctgtatctccttccttgcaatcacttctctgataaagtggagcttgatatctatgtgcttggacctttcatggtacattgggttcttcattaacactactacaatgttagcctttagaggcagttttttcaacaccatttataaaaagggaagctaaagggtgtgaaaatacccgctatgttcgaaattgacatttaga

SEQ ID NO: 243967 - DNA, 1222 bp, Cannabis indica
cttgagctaaggcgagctaggcgtctgcctagggcccaccgagttcaaagggcccaaaaaataaaaataaaaaaaaaaattcttttacaagaacatgtatattttaataattttcaaaaataccgtatttactctaaaaggaataattttattgctacctagagcctaataatcccaaggtcagttcttgcatttagcgcctttgaactatgaattatatgttgctcatcggtctcaaattgtccaccagaggattggacaagctattggtgattttcgaactatgagtctgagttgagaaatcatattatctttggctgtgaaccattcctcttgtagaaagaatagggataatgaaaaagtgctccctaacggtcaagcttgacaatctcagttattgcttttgagttattttatgaagatattgtccgaggcaagtaacctcttaacaatggtcaagcttggtgatctcaattttctcttggtgattttaatagtctacagttttacataacaaacaagattacttcttcttcttttttatttactgaaaattacatattttatagatgtttatataatttgtacaaatatatatatataatatatatatatatatatttatatgatttacggtaaaaattaaaaaatacaagaaaatagtatgggtcagtttagtacgcaggattggactagactgggcaagattggattatgctgaaagtaatcatgtgtttagtttaagattagattagactattttatttatttccttttagaaaaaaaaaataaattaaaattaaaaatatataatatataatattaaattaaaattaaaatatataataataaataaataaaatgaatgattcggagtaaaaaaactaaaaataaaaaaataattaaattataaaataaaataaaataatgtatcctatataatcaagtatatatcataaatatataataaaatagtttatcatattctttatttaataaataattaaaatagtaaaataaaaatacttgaataatataaaattgtttatgttaaacactaatttaatataaatattaatttttaaaaaaatatttatataaattttctagtaatttaaaataatatataattttattgtcatatttgtttcttttagaatcaatttaagtaactattgtttaattaataatattttaaattttaaaaacttatgtataataa

SEQ ID NO: 243968 - DNA, 1144 bp, Cannabis indica
ttgttccattaattgctatgtatttccgtaaatatatatatatatatataaaaaaacttctttaaaatgtaaaaattaaaaaaccctacaaattttagttagttacaataagtaacaagctaccatagcaccaacaataattatctatttagttacaagggttccgacaagttacttacaataaatactagctaaccagaaaaggcttcatatagttaccaattcaataactaaggtaattgatcactatggtgatcttgatcaaaatcaattaaacaagataaacatacaattcatacaagattatataaaaaacaatgcaaatttttatagtgaaatgtcaaaacttagaaaaatatatacaatgatgtactctacgagtagtagaaggtttttgagaacaaccatgcccataataagctaataaatatagagaaaactttaatatttttcaatatacataacactacttgccttgaaaattcaataaaagagtttgaattttacaacaatacaaacacatattcgaatttgagcacgtgaggataatcatgatcacagaggcttgaccacagatgaagactaatttgattataatattaaagaccaactttattaaatttaaagtatttttttccaaaaaaagaagttaaaaaatgttattaatgtaattagagtggtagtgggcccaaacctatggtagttggacccaaaagtaaacccattcatttcacagcaacaacacatgtcatccaattgaataatcacatctataaattttgggatatgtttaaaattacttttttttattacacattaactaaatataactttaaaataattttaattgataaatatttattttataatcaaatatcaaatataatctcacataacttatcaaaattaaagttttcattgttatgacctataaaactgagtataaattaaagaataataaaataaaagtaaaaattaaaataaaaaataaaaaataggtatagagtgtaatttcttcataaattttgagggttttcttttaatattaattaagactatcgatttcttttttcttttttgaaagatgaatcaaattttgggaattttaatttttatgggttttaagatataagtttgtaaaaat

SEQ ID NO: 243969 - DNA, 2060 bp, Cannabis indica
gaaaaaatactagaacagcacaaatatattatcaacttaaactagttacaaaaatacaaatatacttttttcaaaaatttagtctttttcataaatttataagcaaccgaacacacataatatatatatatatatacaataatataatcaaagagagagtttatgagcagagttaattaacagactaaatgcaccataacaaaagagtgtaggaagagagtaaaatgggcagaaagggcatagaaattaaacggagaaaaaagtttcataattaataatataaaactaattaaatgagaaacaactaaattaactgaaaaacattatacatgaatgctgagaaaaatagtttaaaaagcttattaaacatgaaaaattgagacacaatagagattaaaggaagaaggtcacataacataaacatttgtttgtgctttgttttatatagatattcattcactgtaaatctacctatatatatatatatgaaaaatatgtatactgaaatggatgaattccataactttggtttgttgagagtatcaaatttctaatcagattattaatccaaaacaacaaaatcaaagaaattcatatgatcaaaaaagaaaatggaccgaaaacaattttagcattgaaatgtgaattcaaattagattaccccaaacaacgaaatgagtaaaagagaccaagatttttttttttgatggaatgagagttataagaatgaaaagccactaatttttaattaaataatgttaaaaattaacaaaaatgtaaacaaatgagagcaaaaaaaaattgaaggaaattgctcataccctacatagatatagatagatagattatgactaaagtggtttacaaacattagttaatggctataaattagaatattagattttaaattcgattagaaagggatataaattgcagataatatcatgccaaaaaaataaacaatcatatactcttccttttaaaagtcaaaccaatataaatatatttttctttctaaaaaaaagaggactttaaataaatagtcttatcaaaatcaattatactgtgtgtacgttaccataggttgcagagagtaacaagtaaaaagtaaaaaatcagtataataaataaaatgtgaaataagtcatttatggaaatagagtgggcccacctctactttgtctaatgtacggagaactctaagtatgaggagatcgatcttctttttctgatgtacagagaactcaaaacatgagatatacaccaataataccaaatcatcttcatatcgctttgagtttaatgatgttcaaagacgaccaagagaccaaaagaaaaggagcgcttcaagaaattaaaggagccgtaaataagatgttcaaaagcctttttaagagtaaaaagaagcagcgttcgaagaatgcagaggcggagattccagcggcgcctctgaattcatcggcgccgctggaatctagctattgattcaactgagaagtggaagaatctctctcttaatagaggtgattcgaatcggccaataaactcatcagggttagtgtaagggagattgatgattggaccatgaccgtctaaaaaccagcttttcaaaataagtgggcgagagatagagttaatattattattaccactaaactcttgtgttcaaaagatttcagaccacatgttgaagaatttccaataggaagttcgatcaccaacggagtggttcatggaacagcctatgaaaacaccatcaactagctcggtcacttgaattgaaagcaggctcattgtgtggccgtcatgactaacagctttgtgatgatcaaacaacgattgcacaatcttacaaggcacgtcagtaggggaaaggatatcagatattgttaggtctagagttgaatatatgaatttggctccaggactgtcattgcaatccacataaacaaggtaggaagatgggttttctgctttgattgttttaagtcggcctgcaagtgggtagaaatgaaccaaagcaagggaaagagagtaaaaagaagcagcgttcggagaat

SEQ ID NO: 243970 - DNA, 1342 bp, Cannabis indica
tggatcacttttcttttttctctcttatgagtgattttcttttggtgacaaattgatgatagtagtacaatttttttttggataaaataattttttttttaaagaagataaaataatattttggacaacgtgttttgtccagattagtagttggactttttttaaaattaaaaattgataatttgaatttattatttttaaaaatagtataaaataatataattcattttttatgaaaataaatttaataataatgtatatgaataaactaattacatattttgtttttgttcatactaaaaatgtgcttaaggttagtaaaattgatctaaacgtattatgatctaatattaaaaagtataatgagtaatttttataaaagagagaattcaaaatatgttttttcttttctttccataatatcttagttgaacatttctccatctgtacttctaaaaaaaattgctttgtttaatcaacacatgatagtggataaaatataccaaaataatgacaaaagtattaatagagaggaagtgaggacttaaggggggttttaatttaaactatcatgagataaattttatttattggtcttaaacgtattattatatgttactaaatggagtaggtatcttgtatatatgtttatagtttcttactagtaataaacataaataaaataaataagaagcacatgcattttatttggatagattcccacaattattatcattataattgcttaatttgattaatttagtttctcttggataaacacacccataattctgcaaccagggatggccctattgaaaataacgttgtaacgttcaaattcttctgtactttaagctaaagtttacagatacgtacaaaaagagaaacatagtaaaactagattaattacgactttacaagtgcacaaccacgtgagcacattaaaataatgttccttaataataaaacccataactttgtgtgggtgaaaacggcagcctaaccatgaaatatatagagtaaaaaataatgataagctgagaatgacaacccaaatgtgtatattgatattatttagcacccataattaatgaataagatgataatgagtatttaagttgaggagtttgaataagaacattagtgggtcgtggctttagtcttgagaacatgtaatggtgaattttaaattaagtaaaggtaatacaataggtacacgtctcatgcttgcacatttagaaagaagaaaaaataaactaattaaaccaacaaagacttttctaattatgtttgacatcaaagttgacggctgtgcaaattgatcaatgtgttttcactatgg

SEQ ID NO: 243971 - DNA, 1354 bp, Cannabis indica
tgatattgtaacaactcaactatgaaatatcttctcacatgcatgttatatgttataatataaccaacttattactttgatatgctcatgcatgtatgcatgcaatctcaaactgatactcaagattcggaaatatatattataacacatttatggtgacatgttatatgtaaatgtaattgagtgaaaaagtgaaaagaaagaagaaaatttgttaaattattataatttataataaggaaaaaaaaatacaatcaaaatctcaacaactacacttattaaagtagctaaaactgttattattatatgttgaaatatctccacaagtccacataaaagatcatgggaaaaacttaatattattattatagtacgagtgcgacaccccttgcctcaacccttttttctttacgtaacatatctttccttataaagattaataattaggaattaggattttgcatatcatgatacccaaaagaaaatcatttaataatttcatggtgggaaccgggctacgactttgaacaatatattcttagttcaagataatttaaagtattatgaaggattaagttaatcaaatttattatttttcgtgatcttgaggtgatttaatatttatttgggatattgaaaacaaatactcatacactttgtattttgtaatactaattaagtgatgtttggttggaagaaataaaataaaaaaaagaaaacaataaatttttattctattcatatatatatatatatatatatatataattataaccttttaatttagaatagaattagtttggttctaaaagtatatttttaaataaaggttttacggtatatgatttggacattgtttaaatgtgcaaaggaaagtagagttttgcaattttggtttaaagaaaaagttaaatgttaaatattacaaaattcaaaaaataaagagttttgttgccaataatatccctgtttatttcaataaaataaagcaaaacagagcccctcaaactctaagcggctctattaatgtaatatatatttttgtaatatgtgttatgattaacctctaatataataaaactaaaagtatcgtgctttcataaataacatgagcatatatcagcatataaataatgcaattgttaggtggaccggaatattatatcatatatatgtcaagccaaacggtgcactgctattatttattagacaaatgctaaagggcaccagtaatacttaacatcttcctatatgtcagtatatcgttattagttcaacgaagtatcgggtcccacataatttaatataatagattttagggagtatcgctagtcaatcgcaacatgacatatcg

SEQ ID NO: 243972 - DNA, 857 bp, Cannabis indica
accaccaaaattttaaaattaggagttagttacaataaactaaacacttatagaggttaagccgcaaattaccctaaaataaataaaactactaaaaaaatgataccggttagctcattattaaaaaaaaaaataaatagaaaagtgaaacacgaattcaagtgcagtcgcctgagtaatatgtgatacaatcctgagcaacgaaaaaaaataaaaacttacaagccgtgcccataggaatacaacccatatttttgggagtttttaaaatatgtatggacaagacagcctgattctacacccacatatttacatgctcaatatttacaggcatatcttgcagaacatcatcaattcttcataactcatataattgccataattgattaataatcaatattaaaatgatcggtggggcggctaatacgtgattaaacaaatatatatatatatatatatatttatagaaagagatagataattaataataaagagtttcttaatataattaattgaacattttgttggcaaataataatgttaatgagaataattaatttgaacaaatcatgaaagctagctaggacagtatctctttggaaatctaatatgataatgtagtaataggcatgatccccgcttatcgcgtcaactcaaactattattattattgtgtgtgatatagactcatacatatatacaaaagtacaaaattaattactcagtcgtctcttctctacactccatcaatataaccgacaaaaattgttcacacttaccctaccaaattaagaaatttaatcaccaattaattctactaaatatgtagttatcataattaagagtgtagtcaaaat

SEQ ID NO: 243973 - DNA, 1405 bp, Cannabis indica
ataccaaacatgctctaagtctccattttgttaactctctggttttttaatctttgctggatttcattttattaattgttgatcacactaaggtgttctaatttttgttgtgtgcatgattgaatcacaacaagtcatcacactgaatggtaatttcaagcatcccctcccctgtatcataagtaacttgtgttttctgcttatcatcttgggctacatctttatcttcctcctgtgcctcttgattaactttactattggtttttggcttccattcttttcattttttatggttttaatgtcgtttcgaaggttcggtttcatttatatcctcattttcgttttgtgcatttggtcagaagagaaaacccaaattggcctttaagctttagctatctctgatcataaaaacaactctgagtctctaacacttggaaatcagtcatagacatttggcttgagcttgttgaagttgatatgatgacacttgaataaagcttccatttatacatgacatctaaaaattattactatcatctgatctaacttagcttcagcaatttggaatttcaagaatgacaatgtagcataaaagttaaaagagaaaagtccaataagtgaagttcttaattcttgtttattgaaagaaaacaaaatactttgttctttcctagctagcttcataacagcaacaaggaactaaagtgtgttcataatctgatatagtaaaacattactcttcttctcacatttgaattcttgtagtgccttgatttttactctatgaatgcccaagttgttaatccttttgttttttaatggccccagagtctttgatttttgtggagccacaagtgatgaattgcatcaaaactgttgaggcctttgcctttccacattcacaagcattctcaactgtttgatccttcttcctagacccttcaaactccattgccgagctctccaatccaccattcctttcaggcccagaaacctcactgagtcttgattttcttggcctgaccttctcgtcagtttgagtagaaacgtttgtgcctttggcagccagttctttagagattttaggcttgtacactttgtattctccgagatcatcaaatgagccccatgactgattttttcttctaatgattttggttggatcaagatcaacactggaatgttcctcgataggactgtctgtttcgcgggaaattaaggaggatgaagacgatgatgagtttgatgagatcgtactttcgaaagacctgaagctcaaagaagattcaagcagttgtgacccttttacaatgtactcatggccttggcatggatatatgaaatcattatcggataagtcttgccatacaaacccgttcttatagctcctgaaaatgtcaaaaac

SEQ ID NO: 243974 - DNA, 2544 bp, Cannabis indica
tatgtaggttttgatatggtggccacaatggcagaggaaactaagcaaccctctagagatatcccgattggtttggtcggttcaatgagtatgatcactgtaatttattgcctaatgggtttgtcattgaccatgttgcagaaatacaccgaaatagatcgaaacgcagcgttttcaatagcttttggaaagattgggatgaattgggccaagtatttggtgggtatatgtgccctcaagggtatgacttcgagtttgcttgttatgtctctcggccaagctcgttacatcactcaaattgcaagagctcatatgattccaccttggtttgctcttgttcatccaaaatctggtaccccaatttatgccactcttttaataaccattactggctcagtcataacattttttacgagtttgcatgttttgtcaagcgttatctcgatcagtacgctctctatttttatgcttatagctattgcattgctagttaggaggtactacattagagaagttacggaaaaggaagatttgatcaaatttattacttttttatctcttgtgattggttcttctattgggtttactatactttggaacatgaataggcgagggtggattgagtattctgtggctgccttgatttggtccgtggggaatttgggcatgacactgcttccaaagcagagagttccgaaggtttggggagttcctatggttccatggctgccatctctgtctattgtggttaatctttttcttattgggtctttgggaatggtggccttcttcaggttcttcgtctgcactgcgctgatgcttctttactatttctttgttggtctccatgcaacctatgatgtggcttgttccattaactcatgtgaataaatttaaaattttaagatctttcattgtttggtaacacattcacatttgtattacctcatttgaaatgataatgtcatgtgttcaccctaaaatatataaaaaaaattaaaagacaatgtaatgagctagtgaggtcaacggggacaaatgggagttttctttagatttttttcggtagaattttttcttaaatacctaaaaattataaaattattacaaaatatatatttatagttttttttatatataggtttacgaatttgaagtcttttttcttacaaaactatgtacaacaatattataatatattgtttaaacgttgtttatatgttatattttgttatccgtgtttatggacgaaagatatgtagtgaaaagtagaagacaataatcataatgattattgcttgagtctctttaattacggaaggtcatagaaagattagcaaaaggcctagagacttgccacaaagcaaatgaccatctgggacccgaaagtcttatcgtctttttgggacccagagaagaccaacttgcttattacttaagagtgcaggaagacgctaaagagtcatgcgaagagtctaagacggatgccaattgtgcgggaaaaattagaggcctatcacgaggcgagagccagatgactttaattgaccgttattcttttttgacacagaatccgatcttgaatgtctgacggcttctttgggtgttttgtctactaagtgaagactttaatttgtactgcaccaacaatgatctccactgtacggaccctttgccctacgaaaaagaattatattgggggcccaatagtcagtatgcttatgtattttaccccaatagtaggtgaaccttttgcaaaaaccttagacaagtcatggatatgccgatgcccgtactttagcttataaatacctcaaaaagggatagataaaaaagagataactaaagttatgctaaaatctctcttagctttcaattaagagggcagagttaggattttattgtaaacaccacttataatatattaaataagctttcaaggccaatacactaattcgtagactagagataattaatctcttaaccagttttattattaatattgctattatagtataattaaatatcactaatcaattacaaaataatacacctacacccttaattcccaatagaaattctcctatacaacccgaaagttatactaatctaccaaactcatcactcaactacccctacactaattgaaaataaaataaataaataaataaaaaagaagaagaagactccaactagccaagagtacttcgccacataagacgatcaggcgttgtgaatctaacccactttctttttttttttctttattattcatttattaaggcacatgtatgtaacaatacattttgaagcgaaagagtgtgaaattcgaaagttgtacgtggatgtgattctagtcagtattcaaataacgtcgtttagcaaaaaaagaaataacaaaataaataaacgtgagattatcagtcaacgaatcctgattaaatgagtcacataaatcaacggttcaagatccaaaacaaaacgagaaatttcttttttgtcatttgtgtgagtgagcccctacgatgatataaggtatcactc

SEQ ID NO: 243975 - DNA, 1605 bp, Cannabis indica
taaatgagagaatccaagtagttagcagagatgattggtaaagataatatataagactttacacataaaaattatgaaatgtgactggaagacacatacgttcctgcaatctcctggtatgtgctcgtgattataaaatctgcattattcatggctattagatcagcagtgaactgacatgagaaatggtatttctcctcgaacttcttccaatatatatcagaatctgggtatttagtcttctccaatgcatgagcaatggtgcactgcaaaaagtaaacaaaagatgattacataaatttagcctatgattatcaaagaacttgcatattcaaaagaaattatcactaacctgtgtaactcccattttataagccaataaagatgcaacaagattcccatcactgtagtttcctattataaaatctgggattgcttgcaactcagcaccgatttcacttgccacatcctgatcacatgccgaaaaatgattttaatataccgggaaaaaaaaatctaaatttgaagaatagtacctagccaacacaacacacacacccaaagaaaaagaaaaaggacagaaatcagaagacaattctatatgccagttctattgtaaaagaggtaatgattgccaaataatgtggcactgcagacagtggtaacagatatgagggttagcaggaaggtaatggtagcagacgaagatcgttggatatagttagataacaaggaggcataataatgttagcagccaatagcacggagcatggaggaaataaaaaatgtagcttgactgaggtgcagtaattaatagattggatacaaaaacttcaaaaggtggtgtaactggaaaatggaaattcaacataagtagccattttactgtgttaaattatttccatgatgtaaagtttaattgtatttgaacatagaaaaccactaaaataaacacgtgcaggttttgaatcatcaagcagtatcattgctgattaataagtagaatagctttaaaacttcaaattcacattacacaaaatttacctcagcaaaggtctctagataaggccagacatcaaatcttgagatccatttacgaagaatacccttttctgatctaaatggaactctcaaaatatgtgtatgttctgttccagtaactctttccaaacgctggttacatgtggttccttttgcatcaggtattaaccttgtcaccttgaatataaaaatggaaataccattgtattaacatagaagaagtttgttgacataaaatcaggtaaaatgaactgatacgacactaacgataagaattttaggatcgatatctaatccttgcttctgaattcggagaagcatctctttctctagtgcacgcacttgatccagtatatacaccacctgtgcagcagattcagttaccaaatgtttgtttatggcattatgatcaacaccatcaaaatataaatagtgtaaagcaaaaaaccagataatgaatcaatgataccaaatagactagagcacaaaccgagcaattgcagaaaaggcatcaaccctgttttgtatcacaatgtacataagtaaaaagaaaaagaaaaagaa

SEQ ID NO: 243976 - DNA, 1708 bp, Cannabis indica
aatttataaaaatataaaataataatgcaaagttaaacgtaaaatttaataataaaataataataataatgcaagtcatttaatgcaaatgagtacgttagctaaaatttaataataaaatattaaaaatagcataatgataaatataaaaacataacatttattgtgatttaattttgtatcatgctatattgtgatgcaaatttggatcatttttaagtatctgagatttttgtatcataatttagcacaccattagagtagaattttaacaaagtgaattatattttgtatttacatcacttatttatatctgcatttgagaacctcttagtcatatataactacacataatataagtcgaaattcaagtggttctcgtaagtttctatgttagcattaaagtggagccatcaccaaattattcatgactaagtttttgagacggatgacccaattgatactaacattaaccgcttctcaaagattttatcaatgtatatatatatattaatatacaagataaatgatttatatatctatgctcaaaagaaacctaaaagagcaaactaaactcacacccaaagaaaaagaaaaatgaaacttctcaaattagccataacattttttattgtacttgtgcagttaaatccatgggcaaaatcagctacttcaacactagaaaacttcatccaatgtgtcttaattaattcagatttttcagtgttacgactctcaaacatactattctttgctccaaacacttctctctacacttcagtccttcggctttgaaatcaaaacctcagatacttatgacaaggcaactcaactgttaatcaaaaaactttggccctgaggtgggtctagtctctcgtggactctcaggaagtttatttcctgctttctctactgttgtgtgcagctgtgagtggattacaggctttggagaatggtgattgtgaatgaaatggcaagtgaagaggtcactgtggctgtggatgttagggatgactcgatagataagaccttggaacgggacagtgcaatggaaattgagatgatggagttgtttgaagatttgagtcttgaagatataatggtgatcaaagcttgtgtgggcaaggttatgggctgtaagaacatggctgcgtcggtggtaaaggaagatacttctgggtatatggaatttagaagagacttggagaatgaagaagtttgaggacggtgttcagggatttttctttgaatctgaagcggattgcgcctttgtactgaacaagagaccttggctggtcaatggagtgttgttaaacttgaagtcgttccctatcgaaggtgaggtccgagtatcagagtttgatttggctcgtttctgggtggagttccacggactccctacctgctgtctctccgagaataatatcccaactcttgcaaaaaaggtgggtcagctggttaaatcgaatgggaaaaaagggaggagacggtttggcggggcttccttagatgttgggttgatgtctggctcagccatccgttcccggcggggttctttttgaagtcaggctcgaatccggaggtgttgattcagttttaagtacgagaagctcccgtatctttgcttcaactgcggtaaattggcacacacgaacagggagtgcttagccccgactacttgggttactcctccgtcgggaaaagcggt

SEQ ID NO: 243977 - DNA, 2453 bp, Cannabis indica
tgtccaatttacctattaataaaaatttcatttaccttaaaaaaaacaaaactaaacaaaacacaaaattctaaagttaattttatacaaataatagtgcaacaaaaatgtccaagaaccaaaaaagttacctaggattgagacataatagttggatataatcaatggattgagaccagacagaagcaaaaaaccaggtttttctcatcaaacaaattaatgaatgaaggaaaacaaacaaaccaatgtatataaataaatatatatatatttttgatgaagaatgagttatggagcttcctattgaattgaagacagtaaaatcagttgagcaataatgatttttgttcagtccattttcagacaatttaatgggcattgttttaagatgtgtgagagtgagactctctatgatatgctaaaactattccttcctactactactattgggtaggtgtagacaaaatcctagtaaatattttcatgacttgtcattttttggggttttaaattattttatgtccaatagcaatatatctgcactctgaaatgggttttttttttagttaggtaattaataataattattaaaaagtgggagcacatgacatttaaaagccattggtcagccttttttgagtggaagtaagtaataagtaaattaatgaaagaaatttgaaattgtacaatatggcctaccatacccaccactccctctatttggagggtacccctaaatgaaaagttgaattttaactagatttttcttaccaaaacaataatgcccatacacatgaaatgaaacaaactagagggagtttttttgattaaatatataaattttaattttaagtcccatgaccatatccaagtacaatcaatagtactctttagtctttacatagaaaattatactatgttatgtttggtagggagtctatatgggaggatatggagagtagtggaggaaagaagatagaaaataataagaataatttaccacataaatacttaagtttaatttttgattgtaaataaaaaattaatttaattttttgtagtaataatatctaagttatatttttgaaaccccgtaagtacctgtgtttttttattggcatatttaaaatatattttttaaataaaaatttaatgacttgaaccaatcagatattgtcacgtgacagtttacttaaaacttaatatccaagtagttacagaagttctagaatcataacttaagtattagtcccgctaaaaattaaacttagatatttataccataaattactcaaataattaaataacaattattattattattattatatgttttaatatttaaaaaattattttaaataccaaacaacataaataaacatttatatttatttttatggaaaaaaataataaagaaaattattacctccatccatgcttggcctcatttctaccaaacataggtttaaattcacatatctcctttacttttaatatctagtgtataatatttttgtattcatgttttctagtaataaatgggctacctaactataattatttgtatgtataaccttcaactcaattaaaaagagtacattggcctctcattaattttatttaagtctctacaaattttatacttaagaatagtcttatacatcaatgattgatgccaaacaaaatctgtaatatatcacataatgatatggtgtgattttaatgttatttttatgtataatttagtgtatattctctagctttacaacttagatatacctccttcaaaattcatataaattaatttatagaataataaaatacaaatttaagattttataatttgtgtatgagttattttcctaattttttataggattttttatctttttattattattgtgatgagcaaataaatcggatttttgggttcgagtttttggagtttcgggtttaaaattaagtaccaaatctaatatgttatacttttttgatttaccacttttcaaatttcgagtttggtcctaattacaaatatttttcactttgatcatgtttttaagcctaaaattttatcaaagactattttttttaatatataaatataattttaaagtattaaaaattaattatatgaatgtgtcaatattttttatcaattatctatatatgaataaatttacgtaaaaaactggtaaaattggcaccagaatccaatctaaagtatattaaaaaatttcaggtatttaacatgtttactaaattgtaatcaaaattagaataattaatgaaaaaaataaattagcttaaaatataaaataatcataagcaatatattattatgttgtttattaaattatgtggaaaaaaaattagaattattttattttgtttactatagtgttgtttggtaacacttttttaatcagttttgtgtttttaaaattgaaaaa

SEQ ID NO: 243978 - DNA, 2400 bp, Cannabis indica
agaaaaacaaaatagactcaagtcaagtttgttcccgtaacatttagtttttacaaaaaattaatttttaatatattttttttaatatctaaatgaattttttaataaaaactaaaaaaaaattaaatcgctttattagttttaaaattttaatttcttttttaattttcttaatcattcaaaatgatttttttttaagatctaaattaattttttaaaatttactaaaaaagatgttgaatatttctcatttttatttagaagggtacgatttgatagttgtcaaagtttagggagcaaagttgttaatttacaaagacgtgtcagcatttaaatggaatcacggacggaacctaatagaaggactaaatttctgcaaatgtaaaagttcaaggggattcttaacaattcgtatattttaagaggcaaaatcagtattgtcgaaaattcaaggagaaaaattgctaattattcatttttttatgcattttaaattttattccatttcattcctattcatattctcatactcatttctattcttatgttttcattcttcacaaccaatcgccaccttagttcttttctatttttttaattttttgaaaaaagaggagagatcattgtcttcccaaatttattgagtcctcgcttacaaaggaaatgcagctagctacttatagaagttcggctctactaacaaagccttgactaatcttaggcattaaaaatattataaatataaagtttgacatatcggctagcatagttaaactaaagcagataaactaagattattggcctcttaaaacagttaaactaagaccattggccttttttccttcttataggtagtctaacaatggatttcttactttaaaagaagcataaacacgacatcccaacaataacaacaaaacaaacactttaattttcaggagagctaaggttttgcaaagaatctttgcagaggaaaatcttgaattaattcagcggctattaagctagaaaatgctgacaaagaagagaactatgaatggataactcggccaaattcttcaatcataaatagtgctacagctgcacactttattcaaagaaaatcccatgcttactaccaataagaaatcctcgccactagaaagaatgtagctcccaaggattcttttccaacctaaacttcgcttcctatttcccaccttgaactttaataggtagcaaaattcatcataaagagaacgcattcattttgaaggacatcttcgcttcctatttcccaccttgaactttaataggtagcaaaattcatcataaagagaaggcattcattttgaaggacaccttgaatcattctatatcgcaaatcaacatttcatagagtatcttagatgaccataatgacttcctcttactgtgtaccagagtgaactactggggaaatgaccacaatgccatgtatttattggggatcccagtttcaaaaaaaaaatgacttgctctcactgtgtactagagtgaatttagtaccaaaggaaatcaccacaatgccatttcaattattagagcttttatttctagctgtaaagtttcaatttccagaccaccttcttcctttagcctacaaaccaactcccacaacaccaaatggttgcactttccacccactaaatcacccgtttcccagaggaaataattccagaatgaacaaagataaagggatataaaacatacataatatgcttcaaaaaggaagcaaaatttcactacatttttatagttacctatacttggtaaggagaggatcatccatcatttccctaagtaacaccccatctgtgagaaacttgatcatagttacaccctgttctgccaaaacaggaaaacgccattagtaattacactcatttactgattggtaagtcatgtcattttactgtcaaatgattttagttttccatgcgagtgtaacatatgccaacacaagcatcaaaaacttttttcttctctttaagaaaatagataatccaactacagaattgctgagagcttgaagaaatataaaagtgtcttacatttttggtaaaatcttcaaatcttattgtgtagccaacttcctctccaagcttcacccccatttcttctgctaccctcgaagaaacagcctgcaaaggatccactcttaatatttgcaaaatacatatacatatatatcatttgaatgcagcttaaacaaaacaatcaattataggacaccacattgtatgtcattcatcagaccatagtaagaataactgatatatgccaactgaattattccaattattatacaaagctccagaagtaactattgaacagtaataatattatgtattgtacaaaacaattcaaggaggcaaagat

SEQ ID NO: 243979 - DNA, 1701 bp, Cannabis indica
ctcatcagaggacgtacccctaattagggcgaacctctatattctggtgtttgttttctcccaaactctactatttttggatttaactttgtgtgtgtgtgttgtgtggtgtttctgggaagttttctgggtaagatcgattaagaaatcgagctagggtttgctctgattcctcttggttttattcgaaggagaatgacaaatcgtttttgatcaaacgatttgtcgtgcaggtaaggaacgaccaagatttctttgtcgtgtggatctattgtttaaattgaatttttctgggataattttgtccctgtcgtttttgactataagcttgagtggtgtagggcattcttggaatttcaccaagaaaattcctacaatttgtgagaagaatttggaagaaaatattagtatgccttctcatagaatttttattatcatattttaaagcttggagcaatgggttaatgtacttgtaggaggattcgtatcctttgatagaaaatttcttattatgaaacaacggaaggggatgacttcactaagatgttactttagtttctacttggattaaattgaagggtttagctagatattaaatattggacaacaatcgctctttaagatagtgggacaacttgggtcaccaatccaagtggaaaacatcaccaagcacagggatatattgacttactcttgattttgatcatgacatagagttagagttatagtatgaatagctatcacttgtttgtcataattcttctggttttgaacatgagactaaaatatgcaggaagaagaaactaattaagtagacttggcaacctaagaagagtaccacaaagagcacatgtttcatatgtcaatgttgcagagtgatggcttttagaaagttattgaagtgaaaaaggtggctaagaatgtttcaatagagactacagttattaatccatctgttgttcttgatttagagcaagtgcttggaggagtttttgggttcaacatagggaagggggatcagatccctcaacttccaatggatagattcctttggtggaatgttagagggattaactagcattataagcatcctgaaatcaagcaattgattaattctaagaaagttagactggttagtctcttgaaaactaaggtaaagaataaaaatatggatactctgtattcgagtttatttccgagttggtgctttacaaataacaaacccttggatggataaggaaagtataattgtggcttggaatcttaataagtactctattgatatgaaggtataaactagtcaaatggttcattatattgctcaatcgactcatcacaaaagttgattccattattactagaaaaaagacatttcttttgtttttatcccaatttgtcttcactttttaaaaatgctcactaccaaagtcgtttgaggagaagacttaagttcccaaaacactgaagacataaagggagcatgtgtcttcggttattacaaaataacaaaagacataagtgaagccgaatttgaattttaggtggaggaaagacctacatctttagttacaatgcaataatcgaaggcatagcttggttttgtctcacgttatttcgaagacataagtcttctagtagtgtgggaggaagaacattataattgaagacgtaagtctttcctttttatatttattttttaat

SEQ ID NO: 243980 - DNA, 2034 bp, Cannabis indica
acttctaatcttttattgataacaaatcatattagattgaaatgaattttatttagggcataaaatcccaacagtttgaataattctagggcttttagggaaaattctaggttattcagttcatagatttttgggttaaattgtattttacttttctagaaattgggataacacttgttcacaagtatgacccaatttattccagaattcacaattccagaattcttagaaacagattgtcctcagaatttagccactctattcaaacccacaacaaacatacctcaaaccatccttgagattaacgatgcaaaaattagagatcaacttattagaaccaatcaggatgagaattcaagtcgatataggccatttttgcaagaaattactgagggcaaacgtcattttcaacgagaactaggttggcctgaaccccaaaatttatctactattcctttagcgagacctttgttttttacctccagtcattgttgctcttttactaggtgacttaaactttaaaatcatgacttcattggttcgaaaatccaagacccctcaagaccctacattcacctttgagaccgaattgatcgagtctaagatcagatctataagatcttatgttggcgatgtattgaggtcttgtggcatcaaatacaagaaaggtcccgagttaggtccgttgccttagaggaatttagttgttttccctctgaaagggtgattcgagaagaaggttgcagtaccggcaagccatctagtataggcgcttggagcctagaacataaaagagtcggagcagtactccctctcaaagattattacaaggacttttgcaattatctcggaattttcccctttcaattgattctgagctcttatggaatcttggcctgcctgaaggttttataccaaattttggggtgggagtgcccaactccactagaaattttatatttttactccgttaaggtttgtcctgcaaggaagcaaggagtaggtggtttctattatcttgggacctacacgaatgatcaaaggatcatcgtgaggttgcccaacaaaacaaaatttaaagatgacttcttgtggacatctagcctcgccccaatcaacacaaccatatttcgcatcatacgtaactactatcttgtctcaaaaacttggttttgagtttttaacttattaattgcaggcacttatttatttttcttattgtattgacaacggtttcgaagaggcttattccaactattgagatggaaaaacgacacaaaacccttttggatcctccatttggattgcgatcaactgattttctactgaatgagatcaacatgaaaacctgcaatctcatcagcaacaaacaagctacctaggactttaagaatccaaaatattttaagtagcaacaggttccagtccctgctaacgaggaagataaggactaagtggctcgtatccatttcttgaaaaacacaacccctcgggaagcttaagaaggtgcttcccgaggtaataattttggtatttgtggttggtctcctaccatacttagggtcgagcgcacaaccttagttaaatttaagaatagccaatataacttttatatctaaaactgcgtagatcaaattgctcataagtttgattgaaaatgtacctaattatttattccatattacagaaaataaaaagattttttgaaggaaaaatatatttaatttaacataaataatatttaaacttcttatttttttattagttttaaaaagtattttatattaatatttttattattaacaaaccacgtcaacttagagtttcttataaaaatataataaattatttttatcaaatatatataaatttatgctataaaaaataattaaaaatatataataaataaaaattttatataacatatttttttggctaattaagatttttatcccctgaactttaacatgtaccaaatcatgcctcctgaacttttaagatcgttaaaaatgcccctgaactattgagattatt

SEQ ID NO: 243981 - DNA, 1664 bp, Cannabis indica
ctatatatatatatgggatctatatatttcccaaagccaaccaaaaatctgacgatcaatggtaaacgagccacaaatcaaaattcttgtcctataaaacctctagattcacgctctctcgttttctaatggagatgcgctcatagaaaattcatcggtgctggtggagatgcacactaacgatgcctttgaactacgaaatctagatccacgccccaaactcatgtccccaaaactcgctccctctcattttttctctatctctctctctctctccttgtttttttttttttttttgtccaggttttacgagggctgggttcgtggttgatggggatggggatggggttcgtgggtttgtggtttgatggggatggggacggggacagcttcgcgggtttgtggttgatggggacaaggatggggtttgtgggtaatggttcgatgggtggggacaggttcgtgtggagatctcgtaggtggatagtcggggttgatctttggactggcagtagagatctcaaatctgattcaaagttgtagatctaaaatttttgtgtatattaatacgtatttgtttgttagatttaattttatttaaatttagtttgagttctgtctaattatttttatgtgtgattggaatttgaaaagtagggttgtggtggttgttggagtgatggagggttggggtggcagtggtagcaatggtggtggtgatggtatatatgaaaatgaagaagtgaaaaaaaaaatgaagaagaaaaataaaagaacagaaaaagttgtttttattttttttgtgtttgaaaaatattctttttaatttacttcttttattttaaaatattttaaaattttttatttaaatatttatttttgtcaaccaataatattgtatcatatgaacagtgtgttcaagtagacagtaccatgtattaaacttgaactaccaacttgatagataacacatgaaaatagatgaaaatggctggattttaggaattttgccatgaaattttgaattttaagagttaattactaacaaagtaaaagtagtaatcaagttcatttgggatctaaagcatagaggggttcaagtcgaggacgttttcttatatgcttcgataattgtggatacaatttggagggttcggaatgataaagtccataataactacccagtggatatgaaaaaatgtgttgatgaaatttgtatttcttatgttgatttgcatgcttctttattccctagtcctgctccacatcccaaggaagcttgatcccctccccccaggattggatcaagctgaattgtgatgtaaaagtgagatttgacaatatgtgtattgcagtggttgctaggaatcatcttggcagcgtgattagagtccagacggtgcgggtggatttctctgatgctctttgtggagaagctgaggcttgttgtttggctgtgtcggttgctttggatgtcggatgcaggtttgtaatagtggagaatgactcgagggtggtaatcaatgctatcaatatggttaagtctcgttgggcacttgataactatgtctctttttgtttgaagtcttctccctcttttgttagctgtaatttttcttttattagtcgaacttgtaattttgccgctcacaatgtggctagat

SEQ ID NO: 243982 - DNA, 1904 bp, Cannabis indica
tatatatataatatattttctgtttttatattataatatattatattatatatatttttaatttttatatataatatatatttttatgtttatatatatgttattatattttattatatatataaattttttatgtatacataatatgtatatataatatattatacatatttttattctgtatatatatttaatataaatttttattctattaatataaataatatatttttattttatatatatttgtgtatatgtggttatatatatacaaatattttattaatatttgtgtatatgtggttatatttgaattttattttgttatgtattgggcagaagtattttttatatatatgtatttgttgttttattttgatgtattaagaatttttttgattgtatcaaaaaatatattgttcttagagatgtattttatgttctacttttaaattcaatataatatctgtaagttaccttaccagtgacaattcagttaaaattatattttctactaatagcttttgtatttagaaaacacttagcaagagagtaaagatataaggagtgcaatggactatattttggagaacctttccaaactgggttgtattctttctattactgatgtttggcgctcaaggcatggacacccttctcataaatgattagctttactttataaaaaagttcactttaatatcgatagtcttcgtagagattcatcttgttatatctgtcttatggcaaagcaaaagaaattacccttttctaagaataacaattttgccaaaatgaaatttgatttgattcattatgatacttggagtctttgtcatatcatttctcattcaaattaaaagtactttctcaccttagtgaatgataaactagattgacttggatctacttagtaaagcagagttctaatgcattgcttattatacctcagtttactcaatttaattgtacattgaaatattttagtttcgataatgctcctgaattggtcttcaaaaatttatttgcaaaatatgaaattttacaagattttacatgtgttgaaacacctaaaatgatattgtttaaagaaaacatcaatattttttaaatgtttcaagagccctttaattccaagccaatctaccaatacacttctgcatttattgcatcatgaccgtaacctattgtcataaactgtaccctgcaccaaacttagcaaataaaaccccctatgagtttctttttgataaagaactcgattatgagcacctaaaaaactttggttgtctcatgtatgctttaactctcatagcacgcaaaacaaaatttacttatagagaaagaacgtgtatattaatgggttatcctcaaggcattaaagggaattggttgtatgacatcaacacgacttatatctaaaaatgttatctttcacgaatatatatttctcttctacagactaaacaccactaatgattttgtttttttctaatatggtttttccctcacctataacatttctcaaactgcagttggagattttataatgcatgttccaaatagcttctgtactaatagtgctccttaagtagaagagtttgaacaagacatagatgccactactattttacctgaacaagaacaaataccaaatccacaagggcatccaattcaacaagatgatcctcctctcgtactgagacgcacaaccagaccctcaagacaaccatgttacctacatgactatgaatgtcacttaattattcaaaaaaaaaaaaaataacctctacacctcactcacatcataaatttgtatcttatgataaactgtctagatctcacaaagtatttattcttgccactttgaaccaaccacatacaatcaagcagcacaatacaaa

SEQ ID NO: 243983 - DNA, 1905 bp, Cannabis indica
tatatatatatatatatgctagttagtaatattcgtagcagtgactctgtgcagcagcagcagcagcagaagatacaatatccaatccattgaatcaaatattaatctatctctttagtaaaagaacaaagctctaaagtaaacaaccactagaacaaacaaacaaaacaacagtaagttgatgttgttaataataataataatgattgcgtattgctttgtaataacccaattaaatttgcagaaatgctgaaaggcatctaaattatagttaaaacttagatttagatcttaattagagaagaaagaagaagagtctaccaaaatacaggctagttttggttaggtcaaaaagctgagcacagaagagaagcacgtctcaaattcttgttcaacccgtaggtcaaaagaggctcactaatgtcgtcgttgttcgtctcaagaagcatggtaatcgctttgaagttgcctgttacaagaacaaggtcctctcatggcgatcacgagtgtaagtaacctacttacctgtgaatagaattcatttcattaaaatagaaagaaggatttggacaaagtgctgcagtcgcaaaccgtctactccaatgtctccaaaggggttttgaccaaatccaaagacatgattgctgcatttgggactgacgatcagtccaaaatatgtttgtagattttggagaaaggtgagcttcaagttgctgggaaggagcgagagtctcagttatccagtaagttcagggatattgctaccattgttatgcagaaaacatataatcctgaaactcaatgcccttacaccataaccatgattgagcgccttatgcatgacattcattttgccattgatcctagtagtgcctccaagaagcgggtaccccactactactactactactactactttctctatctccactgtcataacacacaaccataagttaagtatcttaattttaggcacaagaagttattcatgaacttcaaaaatactttccaattaaaagatctccaatgaaattaaggctgagtgttcctgagcaagggctttctactctcatggaaaagctgaattcatggaatgctaaactgatttctaaagatgataaattaggaacccaattatcttgtgtaagtatctctcattttacttactatttgttgagtaggtaaattacaacactttaaacaaatgactcttaggacactctgaaaattttacacacttttgaatcttgtagctaccagatcttttaattttagtcacttcatttccctgtaaatataacataaaaaccccctttagtcttagacatgttaagtttatcaaaaggtttgcatacactactagaagaattgaatttatgatttgagattaggaagtaaatattaagagaaatactaaagggcacctatggtgcttagcattattgtgaggtgtgatacgtgatatccctattggtgcaattcaatatcgggtccacttagattactttaataccgttgtgcattacttttctattggacatgttgagagataaagtaattttcaaacactattatttaattcgaaatagtgaaaatttcacatttctgatagtggttcccctttgtgaaatgtggcccgacccatcttagaatatatttcgacactagtcacaataaattcgtactattaagacgtgattataaagattggttttgcataaaattttattaaaatggccccctaatttaaaaattcaaagtattcttcttttcagggtaaattttgacaagctttttccttactcttacactcgttagtgttctgttaaaatctcagactacacatcttgaaaaatcgtgaaatttcatagggacgaagccaagaccgttgtgcatcacttttct

SEQ ID NO: 243984 - DNA, 1969 bp, Cannabis indica
aaaaaaaaaaaaaaattgaatggagaataatcttcatgttgagattgttagtagagaaaacataaaaccatcttctccaactcctccaaacctcaaaaccttcaatctttcgttatttgatcaaagagctccaccagtttataccacacttgttcttttctaccaaatcagtagtagtaccgatcattctcttaataataatattattattacaacattaaagaaatctctatccgaagcattaactagctatgtcccactagctggaaaaatagacaacattaacaactccaacatcgttgaatgcacagatcaaggagccattttcatcgaagccaaatccaaaaccattctctcaacctttctagaagaaaaccctaacgaggatcgccttctcgagcggcttcttccggcaaagacaaggtcagccgaggcagccacgagccctttgttgctcgtccaagccactttgtttgagtgtggaggattagctattggtctatgcatgtcccacaagttagccgacgcagccacgctttgcatgttcttgaagaactggtcaaacccaggtcaacgctttactttgaccgttcctaaggagtttgacatttcgccagagagtatttggttcccactgccacgagatcagagaaacaataataacaacaacaatatagaatctttaatgatcaaaaccgttaataagaggtacgtgtttgataaaactaagatcgatgttcttaaatcgaaagctagtagtgaaagagttaagaaccctactagggttgaagtagtttctgcccttgtttggaaatgtgccattaatgcatcatcaaaactcatgattaactcattaaattctaataataaatattattcttttttgtctcaacttgtgaacgtacgggataaggttaagcccatccaagaaaacactagtgggaatcttgtggggtcttatgtggttcatgtggagtataataatgaggaagaattagaacttaaaaacttggtctttaaaatgaggaaagctattaaagagtatagtaataataatggtgaaaaacaaggtaggtggtgtagggaagtagtagagttgattaaaggaattgatgatgatatgaataacaacatgatttttctttgcaatagctggtgtaattttggtttctatgaagttaactttgggtggggaaagccaatttgggcgtggagaccgagtagttccattgaaaatgtcttgaagttgatggacaccaagaatggtggtgtggaggtttcgttgactcttagcaaagaaaatatggctttatttgagagggatcctcacattcttgcttttgctaatccatcccattcaatcatctaaagaattgtaattaataatagtgtattaataatcaataattgtatatttaattcgtcacgagctagtcttaagttgtaataaatatgtaatatccattacttgattagtagtcaaatgtcccttgttataaattaataattacaaataatcttttaatttagattacaaaaatttataaaataaatacttaaaataatgcaataacttctataataaaaagaaaataattaaaataaaatagaatcacttatcaatatatataaaaaataataatatcaccacaattatgtagtcacaaaataaatagatttaataaatcaatcaacaccaaaatagtatctaacatctatatatcattcctaacttgtaaatagatagttaagtcattcaaacaaatccattcaagtttaaatacaaaatcaattttcaaacaaaatttaataactagaatataactaaactaataacggtattttactcaacgagaacattctcatctactagcatcaaattgagttcatgaaataaaaaaaaaataggaggtgggcttataaagcctaattgaaaaacaactaattaatatcaaaagatccttaattt

SEQ ID NO: 243985 - DNA, 2056 bp, Cannabis indica
gcaccgcaccgcgcggtttaggaaaaattcaaaccgcaaccgcactgcaaagaatttcaaaccactttttttttgcggtgtggtgcggtgtgggcggtttgagcggtttgataaacacccctatgtgaaatggcattaatgtttatataatgtgttaattatgattatcgataattttatactgtcttgctgggcttggctcacgggtgctctattgtgcaggaaagggtaaatctgtctttgatcagccatgagtgcgagagttgggcgatgtatgtacatgttcgggccacactagaccaagcgggttggggtctaccagtgataaatttttataattctattttgtcgcttagatcggctattgggaaagacttgtaatattttgtaaaatatttttgggatcccgaaacatgtaattttggttgtaaggttaaagttattacaagttttatttttattctgatttcgtttaaagtttaatttcccgcgcttattttcttagtaatcttgtttagaagattagggttccttaatcactttggggtagcgtgcctaattgttagggcgttactcatatggtgtgtttattttgtttagatttgagttgaagtttgaatatgctctgtgaggatttttcctttagtttttaatatcttagttttcatgtgttaagattatgtatttgagacactttgtttgacttactaaataaagtttctgacaacaaaatttctcagttcattaaacttatctttgaaatttgctattagaggtattgttgtttaagtccctctagtgttttcattatatcatagttagttttgttaatagagaattaaattaatattgttgctgctcatgctaatgctaacgtgactctaacatggtagctacatttgttgattattatagtagtagcctaaaaatatatatgcattgcaacagagagtcttgtggatgtctaaatgcaactgctcggtatgataattacaggtcaactacggagttatttgatcgtcggaagtctgttgtgtcgctgtcggaaatcaaaatatatttgtcactgcttagagtaagtaaaggtggtcatctatttgttatttttttaatctttgtggttgttatcttgtgaatggtaatgtttgttaatcaattgaaaattttgatttgagaaagtttggaaattaagagttttctcaatgtatatattgtgtatttacttactgttatataacaatataaatcacttaacaataatctatgttttatgaaaccttatctaatatctattataaacttttgtactaaatttttgtaaattgttagtttaagttagttaattttttttagctgcatcacttataaataaaaattagattgataaaaattatatttggtataatatatatttaccaatataatagaacatataatttatgaatttattattttttatataaaaaaagaaaaataatttatgtatttctgtctaaaaaaagtcacaaataaattagttatatttaaagtatattattatttattacattggcaaataaatatattaaattagtgtggcaaacaaatatattaaattagtttagattttttttgtacattagttttcccaaattaaattttgcataaattgagtatttattttctatgtttagtttagtgataattttatttttttatctatgaaatgaagtatgattttttaactagtgattttgtgttattgttttgatatgttgcttaattgtttgcataattttttttggcagccatgatggataagtttattgtatcaactttctcccaattaggtaaattgcatgatccatattctaccttgatttctacccaaaatcctaccctaaacaccacctcaaatcctaccccctcaactagtactaccactctaatcactaccccaaacactacctaaaatcctaccccaaatactaccacttctattgaatttaagtcacctaaaaaagaagacaatgatgaacaacccacatctcaaaaaaaaaccttctagaacttctac

SEQ ID NO: 243986 - DNA, 1905 bp, Cannabis indica
atgatatgaatttgaaattccagcattttgagtatactgtacaaaatgaacatcttttagggtgcgtttgattggagttatgaaatagaatgaaatggaaatgaatcaattttcatttctttggttgcacagttgcatttcaaagtattgaaattcttcccaattttaccagctacatttggatacagctttctctttgttgtctttatcaaattgatttatatgttgttattagaatttataaatgatgattttgtacttgctaggcttccggtggagttagctggcttgcagtctttaatgcccttgcatagtgctactgctgcagccttgtccacatctttgctttctttgcacaataacaagtggggttgtctatcagaaggtaccttcaaattttagctttcgttttgttcttgtttcgattcaatgctgtagatatagtagacactgtgcattgtcatctgatgaatttatggcatatagctcttctgtgtcttttttaatgtcattttcgttgatacaaccgaattgactgaagaacagaactttgatatagatagcatctgtagtttttagcttcaaagattggggttttctgacaaggatttaagaataatgttttttatgtggatttgaatgagatttggtgttccatccatggtgatagttatcgtagaaattggtcttttgttgcctattcattttactattggaatttgaactagatgtggaattggacaaaataaatgcttcgatagcttggcttttataatagaatgtactgtgcttgttttttgatgtctctttaacactagcttcataactatacttctctgaatggttgctaagatattgttgttttgtgcaggttttgccaccccactataacaggaccaatgagcttgagttataggtataaaccagagacagttttctgttttgtaatgtttacatttgagattaatgtaactccaggaatgagatagattgttacattgtttgtttcactggttttgtgacagagacctgacttttgaatgttgtcattctttgagtatttgggcaagggatcatcaataccaacaaacactggataagcttgtaattagcttatttcattagtagtacaaataaaattataaattgatcatttttgaacacgtatatttgtcaatgaaaaaccaattaatatctgatcatgtatgcatattcatcttatgatgagactgttgtatatttttcatggttgatatgttcttttggactcaaactcggtcaccattctttctctctaacttttctttcatgccatactaaatataagataacataacctaaacacattacaatattaatattgtttcctagttctcagtgttgcttccttggtcgttgtgaacatggacgtggggccctcatagtgagcttggcagtaggagtgatcttctcaacaactgcaattgataagttttttagtgagggtcaaacaaagtctttctgaacaacttaaaacaaccttggccaccaccttacaatgatagccaaggattatattatcacaaacctttctgcactccatggttgctttatggtatgatttgtacacatagctccttcacctttaagaactaatagaaaactaatagacgtatagagtagtgtataatgagtgagagtaaattggtatcttttaggaaaatcagttcaattgatgatatgagttgcctctcttacaatgatataattgaattgttacgtaatcatagtgttaggattttatgccttaaatacaatctaattttattataattttatttactttcaataaagatcaaaaattatatcttgaccttattacagtagaacctctattcaagaatacacttgggaccaagaaaataa

SEQ ID NO: 243987 - DNA, 1657 bp, Cannabis indica
tggagttttatttagtgcataaaatccaacaactgtgtggtcaaattactcgattgttatggatcaatatctatcaacacaatgtgcaataaatcttgtattctgtcaaacttactaagacaccatacagtcaaagttactcgattattctagatcaggacctatcagtgcccccccccccataattaggtgctactctagaatgatctgatggttcgattaggtaactaaaatttgttacatggtggatcactcaaatgagtgtagttcactaagacactacgctatcaagctcactcaatcgttctggatcaagatcttttagtgcaatgtatagtaaatcttatacatctgtcccatttaggtggtattctagaataatcctagtgttcgattaggtagatgaaacttgctacatgttggatcactcaaataattgtagtttgttacgacactatgcagtcaaacttattcgatcgttatggatcaagaactgtcactgtaatgtgcaagaaaaaaattgtacatcactcctaattaaggggtatttcaaaacgatcgtatggtccgattagataattgaaacttgttacatggtgatcactcaaataaccgtagttcgctaagacactatgcagttacacttaatcattcttaatgaagcctatcggcgcaatgtgcagtaaatcttgtacgcttctcctaattaggtgttattctagaatgatcctatggttcatttgagtaactgaaacttgctacatggtagtttgctccaataattatagttcactaagatactgtgtcgtcaaacttacttgatcgttatggattaagacctattagtgtaatgtatagtaaatcttgtacacctctcccaatcaagtagtattttacaacgattctaggatttgattaggcaactaaaacttgcttaatgttggatcactcaaataactgtaatttgctgcatcactatccaaaaaaaaaacttactcgatcattatggatcaagacctatggatgcaatgtgcagtaaatctagtacacctcttctaactagaggttattccagaatgatcttacggtctaattaggtaaaaacatgcaagattttattaaggacgcataatcttcatgatatctgcataatttatatagattttatctattatatcatatataaacaataagagatacaatatatatatatgaattcaataataaacatataaaaatatatacatgtatatataatatacagatatataaaaaaaaaaaaaaaaaaaaaggttcttaaaattgtttcagtcaaataagtatatatatataaatatatatttagtatatcgtgactttgaaacaacttaagaacttcaacaaaatatttaccttgaatcttggatagagactcgttaaaataatataaaatatataagaaaagaagaagaagaagaagatgaagagagaaaaagaaactgaatgagaatttctcaattgtgaaccccaaaactgaagagagaaaaagaaactgaatgaacaaaaatatgactaaaataatgaaaaactaaatcaatgtaataaaaagaaaatacaatcaagtattaatggtgataattaatttggtgatttagatatttttaaataatatttcata

SEQ ID NO: 243988 - DNA, 1748 bp, Cannabis indica
attctttctctttctctgccttttctgcctttctctgtctttccatgttcttgcttgaagattcatcaatggctaaacgttttaatatggtattagagcttttttctcccttatcttccaacatggcctttggaggacctcaagttcctagttcgagagatcaaaatggagctggagacaccaccggcaactcaagcaatcagaatcagaatcagcgaccaccatctctgcatcgatcaagaatgcaaaatttagatgagttctccccaatctacttctctcataatctttcaattcgcttaaatgaccataactttttactttggaaacaacaagttatggctgccattcgtgacaatcgtcttcaatcctatatcaccaatgatcctccacctcagttccttactgaacaagattgtctttccaagacgatcgatcctgcttatcttgaatgggaggttcatgatcaactgcttatgtcttggctactttcatcgatgtcagagagtcttataactcggatggttgggtgtgatactttaaagcaaatttggtcaaaacttgagcaatatttcaccttgcaagtctctgcaaaggtgctggagtttcgaacgaaattgcagaacttgaagaaaggctctttgtcactgtcagactacttgctcaaaggtaaaaaacctgaggagatccctttgcttcagtaggcgaagtctacactgctcgtgatcatgttgcaggcatttttaaaaggcttccaattgaaatataacacttttagtcatatccacaaatacaagacttgagaactatactgtagcctagatcgaggctttactcctcgcctctgaatcaaggattgaaaaatctgacaaagaaattgatatcagtgctcagattgcctctcttgaatttgattcaccagaagcgaactacgctgcaaatttcaattgaaatcttgcttttcacaagcaacaggcattttcaagattctctatgcctaactactctaatcatagaaactctcgaggaggctaaggaggcaattacagctctcaattccctccccctgggttgtatgatcgtggtatacctcctcagtatggcagaggaagcggcagagctaatcccacaacaagcaagcctcggtgtcaattgtgcctcaagtttggacacactgcacctgagtgtttttacaggtttgacaaaagttttactggtgtatcacctcatttaccaagcagctctactcccattcagtctaatcctccacaagctcacctagctgctactcaaaccagtcaagactccaactggtatcctgatttcggagccacaaaccactgcacacctgatgcttacaacctgtccactagagccgcttacaatggtgctgaaaaactctttgtaggaaatggtacaggtttgccgttggtcactctactttttctacacctaattcaaataaatcttttcttctaaataatcttcttcatgtccctgaaatttctaagaatctcctaagtgtctctaagtttgccaaagataactgtgttttctttgaatttcatgatgactgttgccttgttaaggacaaggagactcactccactttgatgatggggacctaccagaatggcctgtattcatttgatgcttctcaacttcaattcggtttgcccccaaaaccatctcagtccaaagcatctgatttcaccactgttagtgcctttcttgccaccacaaaagct

SEQ ID NO: 243989 - DNA, 2909 bp, Cannabis indica
ttgtctaattttattcaattttaattttaatgtttcagtaattgtttatgtactaaatcatgctccatagactttgatatctaccgaatcatgcccttcaaactttgatatatattaaatcatgttctctgaactttcatctatgttagaatttttttataaaaattagacaaaagttcttaaatttaacaattttaataatttagagagaatttttaacagtcaaaaaaattcaagtgcatgatttagtcgagggaaaaaattactaattaactttataataaatatatttaagagtaaaatataaattgcgaattagattctaattaataaaattaggaaaatactatcaacacttgaattccagcaaaaattcacagattctatggacaccgacacgttgctgagtcagcataataagaaagaggaaaataagatacaaaaatatggataagggcataattattaactcatcaatcaaccaaccaactaaccaatacgtaccatagttaaaactcagtccccacccaaccttataaaaacacacttcccttactcatccaccctctttaactcaccatcacttctcttcttatatatcttaagaattagatcgagatgatttcaacgacgtcgtttttcgccccaaaagttgtcgtacaaggccctcattctcattccagtacaagcacaagcaccggatttcgcccaatcaacgtcgtttcagcctcatgcgcatccaccgtccagaaacgtgcatcccacgtggcctccacgtcatctctctacgatgtacttggtattcggatggaagccacgtgtcaggagattaagaccgcttaccgtagattggctagggtcgttcatcctgacgtggcagctagcgtagctaatagtcaaagttcagcttcggcggacgagttcatgaaaatccatgaagcttattccacgctgtccgatcccgatagacgcgccgattacgatcgccggttattcggacggaaatggccggttagttctggatttcccagccgtaaacgccgaacttgggagaccgatcagtgttggtagcgaacaaaaaataatctttgctttgctactataatatataagaacagatcgagtgttttattaaaggcatctgtttcattccaacactccaattcccaagaattatttctctgtcttgaattgaaggatatttttagtgtgtttatttgtatatactacgttattaattcattgttaattatttgttttgttgtaaaaggcgccattttattattgcccaatcatattgcaaatattattattataattattaatctccttttgtgacatttaccatattattatattgataaatttgtggcaaaatagttaagtttaattttgagttgtaaataaatacttaagtttttttttactaattatatttaagttataattcaataatttttgtaagtacttaactattaagtgttaaataaattacgaagtggcaatccctagtccaagtcattaaattttgatttttttttaaaaaaaatagttctaaatataccaataaaaaaataacacgtagataatgagatttaacggttaggtacttactgagttctaaaagtataacttagatattattactgcaaaaaattaaacttaagtatttatttgtagctgggggccgggttaaagttaaatatttatactacaaattattttattataaacgtaaatgtgttcctttttcactcaataaacgtttataataatagtaagagcgtctgccccattcacccttctttcgtgacattccttttgatttctaaggcggaattaaattcattgtgtgtttgtaatttaagtagtaatattatttttaggcctattattattgagattgtttctccgttagttgctcttcgtgtggtacgtagttcgtgtcagaccatttcgcgtgatgtaaatagcatgacttatgtattggctaaatctcttactagttcaataagagttaagatgtgaactgatacttgtcctaaatttttaagtgttcttgtaatagttaatttgattcggtaataaattcatgctttcattaaaaaaaaatatttcattatagtttattttttatttttagaaaaataataaatattattgaataaatgttcactaataaacataatattttcagtaatatatattttttttaaaatgcttgtaacataggatttaaaaaaaaaaaaaaaagcttgtaacatatcttgtattattcatatttcatcccataaatttttgaaattgcttatgtatagtcacaaaaaacatctgtacacaggtaggttttttttttttttttttcaatatgtatcactttgttaatttgtccttctattcaatttttatatttcttatatataactataaatatatatagtagaatttttattcaagaatataattgagattaaacaaattatattctaatttgttggattaaaaatccttttgtgggcacatatgtataatgtatatgctattataaagtgtgatacaaaattaagtgaccaattatgttatgggtatcaaaagggtattaaagtgtcatggaattaatgtgtagataccataagttaatttataatttgttgaggggccaaattataaatacccaagagttattctaagatgactctataaataggtagtggtccccaagaaacactagggttttctgtattctctccttccccatcagagaaaatactttagaaaatagtgtattcttggaagatcaaaaccttctctgcaatctccaacaatggcttcaggttagtgcttcgctcatatttatcatcttcttcttctttaatttagcaaaggctttatagatttatgatttaggg

SEQ ID NO: 243990 - DNA, 2407 bp, Cannabis indica
cagatgctaattcaaaagaatgatgtttcggcttattagttgttcctttaactgatgtctattgatctaacactcaaatttgagtttttacttcctctggcgaggttactgtaaaatcggcttatcatcttgcattctcttccattgatgtcccttcacctttaaacagaactacttccaaaaaatagtggtttttcccatggcattcaaatttatcaccaaaaatcaagcactttgtctagagaaccttttattacattcttcccactgccttaaatctattttcaacaaaagttcttcaaagtccaatatgtaatacttgtaaaagatactcgaaatgagaatcccatgctattgttccagagtgaaaaaagggttgaaatactctctttactatcagtttttccttaataatcaatatggatattaaaagatttattctaacatattttgattataattctgctgatgattgtaaaataatttttggattgctttgggcaagttggaatcatagaaatggtatcttacttggttaaactaacatgtttgctaaagatgtcttcagttggttagtgtccttacacatgtggaatctgattgtaaaattttagtacatagagttgttaaaaaaatagtgatatttcagctctagaagatgtttgtgatattaatcactctttatcctttgtcatttgttcctgggcaggctaatgttatggcacataaaatggctgaaattgctctatggttggataaagagaaggtatggaatggtactgtaccaaacttagaaagttgtaaatttgctgtgtttaatttttaatgaatttacaacttttctctcaacaattttcgttatgctcatctttggcatacttttttttggtttttaattattatttagtctctttaagtaatgttaccgatgaacatccattcatattatgcactgaaattgttcaaccattgagatttataagtgccgtaaatacgagctagatttttttgacacgacacaaaattagcacgagcacgactagacatgaaaaaaatatgggtttaagcacgacacagcacgatattacaaattgacatgatacgacacgaaagatatatacttaagcatgacacgacacgagaagcacgacaagtaagcacgaatagactctagcccaaaaagtacaacacacgacacgacatattaaaaaatcttataataataataaatatgaatttactaatgataaataaattaaaataatgatagaacttaaatataatattaaataaataattctataattaaaacaataaaaaaaaatatgaaaagctaaaattacatattagttttcttaaaaaaaattatacattaatttatttatagaatatgatataaatatttaagtatttacccgaaaatattcaaattgtaatgatactagtaattttttatataattatttataaaatattattgatagttatataaatataaataaaactataaaatatacatatactttaataatatttgggcctatttaagaatttcttacaagttgttacaagcaaagcataaaaatactggacttatcctttaaaaatatgatcattacaggacacaattctatgacacggcgcgacccgtttttaaaaaaatactaataaatatgaactaggtcagcacacaatacacacccatttacaaaactatttgtaagtatattatacattgtcagcattttaaaatctgtcttaaacattattctcctttatcttggaggcatcatttcaacttttaaatatgcacatatatataatatataaatatatgagtttaataactacgtatttaatcaattatggaacaatattattttttatccaagattgcacctaaaaatttggcatctaaaagtataacgaattaataatataaaaaaaaaattatttttaaggacaaccttttagtgacaatataaattttttatcacaacaaaaattaaaaatataatatttaagtataaattgttactaatttaattttagtcacaagtattgtaactaaaaatacatttagtgacaacaaattgtaatttttgtaattaatatatttaatcacagaattttaacacaatataagaatgatgacttataattaatcacaaccattttttatttttttatttttaattcacaagttttattgtgattaaaagtaaaaaattttagtgatgtaacaacttgatcttattagtcacattaaccttaaaataacaggtggagttaaaataaaaattactctttattattgggaaatttacacagtttactgtgttttcccattttctttcttttatactgttacactccaaaaataacttttgtacttgttttttttttt

SEQ ID NO: 243991 - DNA, 1465 bp, Cannabis indica
tcaaagtttagttaccaacaaatctattgaggatctaactttaacatcatctaatacaaattggatcatattcaactttgaagaagatcatcacgacaataaatctcttacaatacctaattgtaatggttcaaagtttcgtgatgaaaaatactacgcttctagacgaatttttcttcaaagttataaattcaccaaaaaggaagagacaatgggaacaaaaacaaaaaagtggctcaagaataagtttcgaactcttatcaagaattaaattaatagccgataaatagatagataattttcttttattgttattgaaattttcaataagtttttattaattagaagctaacttagttgcttcttgataaactgaaattaaaagtagaagttttgtaaacaaacgtttattttattatttcatatgtttgttatgtaattttttttttatttcaatttaacaattttattttatattgcttatgaacaatcaagtgatttacaagacaagaaaaatgcaattggaaaattatataaataaggagtataattattatatgtttatttatgaatgaaataaaacattaaactaaaagtgataacattttaatccaaacaaataataaatatgtccgagaaaaataattaacatataacacattaaaatataactatatagcacgtctagcaaatagaaaaaataatttgtatcttttttttttgtgaaatattttaagatagatgattttttttagatgatgtatttagtttataacattgaatggaaatggtatttttgataaaaatcgtaaacttggtaaacttcttttaatattaaaatacttttaaaaactattaggcccagtaaaatagacccaactttgtttaaaagcccagtagatgaaatctgaaacacctttgtcttttcgatcttggtagagaaagaattagcatgagagaaggtaacaaagaaaaattgagaggaaaatattagtactcaccaaaaaatttctcctccaatttgaagagaaattaccaacttattaattatgtatgttcgtaaacttttatatagggttcgtttgttacgctgtattacaccgcattatattgtattatattgaattgtattttatgcaatatttttatgtaaaactatatgtgatattaatttttatgggtacctaaatatataatattttagtataaattaaaatttaaaataatattatataaaaatatgatatataatctaatttaatataatacaatacaatatgaactagtacgacgttctaaacgagcccgtaattttttattacttattaatattatttggtgtgtttatgttggctcatgcttatatataaatatatatatatatattttaaaattacataataaactgctacttttgtaattttttttttttttttctttttttttcgagtgtgttgtgtttttt

SEQ ID NO: 243992 - DNA, 1965 bp, Cannabis indica
tctccctcctttagccaaagtgctctacttctttgccgccaattctcttccttgtctagcaataggttctgtttttgttccagcctttgtaactgctgccaatcatttgtattggtgcttcgggtgagttggcctatcttctcagcatattcattcaactgtttcatcatttctcgctttttccttcggttccacttttgcagagcaaacccacaatctcccagacggttttttaagtcttgagtatgttgaatcggctccttcccatgccaaaccgattggacaatgttggtgcattcctcttcatcagcccaagcactttcatagtgaaaccgggatcgccatttcactgtattgggagtgctttgtggtgtgtcattaaccgtgaggaggagaggacaatgatccgaattaatgcggtctaaatgacacaccttagcataaggaaacatatcgaaccaatccgggttaccgcacatacgatcgagtctctcaaagatgaggttttgttttctcccattacaccaagtgtaatcactcccatcaaatcccaaatcccttaggtgacaagaatccaagtactactgataataaaactttaaatgctcaacgttccaaaccatgttgtagaccgagtaattaaggttggataagcaagtatgtaactaagcttattacctcaactatttagtaggcaccctcccaaatgttcccaaatacatcgtgagtgggattatgaatattaggcctaactttatagaaaattagggttcctactcgcagtcttctttttttattcttcgacgggcagtactataacgaccacacacttagaatatagattagtagggtaattagcattaattatttatatttttataattatacatgattatatatgttgtggactctatttttaagaaataggctttagagttataattattcaattctgaaaattttattaaactctaagtgtaaataatattttttataatttttgttcggcaacaatgaaaaatacaagatgaccgttggagtcacgggttagtttaaaactttttatctagtgggtctttcatatgtggtatttcaaatatcaagattatgcgagattatagtatttgatcattttacctctaagcttaagatttacttaagttataattaaagaacaaaattgtatttttgcctaagtggaattgtctttttgcctttttgtacaaataatttctaccttgattcttaattaaagcacaacattaaaatttgattcaaatatatcaaaaaaaaattactctttataataagtatatgcacaatttactttttccattcaacatatcgaaggattattacttatcgaatctcctattattataaaaaagctgttacttttagtgacaaccttttagtcataagataatttttttgtgattaaatgagacttttactcacaacaaaaagttacttgtaactaaaatatagtatttagttacaagttgtcattaatttaattttagtcacaataaatattgtaactaaaaatatatttatttacaataaattataatttttgtaactaatacttttagtcaacaattttttagtcataacacaataataataatttataattaatcacaattttttttttaatttttaatcataaattttattgtaactaaaaatagtctaatattatgtaaagttgatactttataaaaaaattaatgatatttcagagtagttattataaaggtaaagtatcagaagtcatataatataagacgtttagattaaagcattactttatatagggaaacttacaaaaatactggaattttagttaacttttacaaaaatactgttatacggaaattttttcaaaaatactgtgtttttataaaacaccagtaaaacacaaagcagtataactcaaaacaacagtagaacactagtaaa

SEQ ID NO: 243993 - DNA, 2810 bp, Cannabis indica
ggattttcgtagttgtaacacaggtgtggaagccgatttatagtgtaggcagctgtggtgaaggcatcccaccaatgtgtgagaggcatatttgcctgagccaaaaaggagaggcccatgtcaactacatgacgatgttttcgttcagctcttccctgttgctggtgtgtatggggacacggatgtctgaagttgatgcccaatggctcaaggatggactgcagtggtctatactcaccaccccagtccgattgcacggctttgatcttggtattaaactgtagttcaacataagacttgaattgtcgaaaaatggcagcaacttcagatttgaccttcataggatatatctaagtaaatttagagaagtcatcaatgaaactaacatagtaacgaaatccttctattgaattgtaaaaagatgttccccatacatcggtgtgtactaaatcaaaacaagatgtagtcttaggaactgaactaccaaagtgaatactgtgaagtttgccatattaacaagcttgacaaaaaggaagaaaattacatcttgttttgaaattaatagtacaaacgacattctttaaaattcttggggaggcatgtccaagacgatgatgccatatttgagcttcagagaaggatccatttggtgtgttcttgacacaattgaatgcagtaggggaaagagagagtcctcttgtggactgtgttgatttgaggttggctttggacaaatcaagatgatacaagtcttgcttaagatggccccgaagaagaacttggcctgtaatcttgtccttgacaacacatgtatcagaatcaaacaataagatgatattattatctgtggtaattttagagatgctcaataaattcttggtaatttttggagcaaataagacatcatttagtaaaattttcttaatgggattacttgttgcaaagttagaatgacctatttgagaaattaaaatttaagagccattacctacggtgattttggctttgcctttgtaatcattgttgtggtgagggtttgagcatcattggtcatgtggtgtgtggccccactgtccacataccaaccattgtctttggcaggtgtgttaaagtcagaaagaagagcctgtgggttgtggcctgtgttctaagaggttgaggatgatgcctgattgtctgtatcgtatctgtgatagcattaataggtaagatgaccaatcttgccacagatttgacagactggacgagaaccacgtccacggccactggagggaccccatcctcttgtctgagacccacggccttgagtattgccacggccattagatgaacctttgccagtgttgctgcgattagatctagagggatttttattgaactgagcgtagttggcttgagcatagtccaagatttggggagttgtttgttcaattcgcatctcttgattttgaagcatatactgcacttcttgaagggtcagagcatcagctcttgcagtaaggagaacgacgactgtctcgtattcatggccgacacctccaaggatgtacatggcaagttcttgatctgataatttgtgacctgcagctgcaagagaatcaggaagattcttcatcttcaagatgtattcatcgatgcccatggaacctttcttggtattttgaatagcaagcgaagttgaagctggcgagccttggattgagttgcaaagagactagcaaagactgtccaaacttcggcagcagattaacagtgaagaacatgtccaagcatagcctcggaaagagaattcatcagccaactcattaacagagcatcacaacgaatccaatggtcaaaggcaggattaatcgaattcgtacatacaagaagaggttcaggccgttgtgccaagaaggatgccatcgagtccatgagcacgaacagaaggaagaattagggatcgccaatatgagtaattgtgacgatcgaggtgaatattcagcggaaggaggttgtttggaatgtgaaattggatggcggctgcctgagatgcgactggagcttctggatatggtggtggtgcagggtggcgggggtcgtcaggatcggccataggtatgataccatgtaagagcagaactaagagagaagatagagagaaattgaaagagaagctctgtccttaactggagcagaggagatgtatttatatatcttgagaacttaacaatattacagtgccacatagactggctttaaacagaaagctaaaacggaaaattaactaactaactgaagcctaactaactctaacaaagctcaactgtaatgttcaggttggagatgaggacatgtgcattgccgttgtttctaggaaccatcatggtcctctggattgggtgctcacgaaacacgtgtgcttctctaatccactttgtagagaggtagcaacgtgctctttagtgggagacgtcgtggtgcaaaaaggtcataagtatgtgattgtgtaaagtgactttagtggggttattgactccctaaatggcgtctgtattagatgggagattgataactacattagccattgcaaaagaacttcttctttttttgttggttgtttatttttaaaagttgtatacgataatataattttgcgacccataatatgactaaatgagtgtttttcacaattgttatagtatgttgtaggtctctaacatgcctaagaatattatttgtaataaacaagaggtttaactttaattttgatatatgaatgattttattttttcttaaaaaaaaaaaaagaaaagaaaaagaaagaagaa

SEQ ID NO: 243994 - DNA, 976 bp, Cannabis indica
ttataaacttttaaaaaatttaaaacagttaacaatgttgaaaataaggttcaaacagttgcttactgtacgtataaaaaaataatcacgcatgcaacataaaattagttacaagaaataattaaatcaaaaacatatcactatcatgcactcataaatatcaagaagttagatttctaaaaaaaacatataataataattcatatatatatatttaaaaatctcataaacatgtaaaaataaaaaataaaaaacacaaatttaattaaaaaaaattgctatattttctgtaatttccaccataacttgggaatgtaacttcttcttggtccttacaacccttttaggatccaagaaattccttgtgataaaatttaatttggtagaaaatacaaacaactataatctaaactgaactaataatggtttaatggagttaaaattatattggcaatattaccttgggtgatcatcatgtctcattaattttggagttgaaaaaagggatctagaaacccctaataatgttcatatctcaaaaaaaaaaattacataaataatgactattgtggaattttaattgttatccaagttgtaataagcattttcaatgcaataagcaccattattactcaaataacttgccattcaagacatgtcatttaataaagagaattgtctattatctcatccaacccacacacaccattagattattaattagctcaattctcagatctagaagcagtggcacactttttcaattatctaaaagcctaataattatgataataattattattattataataataataaattaaagtgaaaagaaatgaagaggcatcattaggcatcagatggttaatggaagaataattaccatacatgttagttgaataagttgaaacattagttttcgtgaaaaaacagcaatcaataaagatgattttgttttagcaaaaaaaaaaaaata

SEQ ID NO: 243995 - DNA, 2193 bp, Cannabis indica
taatttttacaaaacacagggtccaaaatagtatttacccgtaataatatgataccgaacaagtactgaagtacctttatatagcatttgtgatctaatatgtatatattgactctaatcacggatggtatatagtgatgaatcatatattgcggctataattataaaggtcaaaacttgagatggagatgatatacattcaacaactagtcaacgtctaattttccaggatgaagataatttagacctaactttggcagctgccatgcatgcatttagaatcatattgattattttaattaattataccatactattaatgttatgagtttaatttgatggctggaaactggaaagaaattagaccctaacaattgaaatttcttaacactagtttactttgtcatataattaaggaattaattcatgcttatcactgtaagaaatgttatttttatcagcgcagtttgttattgtgctggtacatctcgcaaactacgttagtaaaaaggtcaaaattttaccggcatatatttacagtgataaaagtctaacttttacctacggattgacgtagtgaaaaaaaattatttttgccagcgtctttcattttgcgccagcaaaagttttaggctaattagtaattttttcccctgaactttgacatgtagtaaatcgtaccccctgaatttttttggccgttaaaaattccccccgaactattgagattgttaaatttaaggacttttgtctaatttcattcaattttactgtttcagtgattgtttatgtactaaaccatactccccagactttgatatataccaaatcatgccctcaaactgttaacttttggtaacttttgtcatttaacaaacagaaggtccaattggtaacttttgcaaaacacagggtctaaaatggtattgtacccaaaatactctgacataagagagtcacatggagagtattttgaagtgacaagggcaaaattagtacaatatttaaaaaaaagaggtaaaaatgataagactttaaaaaatagggtaaaaataaaagatgacaatataaaaaaagtatagagtgtaatttcctcaaaattgggagtagtaatctcgatatatgcaactactttaattagtactaataagccatctccaatggtaaaactcaaatttagtattaaatcaacactaaagaattattattttaatattaaatttcttttcaattccaattacaacagtaaaaattacactaaaatttatattctttattatgatattattttattaatataataaaaatattttaatactaaatatatagataattttttaatttttttgaaaaagtagtatttaattattaaaaatagggccatttatgatttttgttataatgttctattggagtaaatataatgtaaaatcacattatatttagtgttttaaaaggtggttgaagatgactttagcactattattgcatacttttaagttttaacgtaaatgttgttcgttagtttcagctgtaaattaatattatataaaaacatatggttcatatcaaatataattttgtatattgatattctctgcgatgttataaattaggttaaaaaaagtgtgaaaagaccaaaacttataagtaaaataatacaactaacctaattataattataataatggatctaatttatgtccaagttaaattgaattgggaatattggataatttataatttataatattcaagtttcaaattaaattgaatttaattggttaagatataaaactttagatatagcattgctataagtagggtggtgtgtatcatccaatccaattcaattaaactgaaccgatccgatccaatctaattacaaaaatttggatatccaattataatttgattggattggatggtaaaagttatattctaattggattggatccattattggatgtaaatctcaaaattcaattaaaaatcaattcaatccaattatatttatatatgttaataaattatttatatgataatatatattgaaaaatataatacatattattagattttttttatgtgtgttgaatttgtaacacttggttgttttgtttatttattttcatgatattttgttctatttaattacttaaaaatatttttgttttaattatttaaaacttt

SEQ ID NO: 243996 - DNA, 1893 bp, Cannabis indica
taattgctattgcatttgatccagattttctgtgtttaattctgtctctgcttttgtgctttgttttgggttcttggccgagtttccttcaacaatacaaaatttagttgtttagctgctctattctaacatttcacatttttaaattcaaaatgacccattttcaaatcgaaagaaatacataagatattgtaaccatggtgttagtttactaatcattttatgcataattataattaatagaagaaaaaaaaactttaatgtataagaataatatatgtattaaaaacgaatctcaacctcatttatctgaatgtttcttttactttgttagaaacaatgaaaacccaaaaagaacaaatgtgagagtgggatttatattatgagtgttgggtctgagcgaaaggtaggagttttaggaatagagggaaaaagggcaggtttggtgatttactttttgggaaaactgatgtcgctctttgggcgagacaaaatgcttggccaattttttttcaaacaataaaataaaaaataatagaatgaatatgtaaaacaaaattaaatttaaaataaattacatataatgacccaaaatgcattttatctcttgtgtagtgagacatggtatataatatatatttttttaatggtggtatataatattttatgactctcattagaaaacttgaaatatactctacaaaactttaattgtaagtcattaaaaagagacattaaatagttagattgttgtagtgtgaaattagagaattatggatttaaacccttacgtacgtttgttcagtgtaaggtgtgaatgatctttcccatgctacattaaattcgtgtacaatgtttttatcctcaaatagtgtgttacactctgccagtcttctcatactctcctctgtgtcgaattcaatcacggagaggaaaagacaaaagatatctgttgtccagctaatacctaccggagataattaatttgtcattacttttttaaaataataaacttcgggagtaattaaggtggcgtgtcccataaaatacgtggatcttattgtcatctagctcgctcctgaactgccacgtattttaaaagaagttttaggcaaaattagtaataattgatttgataatcactatatatagagataaactattaaaaacttacagatctaatcttttttcagaaatatttatttatggacgtcctaaaaatatatgcatcccacatactctctaacaaactcatcaaatttaatatttatttctaaattaaattttctataaatatcatcataattacaaaataattaaaacattcatagttgtcatgtgtggtcaaaatatttaccaaaaattaagcatcatcacaacctgcacataaaaattatgaacaaattcattcacaaacactatatatataacaaattgtaggcctataattttcatccaaaaaaaaaaataaaaataagaacaatggcattgaaggtgatgctttttgttgcaggagtagttttggctttacaggtgattacaagctctgctgcaccgagcatcattccagcagatggctcaaagttggatagttggattgagcacaacatacaagcccatgagaaggaaaaggacgataaagcccttgacaaggttctagcgacagcacaagcctcctctaaggtgatcaaggtcagcctagatggaaagggagatttcaagtcgatcacagatgctgttaaaagtattcctgcggggaacactgctagggtcataatctcgattgctggtggggtttacaatgagcatatattggtggaaaggaccaaaccctttgtcacatttttgggggataaaggcaatatgcctgtaatcacttttgatggaacagcg

SEQ ID NO: 243997 - DNA, 1312 bp, Cannabis indica
aacaatggaaatcttgcaggctattccaggcattcctaagatcaaagacgggttacaatcctgctacctggatgttagatgtcacctccaacgcgactgagactcagcttaatgttgactttgcagaactttatgcaaactctaccctctataagtaagtaccatgcaactttttatcatttttatgtccacttgtctcaccctctttgatgtttgtactgataatatcaccattgctttgtgaattacagaagaaaccaagaactcatcaaagagctaagcaccccacaaccgggcacaaaggacctctatttccccacccaatactctaccaactttttcactcaatgcaaggcttgtttctggaaacaacactggtcatactggagaaactccaaattcaatgccataagattcttcatgacagttatgattggtgccttatttggaatcatcttctggggcaaaggaaccaagttgtaagttcaacaaaatttatgtttctattttcaaataattggccacatgctaaccttatactactacaaactatatattgtttcttaacagaaaaacccaaaaggacttgatcaatcttttgggagctacttattctgcaattcttttccttggagcaagtaatgcctctgctgtacaacctgtggttgcggttgagagaacagtcttctaccgtgaaagggcagccgggatgtactcagagttgccatatgcatttgctcaggtgagacacttgacatttataaacatatttatctacaaaaatcttaattcacttccttcttgtatatctgatcttgattcctataaaatctgtggtgcaggtggctattgaaacaatatatgttctaattcagaccttcatatacagcatgattctgtactccatgattggttatgaatggacatttgtgaaatttttctacttctactacttcatgttcatgtgctttgcctacttctctatgtatggtatgatggttatcgccttaacccccggccatcaaattgctgcaattgttatggctttcttcctcagcttctggaatttgttctctggtttcatgattcccagaccggtatgtgatctaaacccaagtttctcttcatcttaccaacatttaagtcgcgtttggttagtggcataaaatgaaatagaatggaaagaaatcgattttcactatactcatttgtttggtccattcctattcctatttcctatttccgttctaatttttaagtggcgtttggttggaaggaatggaaacataagaatagaaatgagaatgagaat

SEQ ID NO: 243998 - DNA, 1898 bp, Cannabis indica
ttttcttcatattctcagaaaaagtacttccacttagaatataataactctctcaatgctcatctatttttaattatctatatatggttttcaagcttattcaattttccataagtttcatgaagaaaccttttgttaattcggagtgatattatgttaaaaagttagtttttttctgtatcatgtgattcgttgcttaaatgttgtgcttaaaaaatatttttgtaaaattgcaaaatctctctgaatataattcaaattcaaagatgttggtgttattagaaaggaaattaaattttctaaaactttcatgaagatattatcttctaattttgaacttttcaatgtcaaaagtttgtatttttggtgagtcgtgtaatttgttacttcatattccttctcagaaatagttttagtaaaactatgataactccttagttttaatccatttttaatgatcctcatatcattgaaagataattgagttgcctataatttttatgaaggaaactttcactgaattcgtatagttattagtcaaaaatagtattctttctgctatactgtaagagcatacaaattttgatgttaaggccttgacccacgtcttattataccgaaaaagtaaattggaatgagtttatcgattgataattctagctgagtcgtggaatatatcactttctttaagatgatttgtggctctgctcaaagtgtgcacgacagtcaatcaaccacaacatcctcatgacaaaatagtcaccgtttacaaatcgttcttcaccgaacgatatcactctattacaccccaaacccaagatgttagaaaaatcataattttaaggagattttttttctatatataaaagatatattttgttatgcgactcaaatagaaattaagttccatataaaatatatagaagttaagtcgatcaaaagaacgttaatacaatctgagaggattgtgggtcacacacagtttaaacggatcacatttaatgttttggtagaaaaaaatgagttaaataattaattaataaatatgtaatatttatttttatcgataatttttcaataaaaaattaaagtgataccacactaattgctcgctcaacacagctcgagtcgatcgaatggtggaggtggcagcgggcgggtgtggtgcttcagtgtgtgaattctctcacccatgcacacaaaactgaatgatcttcagcgtccttcagtgtcttatacacacttgtcaataagtgtttctatcctatatgaaattctttgtaatatcacacacttcactttttttatttttgtaaaattgaacaaaagttccaagagggtcaaagatgtgtagtgtacgatcaaggcacccacactgataattttgattcatttgatgaacctaattataacatagtcatcaggcttttaaaaatagaacattattattaagtattagtaatgtcttacattttttataagtaacatcttacaattagtgagcgatattccttaaagattatttttttaaattatataaaattctatacgtaattacactaataaaaaaatatgctaaacacataatgtcaattaacaattttcataaagtagttttaacttctaatgattcaaaatagttcaactaatgtaatgattgtaggaatgaccaatgaacaaaatttatttcctatttttatataaatgaaaaaaacatatatagaagtactcattgagctcaattccactctaagttaattctacatataattactcaaatttcaaataacatatatatgcatatatacaaattgtgcctcacaaaagatccattaactacttttcaaagtaggccttttatattttacaatatagaaagtctctctcttttgagtgtg

SEQ ID NO: 243999 - DNA, 2165 bp, Cannabis indica
ttcttttttttgtatttttctagtaaataaaattcactatagacaatatattaattagtgactaattctaatttaatattttgtaaattgataataaaatatgacattctactcatttagaagaaaaagaaaaagaaacttctacaataaaaaagggaaaaaaaatataattatcattccaaaataatttgattgacaattggccctttatttttgttattttttaatagattggttcaataattttgattttgttgtagtcctctatcgttaataattaacaatgaaaatcaaaagatcaatttactaaaaaacactataacataatgtttgagtggctctccatgcatgactatttctgggcatgtcattttcttgaccatacacgtgtcattattaaagcttcttgtaggttcaacagaaaattaaaatagaaagttagatatgaattaataatgcctagcacaaactaaattaagtgcatttagaaaagaaagaaaaagaaaaacttttcaaaaaaaaaaaagaaaaaaaaaaatataaaataagtgtgcctaatattctactctttattctagtaagcttttctcatcatttatgctattctccatcatttttttttttaaaaaaaaaaaacatttattagaataagaaaagtatttccttgtataaggtcccagctcatctataaaaaaaataaaaaatcctaactcattatgacagcatttatttttggttggttttgcctttaaataaaagttatattgttgagctagttatagttagagaattaaagacaaaatttataatacgatgaaaatctacaattgaatgcaaagctaaaatataatttatttagcaatacaaaaataaataaatgttattttagaataatatttataattattttttaatatataataattaaagaactaagttgcgcttaaataatatttatatattatttgtttttaaaaattgaaaataaagaatttgtataaaaatattagtgatatagaatttactcatacgatgtttagtgttattcgtgtttttggtaggggacacgtgaaattcaaataataaatacaggttatatatctaaggcccaacaatagacccaaacaatattattggttagatccatatatcatcaatcttttcgaatgaacaagaaacaactcatctaggcaagatcccatccatcatggtcagtacccgaaaatacataacatagtgtaacaggatgaagcattcaacgtgtatcaaaaaatccagcatagttaccatttattaccatatcgtacaagatcaagaattatcttcttataatctctaatggaagataatatctcaataaataaggaaacaagataattgtcaatcaagcaattaatgtgtcattaattctccacgatgataggacatgattttaacatgtagcatcgtgatgtggtctccacgtcagtgctcccagggtcgacgggcttcaccagatgagcccaaagtaaatattatatttgtaaatttctcattatagaggaaaatagtaacttgtatgacctctatacactataaatactcaacaaactctacatgcaaagggttaaaaattcgtggctcacttatgcaaaaaatagaatgctcataccttattgtaatcccttaggtttttcaagcctctgtcaataatattgactcatggactaaggctcattaacgccttaaccacgtaaaatccttgaatgttcgtattttattttctttgaattatatttctttggctcttacatttaaattattagtttttgaaaaattcgataaatattttagtattttcattaagagctaaaggaggcagtgataccatcaataattacacactataattatggtactctctcccgaactaaatttggtcttcattatcacgacactttgatggacgatgttgatcttaatgccaaaataggactcaatgagaatcccactgaggcaacaagtcgtcggaaaggaaaagatcaacacgataagcatggtcttcacgatgatcccattgatgaaggagaagaagaagaggaaattgaggatcttgatcccacagatccagaagacgacgacatcaattagggaaatgagaaaaattagccaaatcttgaggtcgt

SEQ ID NO: 244000 - DNA, 2577 bp, Cannabis indica
actatcgataacctatcgataacctatcgataaatgtaataaaaaaaatccaataaaaaaaataaacacgaagatgaagacggagacagaggttcggggcctctgggtttttcgatgcttgagtgctatggaggtccgaccggtcttgggcctctgggtttcgtctgggtttttggatagatgaagaggttcggtggtggaggaaaggaggttcggtagtggtggttgggtggtcttggtgcctgggtctggttggtctcggtggtgcgaggaagaagaagagagagtgaggaagagaaagagacagagagagaaggaaaatgaaagggagggtagtttgggtaaaaattgaaaataatagcatttgattgtataaattaattaggagtctaaattttgttagagggtatttttttaagcattaaaaatgaaatttccctttgtaaattgatgtctctaatttttacgatctctttcaaaatttattatatattttttttaattattttaccaattttatctttattatttaacgataatcttcatttttttctaaccaaaattttacatcaacttttctacaaacctatacattcataatctattatatttaaaattgtgtcttatttatgtgaaaatttgaaaataattttagtagaatactcataaaatgaggtttatttaacttaaaatttatttggatttaaatttggttaatgcataataaattttgaaaattaattgctatcgagatgaaagttttagaaattttgttgtaatttactcttaaaaaaaaaatagtggtctattttaggggtcttacttgacctacaaaattttaactaattatttttttaattttaaaattgatttaaaatattttttaataattaatattgaccactaagaatttgctacgagtacagttgtatgtactgagcatcagtctgtttgtttataagaaactccttagaaccggccaatataaatcacaatttggtccgttcaaactgccaaaaccgatttattttattttattaatattatttttgcctctgtaaatattatcaaatttaatggttagttagtaaatttattttttggtctggttttttattgtcgattttctctactttagtagtttaacatctgcaaaataaagagactgtatgaaaaaagtgtttgatttagtatgaatgtgaaagttaaagaaaaatgatgaatattgaaaaagcactaactgagattcattcatggagtggaggcttgatatttttaaagatgtgatctattattatgaattatgagattgagatgcgatggagcaataatggaggatagaattagtttcctagcagctttggcttctagaatggaaattgacagagggagagagagagagccaatgagtcaagaaagacggagagcaagagtatatataaataaagtattttttttttcatttattaacattaataatattaatataataattagataatttacacatatacataaactttaagttaaatactatacatatataaatttatttatgtttttatgtaaatttggcattttttcaattaatttgttattgaaataaaaatccatcgtttaaggataattttaaccgttaacagtttttttagtttttcagtttgaacaatttcagttttagtagtgtttagtaggtcggtttgaacagtttgaacaatgttttaaattttatgcttatatttaagtcgggtttgggtccgagtttgagtctaaggtcgagtccagtagggttgaggccggggtttaggttaggggttggggtcaggggtcggggtcggggtcgggggtcggggctgggtccaaggtccacatccggggccaaggcaagagttagggtccgaggtacgggtccaggtccagggctaaggctgggatccgcgtccgggtctaggtctagggtccagggttgagtctgaggtttggagtccaagtccgggtcggggttggggtccaggttcgagtttggggtcgaaggtctgggtacgggtctaggtccaaggctgaggccagggtccgcgttcaggtctaggtctagggtcgtcttaggtttagagtccgaggttggggttcgggtccgagtccgggtcgggggctggggtccaagtcaaaggccggggtctgggttcaagtctaggtttgggtttggggtccaaggtctaggtatgggtccgaggtttaggtactggtccagggctggtgccggggtccatgtccagggcatgggccaaggtccgagatcaaggttggggttcgagtcactcactcactcactcattcactccctccctcctctctcaacaaccgtgacttttggtctaactttactgtgattatgggagatattattgtcatccctaaaaattgtaataatctcctatgcattaactgtaattagcttttaatctaccccatttacaaccttgttttctttaattccaatttctaatcaattcccaaacttcgcctttgtgtcattatagtttgcgacctctttattaatcttgaagaactattttt

SEQ ID NO: 244001 - DNA, 1912 bp, Cannabis indica
atataatatttatggaaaagcaaaagtaatatataaattatttaatttaaatttgtttattatccacgagtgtctgctttgatatatttatttatatattgggtattacactactaaataaactcaacatatatagggaaattttatgataataatgaatattcaagaatctcctttttccttggttagatactctaaattttaaaattttctctattttaaatattttattagtaaaatttttttttttatgtcacaatgttggtttgtgagattcctaaaatgaaatttgattcgtattttttgttagtcataaatcttatatttttaaagttttattgtccaatttttttattataacaaatttcaatgcttcgtataatagctagttgctgagtcatacattaatcgacttaatagaaaagttttatatgttatagattatttgtaaattttaaaaaaaatttaaatagtactttacaatatcaaaaatttaaatactttcttattatttgtataaaaaatataacttaattattcaaaaaattttaaaaaatctacaaataatgttaaataactataatataaaatcataaaaaacaattaaaaagctctcctatttttaccggtccagacaatatctgttggagtaagataaaaataatttactagatcatcaaaaaaattagattcaaaagatttattagatggcaaaacatataaaggagtacgaaaatacccatttataaagtgtatgtacaatataattacagaatatgaaacaagttgaatcaaaatcatcttgttacacgccttaattattatatcatgacttatgaatagtataaaaaaaattacataacagattaaaatttaaaataattataaaaataaaaatacgttagtatggaaaaaaaaattatatttttactttttgaacttttttatttataaaagtatttttttagtaaaaaataagaaactatttttttattacaattataattgtggagttatttttttgatttttttgagtttatagtttatttataattattgtgggtctgatttcttgttatttttaattatattttaattttttttaaattaaatatattattataattttaaaattttacaaatgtatttttataattaaaattttaagtcctaaaattataaataaaatataaaagagaaatatattatgaatattaatataaatatctgtccaaatcatttggcccatatcaagcaacaatgcaaaggcatatgtctacaacaaagcttccttttaacaatattaaactaaaaggtcaaacagaaagaagtggtttagtactctagtttaattaaaattaccgaatcatctatatatatatatatatattgtatatatatggaaaatttgtttaaaatgataagtatgaaaccgatgcataatgggggagagagagagagttatttagtgcttgagagagactcttcttcaatcatgcatacatagaggacactacatctacaaatatacatcacaatctctcacccactcttaattttgttatagcaccccggccctatctagctagctagttttctcttttaacttttctcttcgtataacccttcaagatctaagcagccaaatatatatatatattttaaaagagaattgttaaaaaatattattgatgtctaatatttttttcggtatcatactgttattgatataattaaatatcagatctcatataatttaagaaaataacttttaagaatatttatcgctaactaatcttaaggcgttataattacatgataatatattaatgtttttaggcacatttatatatgtttaccaatatatatatatatatcattgttgctccaaaattcgcccaaaatacgtgga

SEQ ID NO: 244002 - DNA, 3254 bp, Cannabis indica
gttttttggactgtatggaaaatttaccactcaatacatatttgatttgtataatgaatttaataagtatgtgcatgtgtagaaggtggaaggttttttacttaacatgtctcaataataaaggtcgatgtgaccctataaaagattaaaactaggccaatcatttttagacacaaacgctagtagtatattatatttggtgtgaggaataaaagtaagtagttatcagagttacaaatactcatttaattcactgctgcctaaattgtataactcaaattcatgatttgtaagagttggtcgaggtttggaaggtatgccaagttgggagacggagacactttcatttcaatcttcgctataattattataacataaaaatcaaatcactcattcttttcaatttattttgattttttaaccataatataggtggtatgccaatttttaatttgaccattgcttcaatctttagattattctaatgtttttttgataagctacatagcaactattgtttagtttttaaaggtaaataataaatatatagcttcacgatttattaaccaaaaaattaggtgtggtatatgatcatgctttaccttatgttattattatttctcgtcgtaaacatgttattaaaactaagcaacagagatgagataataatgatgggattatgagtacctagtcaaaatagcaatagcctttcatttctttttttttttttttttttcttttttccttttttattcattaaatattttatatatatatatatatatatatcttcaaccactgcaggttgagggtttcttcacccaccaacatcatctttgctttcaacttcttgcttaaatttctttctgcagtacttaagttatttaactaaaaattcaagattttgatctttatatatgtatgtgtgtaatcaatataatcaaaaagttcctcaatttcattcttgaaaaaagaagaagaattcttcaaattatttgttatagaagatgcaaactttaaagccaaatttcaaactacatttaagaaaaacgataactgattactttgaccacagataaacaaaattagatgcggtcagataacgttagtactttaggatgataatattttttttgggtttattatggaaagtttatttacaacaaatataaacacatcttattttaatatattaaatagatttaaattaatatcaacataaaactttaaaaatatatatatataaatgaaaaaaaatatctataaatataagttattagtaaattattataaataaaatttaacaaaacagctagttttacttttaaaactagaaatgttagcacgtgttaatgaaatttaatattaagtcttatatataaaatgttaaaaaatactattagtgtttaacactactttgagggttagatgttaagtattagactctatacaatttaatttaaatttattctagaataatactaactatttataatagtaatctcaaggtggtatagcaaatgaaatttgttaaactaatgaaataataaaatttataaaataattttacttaattaactctagacataaatttatggctggttatgagtatgtaattcatagtcgtttcagcgactatataaagttattttactaattaaatttttataaaattattttactattaataatttttataaagtctagctcaagtgattatagaaagatgcacttatattagagatcttgtgttcgagtctcaaatacgctataatataaataccataggacacttctcaagaaaaaggaaaaaaaatacagcagataaagattagttaacagtgtggtgctattattattgtctactcctattggaaccaaattcagtaggcacacacaaatttatttatttatagcagccaaaaaataacagaatttatttacaacaaccccaatatctgaccagaaaattaaaagagcctccctaggataaatccatttaaaacaattttattttcttagcattgtagacacttcttatgtctagtaacaaagtcaattcaataataggtatcgaaatttcctggtctagcacatgcatgtttttttgtatagttttcgtatgacgactttaattgcttccattttaaaaacttttttttcaaaagaaggatattgagggtgaaattatttaattatactatttgtgatatttaattttataaaattgattttttcatggtaaaatttttcgaattttatttctgttttggtatttatactttcgttaaaatattaccgttaaaattgcttcaatagttcgaggggaatttttaacggccaaaaacgttcagggagcacgatttagtacatgtcaaaattcgaaggggaaaattactaattagcctaaaaattagggttacaaagaacaaatgaaaaagaaaaagaagaagaagaaaaaagaaaaaagaaaaaaaaatatttttaattagttttcctatttaaaaattatttatttaatattgtaataattaaaattataagaacaaggaatgtgtacatgatagctattctacttggcatttaacaacactattttaaccaaagtgtaaatatcaaaatagaagtgaggttcagaggattttattatcaaaaaattaatttgtaaaatcaagtgtcacaaatcgtataatttagatagttttacagtcaatataaaggacaaccttgtttctttccaatagataaattaatcaaattttagcacccatttgttggtaatcttttatttttttttaaaaaaaagtaattaaactttattaattaaccttcaaattttgcttccaaacaagaaagtaatttagatggaacgttcccacactaaatgtaccattagatagaaactagaaactcttgtaaataaatgagcaactaaatttagtgaatgtttaaacatttgatggtaaatttatatatatagggacacgatttttttctgttattgtacttccacggattgtaattcgtgatgtacgacaaccgttggatggggtggttaatttgatctaaaagatggggttgatctaggggtatttagggttaaaaaaatggcaaccggctaaatttttgaattttaaatttattaaatttaaaaaagttaaaactgatatccatcattcacatcaaccgtcgtcctccactcttccatttcattcttcactttctttttgtttttcatttttcatttttcattt

SEQ ID NO: 244003 - DNA, 1057 bp, Cannabis indica
gctattttagctggcacatttatcatgagaatgaaggctaccaaaggaaggaagttgtgatcctatagcacctcttgaacctaccccactctttgcatgcttttaatcgagtctccaaaacagatgaaatgaatatggtatgtgggattgacttattgtttcattttactgtttccttgtccttagtgtataaaataaaccctttgcaatttcccttttgtttgtgttattgaatgtaaaattgtatgcttattgccaattgctctgttttctgttctcaggaaggctaccacacttaccgtggaggattctggaactatttcagtatgggtaagaatgaattattgacataaagtacttatgtgatgcattggacagtttactgaggaattaatattagtcagacaattgaagtgtagtagtagtgaactactaatctctactttatttagaagcatacatttccttttgctatgtgtaatagataataatattctagtaactgaaattacagaaatgatattgttgtttctaatccacaatccctatattatacaattaattaacagtacagagaaaacgtcacttctgctttatttacatagctccctaacaattacatgttgttctgtacaggaatggatgctcaagtatcttatgcatttcactccgaaagaaagttgcatccagaaaagtttaaaaatcaattaattaatcaggtacagcattatttcatgtaaacaaatactgtggcaagaagaatgtgttgatcaatttaacaaatttttataaattacatcaccagaattatttgattattatctattggatttcctgcaaataaattggaaggatgcgctactgatatttgttttcgtggacttgatcagagtacttacttgaagcttggttgcacccaaggatggttttgtgcttcgttgattcatcccgcttcaaggttacatccttaaacttggtcatagttcttagaatttaatatctttcatcttggtagtctgtattgtgacagcatctatctcgttacaggaatatagca

SEQ ID NO: 244004 - DNA, 2346 bp, Cannabis indica
attctcagcgtaatagactagtatttttatggagaaaatacataatttacattaattgcaaataataattcatcccgagtgtcttgggaaataccgaaacttctcaattaatcttgagtctctgggaaatactaatgtcttggtctttagggaattaatagttgatcttgtggatctggaactgattgagtcttctgcttggcatagccaatcaattatatcgcttaattgatacaatctttcttcttagctcttactagcatggcatgaagattttgggtatgtatgattttagccatgctatgcaaaaaaattggtaatcttcttttactctcttatgtcgtaaagtgtatatttcatcctatgtgtcagatgaaccattgtcatgtcactcatacaaaatttaagatagcatttctccccaagtctacatgataccgagtaggcattatgtaaacttctcatcttgtgactatacagtgaagctaatccttacgatactccacgtggcatgccaactagggttttttgatacgctaagtgatatatctattcaccctttttattcctcaaagagttatgactgaatcaaagttggaaatgtttgggttttcaaagggaaaagtaataattgcatataatatttctctaaatgaaattgaaaaacattttaatataaataccccaactgtgccctttcttctattttacattctttcacaaatacttccaaatacttagaaaacctctgagacttcaaagctttgaaattttaagtacttcccgcgatcacttcatttagagcttcaatacccttctcaaaaatcagatattctagtgagtaagtatttttacttgttgctaagatttattttccctttacatctgtgaatatgtctatctacaaaacactatttttggttttgaacctctgcatgcttatttggacgttgttcaaaattgtgatgattgagtactctttttaagtttatggttttgatttgtagaaaaccagttctaggccttgacatcgtaactttcatctttaatttgtggaagaatccccttgagtgtccttaaatggttcagtatttcaacccaccaataccaagaacacacctctaaaagcaaaacctctttaagaagctttgtgtttctcttttaaaatctatttacagttggccatctagatataaatgttttccacactaatacacgactcggttgctcacctctcctctacccattatcttatagatgaaccaaaacaaattatgggaaggtgaataccagataaacaacgacttgcttcagttccttttgaagataacactgtccagacttcctcttcttctgtggtttggtgaatcatcatttttatccatcaagacatactcaaagagtgaaatcagtggctcttaaaaagaggaaatctatcaacaccacttttacactatcactattggtggtgaggcatatgatcgacacatcttcgagcttgagcaaggttggaggcaatgcttgccgaagatctagatataccaagtccaagcatacataaatgatactttccctgttgctagacttgcactgtcaaatactagcccttttctagtcgaactagatgttactgttgccaaacaaaacactaaaccacctaaacccagaagaaggaggatggcttgtaaaaagcagacaactcaactgatgactaagcagcgcacatggtgactaatacaaatgctggggatcctgaagtctaggtgttaatgctaaaaattgggaaaatctaattcgtttaataagcgacagcgacaaacaaaaaaaaactaaagagagaacacaataatttatagtagttcatttctcatatcgcgatggtaatgaagctacgtttactttgagcttttataataataaaaagcaaatttcttacaagagagcttgagaaaaaataactgaggaaagcttcacctcacaatttctaaagagaaaaacacgtgaggagagacaagctctaaccttatagaaagaattgagattatgaaaaataagctagaggagctcttcttttatagaaaaggaggtccaattacataataataaaattatggaaaaatttgtcgaaatttgctaggaaatcgctgctcaactcacgactcgattttagggattaaaatgtcaaaatcatgagaaaggttttacacaagcttagattcaacttcaaaagagctttccaattccacttgaatcacgttatttgattaatagttgagtgactcaatagattaatcagtgatcttgttaacgtcactgaaaactctgtttcttaggctttacgcatat

SEQ ID NO: 244005 - DNA, 2356 bp, Cannabis indica
taattgagggttccaattacactctccaattctcatggccccccatgagaattgaatgtaattaactgtgtaattactaaaaactttccatattatacattagctaactaaaaaatattattttcctatgtaattactaactattttgccaaacaagatattaaaaattcacatataattaccacctcatatatagtgtaattattaaactgtgtaattaccaccctagtaattaccctacctagtaattacacaattacttccaaacacaccctaaattaaatctctatcttatttttacgaatctttgactatggatacatgtattatgctttctattatatgctatatattatagtaggaatcatccatatagattataatttataacatcctacaaaaagaaattccccaaattactggaatagttcaagtggatcgtacaactgatactcctctttgtagtatagttctcattcttcataagagaactgtttggagcacatttttcaccctttataagagaactgcagaacaacaatgggtgaaaactcaagccccaacgatgtaaaaactatggagcatggatggagtgagcactcatcaaaaggggtgagaactacctctactagaaaaaaagattagatgttcgtctatgatcgacttcgttaaaattaacgtcagttcctgcctattagttttctcctccaagaacccaaagatccaaaaaattcgtgttatttcctcatgtttcaagtgaaaacatagaatagtaggtattatatgtgaaatagagaaaaaaatataccttcagtctttggcgttatttcatccatgattcaagtgaaaacatagaatagtggaaatgaaagggagagagaaacatgaaagagagaggaagaaaaagagaaaaagtaaaactattgaagaaatgagaggagaatttcagtattaggaaaagaaaaattggcataattttgatagtgtacaatagaagaattttttaaattttttattatttcttttatggtgccattgagcataaaaactcaaatttcccttgattgacctacctacacaacagaattgctaatatgaatcttaattctattattttccctatctatccatgaaggaatattacaatcaaagctacaacgaaagcatggtcaacagatccaggaaatatagtcaatcgaaatttacccctcttaacaaaaatctggttgagtttgtacatgaggctagtctgcatttaaaaaaccattctgtttcagaacagtccccaagccagaatgaagaaataataattcaatgttgatgtttgaacaattcacacacataggataagaccgtaaaattatgctaaattaggcacataaaaaatgagtaaatcttataattagtacactttttgcaattatattccaaagtacaataacaaatcgaagataactattattaatagtaatcaataaattagaaaaagctagattaactttttgtacccaacacttcagaataactgacttaaccaacaaataaaccagctcagccacgctgtgaaaaagctgaacaataaataaaaacgaactagaacctaccctggcaaaagataaataaaaacagatttaacagatgcatctaatacagtcttagatgcacaactaataaatccagaaaagatgcatctaaagactgcagacaaaccaataactaacataatttgccatagaaaacatgacacctacaattgtcatatcaagtttgataatcttgttctaaatttaactctgcggcaaaacttttagcacactattggtgaagattttttataaaaatattaaaataaagtactgcatcataaatttagcactctattattgtaaatatgttaaatgctcaaagcagctttatttttcttgtcccaaaactcaattagctgaattcaaccatgaataattctaatctttggtgttaatcttaaagttagagtcatgagcatacctgagctacaatgtcattgcctttataaatggtgcaggatttttgaaaagggaaacctttgaccttgagatcaggaggtgaatctgggagatcttcagccacaagaaatacctccaactcagttctagtgagagtatttttggtcctcagtaccctgaacaagaaatctttagactcaccatcacccttatagcattgccaacatcccttctataatcacaaaagtttaatcggtaatctaatgcagaatccaatgctgtaatattcaaaatacaacactaaccaaaaagaaatgaaacaggaaaaatatccccacttgggtgattctaatttaacaattcaaacaaat

SEQ ID NO: 244006 - DNA, 2977 bp, Cannabis indica
cgttcttaacagaagtacaaatcatgtatcacaggcattaagtactcatcccatactagtgttggtagggctgaacgacacctcaaataccacaaaatgttgtaccacatgcactctgtactcttcttgtactagtattggtaacattgtgtcatatcctttaatatcatatactgtaccaatgcacttcgtaccgcaaccgtgatagtgttggtagcatacaaatcacataatacatcatgcatataacacacatacacatatacgcatacacattttatactaatcttacattgtttctagattcaagtgtgtcaatcaatatgaatgaaaactcacgcgctgaacggaggtcgtacgtcagaatcatgcaaaatgggtaaacaacttgctaaaacctttttggagaccttaactcaaaacaagaaatttttctatcaataaatagcatggaaagactgtaaatattgagcaaacacgaaaaaacgagactgaaaaaactgcttgaaaaaaggtagatcgtctccttagaaacgatctgtcattttctaccgcagaaaaacaccaagtctcatttcgagctcaaattaatcccaaacttggtaaaattctccatattacctagacgaggtccaataaataaattccaagaaatggaatcgtctaaaactcagaatctcaaaatccaccattgttgagtcaagtttgagttcttaaactcaaacttgctcagctccacacacaaccagcaaattgacctcaaactagtcttaaataactcaaatacagctcaaaaataacccaaaacaaaacatagcttggacataacctaattcaagaaattgcatggttgactcaaaaactaaacttccaaaacttaaagaggaaggccatccccacttggccaaaaaagcctgattcatttctctagatttctagaatcaaggccccgtagatttgggaaggcacactttatcctaagcctttaagtggaccccatgatttccttttttgaacccccactagaagtcacggaccatgccatcaatcttagaagtaagatgatttgacaatttagttgtttacatggcatatgatggcatagcaaggcccacatatttaatgagggtggcatgtcaagccttcgaaagagtttttgctttccacccctgaagctttgaagagaggctatctagtatgaaattaaaatttgcatccttttgtctcgacctgaacaggggaagccccggtatttaatgttacattcaggggatttgattcccaaagcttccgtgatgcctttctttaacccattggaagtatttttttctaaagaagattgaagtcttaagtttattgatttgtcgactgggccaatcacaaaaattctcaaggcattgcggccaaaagcctttagcctcaaccatcgcgaccctcccaaccaaaataagatcatccgcgaaaaaaatgtgtgaaagaatcggaccccctattgagcttaatgcctttgatactccctttaccaagagcatcttctagcagtcttgacaggatttttgtagcccatataaacaaataagggaatagcgggtcaccctggcataaatcgcaagagggcacaattcttctaacctaaccaccatttaggcatatgtttaaagtggatgtagagatacactatgaaacccaattgcaaaatttttctggggctctaaagcatgacatcacatggtcaacaaatttccaactcagcttgttataagctttcaccaggtcaattttaatagcaaagaagccatctttacctttctttcttttaaaagagtgaatgatctcctaaataactacattattatcttggatgtttctgcccagaacaaaagtcgcttgagtaggacaaatgagtcttggtaagataggcttgactttgttagctataattttggagatgatcttatacgacacattacaaagggaaatatgcctaaaatgatgggttctcttcgggtttgggatcttggggatgagcactagattcgttgcatcggtacccttatgcataaaaccagacttaaaagaacttggcatatcatcacaaaagtcttcacccactgactcccaatagtgtttaaagaaaagaaccgacatcccatcaggcgcaagggccttactactgcccatgacaaagagcatcttacgaatttcatcaaaggaaggaattctaaccagatcctccttttccaaatcagaaagcctatcatgaatgaggttcccacaattcatcaccctaccaacatcatttccagagaagatataggtcaagaaatcgtgaactctttcccaattagatctcgttttgaaatccaggtatcctccctattcaatatactctcgatagcatttctccttcctctgatggtagctgagaggaaaacttacctatgtttttatttatttatttatataatggtgtttggaatgaagtgtttaaaataatttgattgtaagaaatattatgaaagagaatatgattgtagggacatgtgtaaactgtgtttggctgcgtaaaataatatgttattatattcttgttaattaaattacagtgtttggttgagtacatgaatgtttaatattattttaaaaaataaaaataaaaatatttttattatatctatttaatgttaattatacttaaaaataaaataattatttattaaaaaaatatatttattaattagtaaatattaaattttattgtacttttttattaattaaaaatatttttatatattctattactatgttattgatttttattagctatgtcattattatttatgtacaccgtataaaatttatatataatgcttatagatatgttattattaataacataaaaataattcagttaaaaaacgatcttacagactaaatttatttcataatatttttttataataaattaaaatattaa

SEQ ID NO: 244007 - DNA, 1614 bp, Cannabis indica
taaattcttatatgtatatcactcacgtgtaattaccaaaataaattttagtctatagttgagctacctgatggggtagttgagttatttacgtatagacatctttgaaataaacatatttataatacatcaagaatataatcattactttgaattttcttaaatgaaaaatacactttcttttttgggggtgtcaatagaaactccaattagaattagaatcatattcttgttgtagttagattaatcttgaaaatctagctcttatcaattcaacaagattagttgagtattttataagacccccaaaacagagaattaagttgatagagagtcattgtctttgacagagagctattcattttttttttctttttaacaaataataattaaaatagttaaactaataataagattcatttaataataatatagtcttataagggcagcccttagaaagttgaacattcttcccccaaaaaatgacaaaaattatggtgaaaaacgtgataaagtcctttgaataaataaatagaccaagtgacccaaaaacccaacctttttctcatcttctttgcttataaaattgggaattaagaataggaccccacgaatccatatttctttttataattgtagtgcttgtttatttgagacaaatacattgagatacatcgatttttcatcattgatgactagttataaccaccacaccacggcctaacattttcaattatttatatatataaatatatacacataaagggtaccatagtacgtgattgttttaagtatttttaatatatatctagttgcaattttacaacaatacataatatacttacataaaatctctcatcaatttcatcatcctaaattattagaattgaattgcgatttgttctttcaatattgatgttgagttgcggttttatgactgttgtaattttataggtttcagagcgattattttaaactttataagatattgtgtctgcaaagacttcgacagtgaatcttttagttttatctgtcgctgaaattatagttatattaattggattgtaattgtgctctcatcttaaatatcataatatttaaaaagagacgggttattaaattgttacaacactcgtaaacaaaaaaaaaaatcttgtttgacggattatattttagttttacaaaatattaatttatttaggataagcttaattaaattttgttttgtaatggttctacaaacttaatagtttattataactttgcaaaatttactctttcttttgaggcaagaatttagtgacccgagttacttgaatttttgtaagtttttgaacttattttagtcttaagctgtaacgtcctcgcttcaagcctccattgggcccttacacccacagaatgaatgactcttatacacgagtacgtcactttggctgcttcatggactgacgactgaccctacagaccaacacgagtgtttccagcgtgctttgtcctcactcacacgcttcctgggaaaacttcccaggaggtcacccatccttgaaattgctcccaagccaagcacgcttaactgtggagttctttcgagatgggctaccgaaaaacaag

SEQ ID NO: 244008 - DNA, 1603 bp, Cannabis indica
tattacatttcatattgctacactttattacagtacacaactatgtatataggcttagactaacaaatctaaccgaaataactgtcttgagatcttcttgtccagcttgtcgaataagatagtgccatgtcgccaattccatagggagttaagcaaggactcatatccaacaatagtgaattaggctagctcaagtggccatagtatttatgtggagccctgagttcaagtctcaagttgtgcaatgtaatgtatatataaatacttcaattagaaaaagaaaacatatatccaacaatagtgttcatgattctacttgaaactcatatctatacaaatattcaattcagttcactttatgttctttcttagcttctatccaaaaacaaaatccaagatcaaattcttttttgcttcaagaaatctatgaatataattgtgtgtaatattttacaacaaaaggggaaaatagaagaagaagaagaagaagaagaagaaatgaaattcctctactttgttcttacaactatgaaaagaaaaacatatatttccacttccatatatacttgtagtgattcccttcattcatcatctttatttatcatccatttttggtgattattttagagagaacaatcaagaattgaaaatgaataatttgagagaaattactttgataccatattagaatttagagagaacaatcaaaaattaaaaatgaatatgttatattgaaaatgagtcctagctcactataacaaaaaataactatcaacttcactaagattaacctcccatggaattatcttcatcttggaatcatgattttattaacttaataagatatattttaaagggtcattatatcaacataccaatatcttataaacaagtgttattgaatcaatatataattaagctaaatactaaaatgtgtcttattattgaaaatgtaaggtaataataaagtcaccaaagaaccatcttatttaaacaacactaaacaattatgattggttaaatataagctgaaaaagtagtgtgaaatttgagtttttatagttagcattttaaaattcacattttattctaaatggatataataaagtgtctaaatgagtgcttagttggttataaaatacaaatactaatgacttaatatttgcacttgcacatacacaaaatacattgattcacatttttatattagaaaaaagaaactagaaaatattattgacctaaatttgtaatcactagtcacaataattgtcgaataaatttgtagccacattagcacaattgcaattataagaaaagatttcaacattaaccacgtcatgtgatttttgttttgattaattggaagtgaattttaataaacttatgtaatgtttaatgtaaataatagtgagatgtttcactttttctataatagagaaggaagatgtaagcaataacactcttctaacaaatttgaattttaatattctatcattttggtttctgtaattagctaagataatcaatactaatgtaacttacataatttttaatcaaagaaaaaaacaaaaaagttaggagttaagtgtttttttaaaaaaaa

SEQ ID NO: 244009 - DNA, 879 bp, Cannabis indica
tttatatagaatagatattatttaattaaagaaaataatttcatgataacaaaataaggcaacatagagtataggtagggtaaatttataaccacagcccagacctgtgtaataaatagaaaaattgtatgtacccatatttgttaggtactcattagggtgggcatttcatccaaactaatgtattttaaattaatgtctaatctatctatttaaaattgaatatcgaatttaattcatcaatccaatctaatccgattaattttaaaacttaacagaatattattcaataattatgatgttactatagaaattagtaacatgcaatgtatgtttgtttaaaattatattaaagtgttaacctaattattaattctttttttgaaagaacctcaagttcattagcaaagaaaagagttgggatccagagagagtaatccctccccaattacatgggtaattgtagattgacattttctagcctcaatggcaatgttattgaccagcagagtgtgttctctgttaacaaaaacaaaaaaacacaagattcaaaggtagctgaaatagagagacagtcataaaacaagtgatggactttccaatccggcaaggacgaggaggtgaggctgtggaccgccacttcacagtccgagtaaatggttatcttgttccattttagatccttcgcctaggaaagagccaagtgaatggcagagagttcgaaaggaaggggaagtgcagttgccagaacaggtggaaagcactactacaaaaatggttttttctgacgtttttaaacagacgttcaaagtattctcgtcgatttctataaccgtcacctatacgaatgtcgtaaaacgggcaaaataggcgacggtt

SEQ ID NO: 244010 - DNA, 1323 bp, Cannabis indica
tccttgaggatcttcttctttgtcgaatacatttttgctaacctacatacacagtagtgataatatcgatttcgtaaataattaatagaactgagtctatccatacaagtaaacccgattagatcggcctaaaaaattctaacccattcaatgatctcaaagtaagaatatgacctcaagttcaatctaaactaaaaaaatatagaaagtcatttcaaagtttccaacatcaaaccatttaaaaattaatcattacagacaacagtgatccattcataatacaatacctattgattacaaacaattcaaatcagaaaaaaaaaacttgtataactatatgaacaaacaataactttcttataaatctttataaaattattatatatttactataactactaaaatggaagataagaacataacaaaataaactcataaaaatcacataaacaccaaaaattgaacaaaatctgttttttcctaaaaaaaaaaaggcaaagaaatcataaacactaaagaacatgtaatagctctaacatatatatatatatatgtataaattatgtatatacatataaattgattatattttgcaaagaaattctgacttattttttaaaaaattgtctcgcttctcacttaatctattcgaagatataatatgaacgaagcgattgtagatctctaaatttctgtataatcaacaatgtcagtaaagaatactacctgagtgagtgaatgcactccggccgaccttgttacctgagattttccaataaaaaaaacgaggatgagactaagattggattggattctttgcagccatgaaaaaaaagaagagattagagttgaagagagcatagaatataccttaagagaaaaggaagcgcctttgcctgagttcagaagagtatcgttaggattagggttttatgagagagtgtatatatatagtgggccggctcgggttgggctgaatgggcctcaaaaagaatcagcccaatttcgacccaacagataggggtgttcatccgatccaatccgcacttttttggtcaaacaacatccaatccgcactaagtgcggatttcatattttggatccaatccgatccgcataagagtttaaatccaatccaatccaatccgcaatagtgcggattggatcggttatttttttaataataaattatttaatatttcatagaaaaaaattaaaaaaagactatgtttcttaatctccaataataatctatttccatctctatttatatacaaattaaaccaatatacatatatatcaatatatatactattttttaga

SEQ ID NO: 244011 - DNA, 1099 bp, Cannabis indica
taaaaatgaaacttagaaagatgaaacttttgtcatgaaactttcgtacaccttatcttagactcactttcattctaaatttaggggaaagaatgacattatacattttaaattcaatgaaaaattttctttccaagagttctatacaaacgattatctaaacatggaattttactcaaatcaacttataataatcaaatacatcattaatttgcaacattaatgaataaaaaacccagaaaagatcgaagttatatatgtatatatatcaaacgcaggatgaaagattagtaatgttttgttttttgtaatgaaatgaatcaaggtgttgtaagattttgtttaacaatgtggttgagatcatcgacgggaggtgaaggttgttgctgggcagccattgctaactcaaactgcttaagagaaatggttgggaatgaaagcacttctggagatcccattcccattccgattcccatgatttcttttactgtgtttgggtttggagtagttgacccatctaatcctatgtgggtcacgtgcttcacgtcggttgggaatccgatttccatttcattttctgactcatctgactctgactcttcttccttgtacactaatttccccaattacacagattaagtaaattgtttaatcttaattctgatatatttaaacaaaaattattattttacttgacttaccaaacatctgagaaaaacttttgatgcttctaatcaatctctgtatgccaccggaaatattacgctttggcagattcagaaaactgaagaaaccattcttcttcttcttcactgatctagataacgatgaacttgtttcctctgtattttctcgtcttccttataaaacatacccaaaaacaaaagtcatatcaaatatgcatacatattagagagagagagagaataaaagatcatattaacccaaatctatatattccaagcatacttggtggcttattctcttcaagatcatcacttggtgtctgttgttgatcgttgacagtagtagaattttttcccagagcaacacttgactcagaattgcaacctatagcgaatggaaacacaaccaatct

SEQ ID NO: 244012 - DNA, 1446 bp, Cannabis indica
atttcagccttttagattaggttttgacttttctttcatgtcagttgtttcttcttacctttggtcaagctacatttttccatcatggttgatggttacttggcctgaatagcctatggtcatgactctggttcatgtgttttatccaacattaaacatatatatttgggtagttcttgggtgctttgatttttcttcgagttgtcaaagcgggagtttcttaggaccaaagtatttggtgcactgagctccatatattggtacataagctcaacttagaaaaacaggtgtaaatttacacctattttgcttgacctttgacaattattaacaagaccaaaaatgacaaggaaattttggattttcttaaaagggagagggatgttcttggttaccatttaaagcattttaattaagaaattttatattattcagataatccttattaatataaatttgacgtttttgtgctttccacgtgtattcggaatcaatgttacatttacttatgcctattttaaggttcaaaatttacttatttcccttgccaaaagactggaaaagtagttgctaatcttatgttgttccttcaatcaggtcttttattgaggagtcgcaagcaggcatcaagatatctcctcaggataataattatcttggattaaatgacaggctggtgacagttacaggaactcttgatgaacagatgcgagcaattgatctgattctttctaagttagcagaagaccctcattacacacagtctatgaatgcaccgttttcttatccaggtatgtttttagttaaatgattgccctatgtgttgcagtctggtttcaattcttgtatgctgttgatgttgttttacattgatagctttatgttacactactttctctctcttccctttatttatttattattttggtgattgagataataattgtgacttgttatgttttcattccatgaaaattgtgtgattttctgtgttgtatcgttcaaaaccattgcttactttccataaattagaaatatagattgaattctctaaattagtgttgttacattatctaattttagagcagtagtacgagttttactgtacctttttattttcataagaaatgagacttatgttagagagaggagggaacaaaatatgctacagtattactgtaaagtctgtaattgcactaggagcatttgtttcagttgaatgggtagtactgtgttttattattttatttattcctattttcggattccacaaatataataattattgcaatcatttgattgaataaatagaatccacattttactctttgtatcctggtttatagtttgtatttgtataggtgacataaaaagtattaatctatttagaaagaattcatgttttaatatttctatcctgatctgctgcttgtatcaaatgccata

SEQ ID NO: 244013 - DNA, 1354 bp, Cannabis indica
aaattttacaaaatgtcttaaataattataatatacataatacacgtaaaatattaaaataaataaatattatttaatatactaaaataaataagaatacaatacaccatttcagtaaaatttctgaaacacacccttatattttggcatgattagaaagcgactccatatattatgagaaagaatatgtcggtggttttgatccttcaaattgcaatatattctaaacaaaatctttggacagaatagcagtgccgtacacatggcggtggagtgatgatgcttttgtgttttcttttttcaatttcagcgatgttgcagattaaatttggaccattagttttgaactgtattatatattacattcttaatagagatggtcctaacatgagatcaagcccattaaataaaggccactccatgggaccaggctacactttaaactccccaattgtgtactctaggtggtagttgcttgtaatttagaaaaatctcaaaaatatataaagacactattttctgtttatccgattaaatttgcactattttagtcaaacaacatttaatccgcactaagtaatgatttcatattttagatgcgatctaatccacataataatttaaatccaatctacaataatgcagattgaatgaattacttttttgatattaaattatttaatatatttaaaaaatacatttaatatttcattaaaaacgatggtaataatatgtttgggcatttatgttaaggtaattatatttctttgatttttttatctcagacgatatacatacatgtaaaacatctatatatataaatacatatatatatatataaatacaacccaaagatatagtaaaactctcatatacaatacaaggttaagtatcctacacaatgaaagtaaactttcatataaatatatacaggctaaatacattattataaaatcactattctcgtcagtcatcaaaacgtttatttttgaggaccatcgctaataaaactaagtgaatttaaaatgacggctatagtagactattcccgacggttttaaactcttatacttttcccgatagttttaaagagttacaatctaaaaaatgaaaccgaattttaaagggcatctcgatgatttaaaactgtcggggatactaaaccatcgacgatgcttgtgttcaataaaccacattttcatcatctcagcagtttaaatatgcggtctatctcattttgagaaaccctaaaatcctctctctttctttctctcgaccggagttggtgctcctcttcttcggcgaccaacggcccaactccaattatgcctctctctctcccgatcggagcact

SEQ ID NO: 244014 - DNA, 1918 bp, Cannabis indica
aatcataaaaagggtaagcctaatttactaaagaagatcacttaggtttcaacctaacgagtgaagaaaatgaatttatcttcagttacaggattagacatttgaagtttgaacaaagctgttattgcaattttttgttttttaattattacttgctgacacacattgtaatatattagtacatgaacaagtttgtagatttataaacatcttcatcaaactattatatttgtgttcatcagtttatcaaattatcaactttgtttagtccacttaaaactggtcatttatcatatataaaaaaagccaaaattgacctttcatctaaatatttatgaaatcctgtacaagaaagaataaagatgctaaagtacttttggtgtcaaaatacataatgtacatttaccagaatcatatgatttatgacaaaattaaattgagcatatattattatacatgtacaaaacaaacccattacataaagagtatcaatctgaaccatttactaaggtaaaagtgtgagatatgtaagtcctgtagtttttagctggtgatgtagctgaggttggtttcattcaaggactctgatagtatgatcggtatactgatcggctgcgaaaattgtgtggcttcaagggcataaccttcacaatagaaccctctaagttagaaaataataactaggacatcaaccacaatcattgccaatgtgattgtagtagttttaataataaattggtaagtacatggttacaaattatactagactgagtgtcatgttcttaaaaatgaatgatgtaaccaagctcatggaaccccaataaattcattgatagattagtagcattacactagattaaatccgagaagaaagaggaaaaacattttcaatgtatacacaatcaaagcatgtaaaaaatggcattaacagtctatgaaatgaaattcacaagagacaatctagtatggtaccaattacgaaggtttggcttttcgcccaattggtgagatgcgtttaagaacctggcccctcattctcatctctctgtgtagcacaacaaattagtatttgaaaggtttcactttagtagtgttgatgagatctctttaagaagtagagaagtaatacctttggtgcaaaaaaacaatcacgtagaaaatcgggagcaacatcaaagtcagaattgcagtagccaggtatagtacacttgtttctttctgcatcatgcatatagtctgagaagcataaataatagttcaaggaggggatcttacagaagtagcaaactgaaaccttaccttgcctccccttgagaaaggtttcaatttcccagagcaagtgtgagcatcacaaaattgatgcagaaagaattctgaagataaatcagaacgtcaatataagtaggacaaagtaaggtcttcatagctcctcaaacatgcactattacgacaaaaaaaataaacgacagtatataagcacaaagacattgtttcaaaatctctctttataagtagaaaattaccatgaaggcgacttgctgagggtccctggttaatggggaaacagttgtcggcgagactctgtacaactcaaaccattagattcaaacaagcaaggcgaagtggttagagtcaacaagtatagcaagcaaacctcacagtaatggcgattccttgcaactgctgcaggattgcatttggttttgcgtagcttggtattcgtcacatggtcacaatgtagtgccccacataaatcagctaagcacttgctgccattctgtgttcaacaaaagttaacagcatcatgataagaattttctatcaatttaatataacagtagcaaatataggacaatcaatagtagctggtatattgataatagaacttaaagagtacaatgttgctgggtattcgaga

SEQ ID NO: 244015 - DNA, 2339 bp, Cannabis indica
ccaatgaagaaaaacataagaattcatggacttaccacttgaatataatttaatacttctttatctcttatcttgttcccatcacgatcaaccacattaaaaactgaaaacagaaaatacatcaaagatattaagaaacaatatgaagaaggctctcaaatttttcaaagtagttggaaaaaagggttattattaccatccatgaaccatcctccatcagatgatatgtaagcttttattatcacaaggttcacatcagcaagcacttgaactacatccaagagaattccatgcttgttgacactgtcaacctaaacacagcaataaaaatcatctatgaacttagttgatcaaattcataacaagaattcaatgtcttgttacatctgagatgtgattatgtgagttaagtttgacaaaaatcaaaaggaagcaaacctgtataatagtagcatcatccaaagtttcgttgtcaataacaactctgcaaaaacattaaaaacgtatatcagatgaagctagctgcagatatcacctgaattatgtcaaaaatctaaaatagtttatgaaatatgggatgaatcaattaaaatttgaacagaacactagctgaggaatctgatttcaataggagaaaaaggaaaaagaaaaggcttcaattcaatctctacttaattgggggcttgaagaaaccaggggaagaagaaaatatgcataatttgaaaagatttgatttttaaaattggttacaaaagccacgaaataaaaaagtaagctttaaaccaaaatcagcaaaacccagaaaggagaaggagttttcagaatatttttacctgggtgggttcatccttctgatgagtttagcatattcatcatccattatttctttttccaatatcagtgtagtggaaaatagaagtaccaacaacaacaacaactacagctataccttactaagaaaagtaagcacctcaaaaatatagaaaagaaagaaatagatttaaacaccaactgggtattttgtaataataataaaaaaagaaagaaagaaaaaaagtactgttgaaggatgcttcctccaatatccaaggaagaaaaaaaaacagaagaagaagaagaaaaagtagtggtagggcctaaaaaccgtttaacaaaccataaaaaaggaaaaaaaaaccttttttttctattgtgagtccgctcatttaatttaccgtagttttttttcttgttcctaaacgtacgctgacgtgtcaaaatttgattggagagaatatcggttttgaaaagtagtcagtagtcactaaaatccttttaattattaattatgagacatttaatttattttttgaaaagaaaaaaagaaaaattgatgagggaaatgaatccgtaggaagtaaagggcgcggttcccgaatcccaagagatgaggtggcattaatgcacgtgtttggtggaagcttggtcggtatttttggcggcaaaaccagcgtgagcgcctactttctttcccaccttaaccaccctaacataaacttacctccttattaatatctaccttcctttattaaccttaaaatatcaaatcaaaattaaattaaatactcataggttaaaaaaaaaaacaatcaacaaaaaatatcttcaaatatctttccagtccacactattctcctataatatgagtcttaattttttttctaaagtaataaaaaataatctatgcatttacatagggtattatattaaaaacaacaaaaaaaaataaaaataacaatttatataattttccaatttacttacataatcatatcaatccaacccaaaaaccaaaaaaaaaaattaaaacattaagtactaataatttgaaatatgtccaacagatatatagcaatttatcataataatttttaaatttaaatatataaaatttaatgttaaattatactaataaaaatataatatttcatatggtatttaattagcaatgaattttaaaatttatctttattttttttattgttgaaagcacattatatatgcaatacattttcttatgtataattatatttaatctcttttacattttcacaattggcttcattatcaaaatagaaaaaaaggaagaacataaaaaaaaaaactttttttttgaactattatataaagagttttctagtaaaaattatttttaaaatgtttggataaattattcaaattttataaataacttctcaaaatcgttttaagggaagttctgaaaaataaaataaaaaataattattgtaaaaaaatacaattaaaatagtcaacgggtcacttattattattattattat

SEQ ID NO: 244016 - DNA, 2283 bp, Cannabis indica
taattccggaccggctcagagaattagaagaattctcagaaggctcatccgacaccactttagactcattctcatactttttagtgtcccaagggaaatcacgaatgacacctggaaagttacggtgaattttatgcggccttgaacaaagagaggcagaggcttcgaactttcttttcttaaagggcgtagtcctctcatttacgtccgatgaagacgggacgccaatatctcctccaatcttgcgaatctcatacaagtctaacttcccaaagtgtttaagatcatgcaataaattttcttgggcttggaaaaattgagatagagttgtcttcatcagaaagaatttttgctacacaagcatcctcaggagcggtagaaggaagcaaggtgaacggttgcccaggttgcccaacattctgccgctcaacttgaacaggcccacgaggagatgggttgtcactaacaaggttcgtgctccccacttacccacgtgagctgaaggatttttacaaattaaagactgaggcccatcagatatattattcacaacaaattaattcggcccaccttttgcattactagaacaaaccagcccattcatagtcaaagccggcccaccagaccccggcccactacccagctccccgccttgagaacagttcaatgccacttcagcattttctttttcagaaagcccatcttttaaaaccattgacccatcctttgacccaccagtactcggcccagaaaccaacatatttaccccaacgacaccaagatttaaatcctttgacctgtccctttcttcaaccaccaaacaaggaaaatgaacaggtgccttttccaatctctgaaactcagtgtcacctccgttacccgaattagaagcttctctcacattgccagccggatgcttcttgggatgccactccatgcgcaggggtttttcgaggttgacagcaccacgagaagtcaccatcaacggacgccttggccgacgactggaaacccgattacccttcagatcttgaactccctcagccgcggtcgccggaagcagaggaaggctcacctcactcttccccagggtctccgataacaaaccacaagagccaaacgaattcggccctgagaagacatcaaggtacgatgaggataaagacagccatggaccatacatcggagactgagtaccttcgttattgaccaccataaccggagaagacaggtacatcccctccgttggtgacccaaacaaccacagaagtaacaaaagatgcctattttttcaaacttaacttgaacccatttctttacccctgaagccaaatcaaagaaacaccctgcaaacagaggtttgttgaagtcaatatccacctgcactttcaaaaaatttccccacagagctggtttatcctcctccagatcaacattcaccacctttccgactaaacctcccaacaggttgccattagtgactgaaaagtattcgtgggggaggttgtgctgttggatccaaacacgcaaaaacttgaacaccaccggcccatcagatgccagagtccaatcttggagcactatcatgtacccacggatacaccagggcccatttaccaaagcccagttcctatcttcggccgagccaaatccaaacctgaacacattggatgttctcgagccatccatcatcgccacaacagccacctttttttttccaaactttagccacaaaatccaaaacagaagactcttccacaaccatgggagcaatgactttcccataaagacagcaagaagtgagagcctttagacaagagacactcggagacagcttgaccgaagtttcaaggcaagaaaaacatttgcctttaagaggagatttggtagcattaaaggactccataaataagggactttaagaatctccaccaaccaacacgacacccagagtaaaaaagccaaaggaaacaccaaatacaaagcacaaactgccaaacactcactttacctcacacaagagaaaagggagtaaatcgaagtcaaccaggggccaaagccagcgaaaacaaagggaacacaacacacttactaaacctcacaccaccatagaagcaacaaaccccaactcacctgctcactatcactcactctcactctcaagagaacatgcatctctctctaggccatcaactagcaaccaacttatacttctcctttatatatatactagatgagagttacgtggcgagccccgtaaatattagttttattttaagttgt

SEQ ID NO: 244017 - DNA, 2377 bp, Cannabis indica
cccatttcaacagccatctttggcagcccaagtcatatatgcatagccagcagctccaaactccttcctttctggttcatattcattctcaatctgtacaaataaagcaaaacacattaattatatggttattaattaatggttttgtttgttataaaacacaaactttaaggaaaaacaaacaaaaaaaggcattacacaatattgttattattattattattattattacctgagaaggattatgggaccaccttgagattgaaacaacttctcatctttcatcatttggacaattttctgggtaaatttctgcatggctgactgtaaaattgaaaaaatgagaatagttaaaaactacatatatatatgtatatgtgttatgttctttaacattttatgaaaaaatcaaatggtcccattttattttcttgtctcttcttatatatgaccaaaacaaacaaaaataacagagttagacaaaccttgaaaggctcattatctgtcctgaagctaatgcctggaacatacttcagccaaacaggaaatcccctaataaatgggtttcaaagattatgaaccaaatcaaaatcaaaactttgcaatttaaaaaaataataataagaaaaatgttgttacccaaagttccattctgaacaaatataaggcccaatacgaagatgaacataaagtcctgctttttgaactgtcttgatgaacccaaccaagtcatttcttccctcaaaattgtactacaatgaaaaaaaaccatatataaaattaagaaaaaattaaaaatagaagaaagatttaaggaaaaaagtggattaattgattacatacattgccaggagaaggctcatgaagattccaaaacacataagtgtctataacatctaatccaccatctttagctttctgtataagaccaccccacatctgcattttgaaaaatttatacataaaacacatttttaaagctaatcatcaaaagggtactaataaaaaatggtaaagattgaaacccaaaagaaaaaattaaaactttacctgaggagtacttcttgggtagtgtatagagccagaaaataaaatctttctttggccattaatgataagagccttgttatcatagctaacattgctttgtgttagctcaaagcttagaaaaaaggctaataaacagaggaggaaccaggtataatagttagctgacttattagtttccatttcttcatttcttttttctttctttctttctctctctagaaaaaggagagagagaagaagaagaagaagaaatggagaatgtggtaagtaattcaccactcacaaatcagaagaagagaccatttgtgttgaaccatgcactgcagcactctcactctctctctctctttctcactcactcactcactcacaattgccttgtgaaaaggaaaaagaaaaaacctctcatatgctgtcatgcaccataatgaagacaaaaaaccatgatattatatgttatatatatgaatattataatgggcaatgtccataaaacactgaaagaaaaaaaaaaaagaaaaaataaaggtgaactctctctcactctcatcagtgtcaccaataccacccaagtaataaactttttctttttgacattaaaatctaagggttaatagggctacaattatgtaaaattttgattataagcaacataaatttaatgaatttttttaacgtcataattatttaatatttataaaattatatattttttttaattttatcattacaaactgttttgaatttattaaaaaaaaaatttagaagtaatgtttccgtccaaacataataatctagaatttgaatcttaaatataatttgtttaaaataataacataatttatactggcgaaataggaaaaaaaaatataattttattaaaaaataacattaaatttatagtacttataaactcaaaacttaaattttagatagttatgtagttattttctcaaaattcaataatgaaatgcataatacaacctattatatagatacacacactgtaagagagcatgatgtggactggaccatttttatggtgtttattatgaatgttattactgtatacacaagatttttgtttgtttttttcccatgcactgcactgcatgccatgcaataatcgaacatatatattggaaaatttttagtaggaaaatcgattttgtttttattgaaggaatatttttttagtacatcaaaaaaattataatccatatattgtatgttcatattgttttatctgttttaattttatttaaattaatgtaaattatgtactagatttaagtgcaaaatacaaatatattagacaactcactta

SEQ ID NO: 244018 - DNA, 2478 bp, Cannabis indica
tcctttagctatcaagaagtcttattgatatttttggcttatgtgctgatcagctggggatgtggaataagagtaagtatgggtcgcttcctagacaggtgagagaaactcagaaacagctggatgatcttcttagtgtttcagcgcctttggtccgtatggaggaggtgaggaggattgaggtcaaattgaatgaccttttatctcgcgaggagtgttattggaagataagatctcgtgcggagtggctggctcacggggatagaaatacgaagtatttccacaataaggctacgggtaggaaaaggaagaacgctattgtggagattatgacggaggatggtcgcaagttaagtactgaagaggatattgtgtgtgaaattgagtgttattttggtacaatattttcatctatgtcgcctactttgcaacaggtggaggagggtattagtaatattgacgccagaatttctcaggctgagagtgatttgcttgtggcccggtttactgttgatgatgtgctatgtgcggttaaagctataggtgctacgaaggcgcctgggccggatgggttccatgccatcttcttccataagtattgggatattgttggtcctcgggttactgcggtgtgccttgccattttaaatggggagcaatccgtcaagaagttcaataagtcgcatgttgttttgatcccgaaagttagtaagcctggattggttaaggaataccggcctatcagtctttgtagtgtgatgtataagattgttgctaaggctgtggctttacaattgaagggtactttgtctccgttgatttcttcatttcagagtgcttttgtgcctggccgagctatccatgataatgttatggtggggtttgagttgctacattctctgttcaagaagaataatggtgttcgtgggtttatggcattgaaattggatatgagtaaggcctatgatagagttgagtggtgctttttgcgggccattatgtccaagtttgggtttcctaggcggtgggtagacttggttatggattgtgttacttcggctgagtacgcttttttggtaaatggaaggcctcggggttgtgtggtgccatcgagagggttgagacaggggtgtcctctttcaccttatttgtttctattttgtgctgaggcactgtcaacgcttcttcaacaggctgagcttaatggtgatctgatgggatttcggtgttctcgctctggtccgcgggtgtctcacctattttttgctgatgatagcctgatctttggtagggctaatggaggagaggcggagtctattcgtcggattctgcagtgttatgagagagcttctggtcaacaagtcaatttagataaatctgcaatcacattcagtccgaatgtccagcctgcagatcgtgcgagtgtactgggtatattaggcttggggtcagtggccactcatgacaaatatctggggctgcccactgtcattggaaaaaataagaagcgtacgtttgctggtatttgtgataaggtccagaaacgggtgcggggttggaagcggagtttcttttctgctgggggtcgtgagattcttatcaaggcggttttgcaggcgattccgaattatctcatgagtatgtttcagctgcctgtggcgacgtgtgataagttgcgctccatcattctccagttttggtggggtacaacaggggataagaagaagattccatgggtgaaatgggatgatgtttgccagccgaaagtgaagggggtttggggtttaaggacctggtcctgtttaatcaggctatgattgctaagcaggtgtggcggttacttcattccccggattcgttaccgggtcgcattttgaagcataagtacttccctgagtcgtcaattttggaagctaaggatcgccagggttcctctcatctgtggtcgagtttggtttgggggttagagctgttgaggttggggatgcggagggtggttggggatggtcagactattgatgcgtttcgtgatccttggattcctcggccgcggacctttcgtccaattacggcagctcctgcggccaatgtgatggtcaatgagttgattggtgggggtgggttctggaatctccaggctttggctcaccatttcttacagttggatgttgaggccattcttgatattccactgggtagtagtgggtgtgcggatcggtggtgctggcattatagttctaatggttcttatactgtgaagagtgggtatgcggtggctcttgatgttgcaggtgataggtttggctcctcttcttgtacccaatctcattggtggaatggaatgtggaatttgaaagtcccccagaaagtcaagatcttcctttggcgtatgtatcatcgcgctctccctactaattcccagctgattagacacaaggttcttgttcagcctatttgtcataggtgtggggaggaatc

SEQ ID NO: 244019 - DNA, 918 bp, Cannabis indica
ttgcgaacttcttgtgccattaacaaagattcaacttctgtaacagagtaagcatcttttcttgtcgacagagatgtgatgaaaacagagtattccctgggcaatccattgaatatagcttcgatgtgatcttgagtcgagagaacatggccgattgaggcaatggagtcaacaagatgcttaatcttgagaagataatcattcaaagagttggtgagcttggttttgcaaagctgagttctgaattgactgatcttggcacgattttgagctgagtaatattcttcaagattggaccaaatagcagcagcggagttacaaccaactattcgagtcaggatcttttcagacattaatgaaagtaaccaagacaccaagagactatcttgaatgtcatactggacaaactcatcagagacgttgttatcttgttcatcagtagcagtaagaaatttgggtggaatagatttgggatcaagaaatttgaggagacaatggcctttaatggtagcatatacttgatgatgccatggaagaaaattgttgtcatcgagtttaacagagaacgaatgattgaaaggaatagttgttgttcttggtaacgaattagaagattgacttcgagtgttggaatttgaatcggccatgaaggaactaaaggaccgagctaagtgtctgataccatgttgaaagagagaaagaagaacaagaacagagtagagtaaagaatgctttattgatttcttagtgttacattacaaatgagagagaggactatttatatacaaagtaagtaacgtgagagtttgttacaatggaaataacagaagaaactaacaaaacagaaaaataactaactctctcatctaacatcagtatttcttccaccacaacacagaaaaagaaaaataaaaataa

SEQ ID NO: 244020 - DNA, 1397 bp, Cannabis indica
catagaataagctacttctaaatatcaaaacattttagatgctgagacaagtgacatggatgttgacttacagcttgagcttgtgccaaaatctttagtagcctgagaaaaaaaaaaaaaaaaacaagaggttgaaaattcttaatccaatatagataatatgattaaaaaaaagagtagagaattttatcttaacatacattttcttcctgagaaaactctaatactttttgatcatcattcttgtgccctagcaacccatcaaatccacattgtctgtcaaaatttgattacaaggaaataaatgggaagaccagaaaaagatgacactgtatagcactgcaacagtgttgaaacataaaaacattctaattgacatgatcagggccaatgtttatctccaacaggatgaggagaagaaatatccagataagacatgcatggtttaattcaaagggcaaaaatgatggtagaacaaagttctacttgtattccatatgaaagcattatagatgtcagtgtcaaggtacaaaggtttaagaccaacttgccaaatattttggaaaagaaaaatgggagcgaaattaaagctaattatacctcccatcatttgcagcaccagaggtgtctttaatctgcatttaggtgggaaaaagaaatacaaaaatataaggacttggagatagttcatataagtttataaacatcatacatatacctatgtcatttgtctctctttcaggtttacttcatacaaggttagagctatgaactatgaagagatgggattatttgcaggaaccaagcagcacaaacaaaataagtactagaactctaattgctaaaaaatattttcccatcatttcatccaatgttttcctagacagagaccaatgcttcaaaaatcaaagattgaattaattgactagttcaaaataggataatttggaactatagctcttactttcaaacatacccttcactccaaacttcagaaatttatcttttctttcctacttttctccctatttattcttccttcttttaaacttctgagttttcagtatatacatgtttcagtatttctatttgaactttccaatttgccaattttttccctcggcacaaagcatgataaaaaaatacatacaagtaaataattataaagaaagaagaaatacctcagcaacatttctctccccatgatcctttctagcatttgagggcatcaaacttggagcaaatccattctcattatgaattgagctcccactatttaaagtgaaattgattatatagcacaccatgacataatcacatcatagatacagaacacagaaaatgtgaatacataatatgataatagacaggcagtgataaaaatctgaaaaatgatt

SEQ ID NO: 244021 - DNA, 575 bp, Cannabis indica
aattaaagatttcaactaccaaggtgacttgtgaggatagcagtgtcaaaattctattccttcccacaattagaaaaatgaccaaaggaaaaataaaaaagagagagagagaacacttggcttggttgctcgtgatctgtcttagattctttgtacttaaaataatgtaattagcaataaaacccataatggctttgttcacaagccttggtagctaagtacctcttacacttacatatataagaatagagcattgttactgtgctagtactttttagaggtaagatgctaccatttgttaatgatattctttttataaattatattaaattatatagaactcaacaattaattataaagtttatagtgcttaaaaaagtattaaacactggtaatatattttagcatttttcataaaaaagaccaccacaattccattttttctctggtaattgagacttttaactaaaattaattaattttgttactttttttctttctttttaatgattacccaaccaacttacaaacctggatttcttatttcttttgttggattacaacttctcaaccta

SEQ ID NO: 244022 - DNA, 543 bp, Cannabis indica
tcactaactagtttccatagttcctcgagaaccaaacggaaagagataaatagggaaaataaaagaaaagagaaaggatgcagtactgaccgaagggttataagatgattgttttctctggaaagctttctcggaatcgatttccatggtttctttcatggcgggaaatcacacataagacgaagccaaacttctttgctttcactgaccattgtagcctatttatgtaattaaactattctcagaaagaaattataaaaaatgaataattaaacgaacgtattggggatgtagctcacatggtagagcgctcgctttgcatgcgagaggtacggggttcgataccccgcatctccatttttatgtttaaaaattagtatttttacactgaaatttaatgaatacaaaattttgaccctttaaataaaaattaattttacaaattataatattatattaattacaaaaaaaagtaatgaaaattatcaaaaagcttcataaaatattaagtttacctaaaaattttaaattattcttaaaaaa

SEQ ID NO: 244023 - DNA, 1042 bp, Cannabis indica
atgtaattataattggtattttcgttggggttatatacagtaaatgttttttttttttaaatccgaatatggaagtaaatttgtctaataatattaaaagtttgattttaaattaaaatagcatattttatggccaaagttaagatataaatcaaaacttaattaaaaaacgccatattattattgtaaataacccttgaaaagtattagaactattattttattgggcccatacatagaaaagcagacagatcccaatggacttcaaggtattgggttatgtgttgagcttcggctctggtgcatcaggagaacgtttgttactgggcccagaaggaggaatgggtcctttgggcttcattccgtaccatatcttgctttcagagctggatccagttggtggactaataaccaaggtatctgacttcacttccatcaattttctagcctcacttattggactagagaagaacaacaacattaagactatcatcaccacatcaaaataactcatcctcatttctttctttctttctttctttcttttttctttttaagaaatgagaccctgaaaataaagacaatatctgctccttaaataacaattacaaattctaattttaggggtttggtgtctttaccagaaaatgaatggtgtccatttataacaattaattagggcgtgctttctattatattaattgctaatttatattatttattttcgcgtgataggagacaattaacgttaatacgttatattgttactctttctgctctatttttagctttgtcacatattacaaagtacaaaatttcttttgggctttctttattagtctaccagaatagtaaaagaattaccataataatacctcatatctttatatttttctatttctagtatcaaatctaaacgtatacaattttcatcaaggagaatataaccatccttttatgtattttgctattccttttaaatgggataaattgacaaggtagaaaaataacactaaatatctctttaaattaatgcttttaa

SEQ ID NO: 244024 - DNA, 1470 bp, Cannabis indica
ttccaatagtgcttctagaacaacactgacataccatcaggtcctggggcctttagactacccattgagaagagagtatgtcttatctcttcagagtttggaatggtaaccaaatcccttttctcctggagggagaattggtctgagatcaggtggtcaaagcattccaacggcccatacatcgtgcctttgaagatactgcccaagaaatccgagaattcctttccaatgtccattctattactcagccacaccccatctttgatcatgattgcctcaatttcattcctcctatttttgatggttgcagtagtgaagaagaactttgaacatttgtccccgtccttgatccaggaaacctgaaatctttgttgcaagtaaagggccctacatcttagggcatcgtgaagagactttctggtttctgattcctcagcccacactctggaaacagaagggaggctctggatggaattcaggtggctttccagcctagcaatacggttgtccgaattgccaaattgacatctattccatttactgagagcatggcgagtagcgcccactctcttgaaaatcctcaccgaggcccaactatgaaacattgagctccaagaattctccacaatcagattactacgtgggtccctagtccagcaggcctcaaaccggaacggcctagaaggtttagcgtctcggttcactgtatggatactaaggggccagtggtttgagttgcacgtatggtaagagatcaccatcgccttcgggaaaagtcttagcccctccccattagccaaggctttgtcaagggccgattttacatgagcgtcgccatcccgatggttatcccacgtaaggcaatcacctttaacatgtagatcaatcaaaccaaatccattgatcaaattcgaaataaacggcaagaattggtctctccccttcgagccgcttctctcagagtttctcagaacaaaattcacatcttcgagaatcaaccaaggaccctcaaatttgagacctagatcaatcaacttcgacaagaagctttttttttcatggaagtacgggggtccttagatgcaagataatagccagggatgatggtcaaggtcggagtacacaataccaaaaatttaattctttgcgatacagatagtctcaaaagtaaacactgatttccaggccaatagcaggccacctgcaccaccaaccgccagaacaataatattaaaataaaagtgtaaatttttcagagaccgtaccaattgagcaggatatcttttgagttcggagatgaaaatgaaatcaggtgagcagacggaactagggctttaacttcaagaactgtagtgatctgccacaaccctctacacttccaagaattgcctctcatgatgcctgtggaggagggatgttcacctcctccacaggggtaaccaagttcacagaagtgttggaaattatttt

SEQ ID NO: 244025 - DNA, 1739 bp, Cannabis indica
tagcatgaaagttcatttcaattggagatcaatctcatcaacttatatttcaaattattgaaagtacacactacacttgacttgaggaaaccctacatttctcttcaatcatttaatttaagtatacatacttctatatagctttatatataaatataataaaataaatatatgttactaaaactagtcaaggttgtccaagaagtgatggcctgtagaacacatggctttgtgcaatctcaattcgttccctcggatcgttcaaggtttcatctcttaaggcttcaagaatggcttgcggcgattgttcactgtaaatcaaacaaaaaaaaaaaaaaaattagaaaatcaatcacaaaaatttaggtttaagtttttttccggggggccctaggctgagtgaaccttgcgcgcaagcctagcccgtcatagcccagaactgaccctcttaagatttatgatcacagtcgaaaaggagccaaacaactttgtaggttacatgaaatattacattggtgcataatatgattatctaaattaggtaagaagctaaggtcaagtaaaatcatagcttgtagaagaagttaccctgttatcaaaattctgtaaagcatcttcaaaatagggcatagctctacaggagcaacatgcttcttctcttcgggatgcaacatgttcaggctcgattgactaagaagttcataaaaagctcccactgcagagacaccctgcaaataaagataccgaatttggtacaagttttcgaacaataaaagtgaagtgaccgaactaaaatcaaacactatccggtttagaaactgatttagttgacaaaactgtatttatactttcttcgtttgtctcaaaatgttttgctattttgaattcagcaacaagttttaacagtttctaaagaatttagtgagtgaatatacctgaatcattccttttccactgatactatcgcccatatctcggcttagttcgcccttggcaatcatttgtccataccaagcgttacgaccttttagtaaggtaacataagtgtcagcaagcaaaggccctgcaagtttctcgggttcttccgccaacaaatgagtaataaaaatcatctccgaagtacaatgagcaaaatataccgatttgctggtagcactctcctttgtgagggctgctaccattcctgagatgaaagaaaaaagatagagaagttaatgcatgtaactttcacagctgagttcaatacaatcactatcgaaatttgaaagtacttttatgtaaccgaacctgctccaatggcatagacatttttcaagccacccatcacctcatgagtgacaagatcactgttgtcccaaacaataaaatgaggttgtcttaggaatttcgccagaggttttctccacttttcggatccacatattcgagcattagcatattctttgttgtagatttctgatgcaatgttcggtcctcctagatatagtatgttctctataggtactccagctgccaatttagaaatctaatgcttagaaataaaacaaagggacatggtttccgaagtggcatagcagacgaaatagctaaaggaaagatctagacaaccgcgaataagcaactaaaaattttcactggcattgactttagacacaagcaacttttgaaacaaagctggttttgatttctgtatagttaaacaacaccaagattaacaatttctcagcaatgtcataaca

SEQ ID NO: 244026 - DNA, 1471 bp, Cannabis indica
  modified_base (1407)..(1407): a, c, t, g, unknown or other
aaaaaagtaacattgtgccatccccgacttaaacaacgatgcacaacatgtaataaagcccaagcctcagcttccaggggcagagtagcctgaagctgaacagaaaaggcttcaacaaactcggagtcagacttagtgacgatgatactcgcggctgacctgagatctttgcaagtagcatcaacgaagaccacaaaatccccctgcagcaatccctgtataacattcaaagtagattgacccagtgatgtgtcctgaggagtagttaacgccgaattaagctcagctaccaagctcttaatctgtttaaaggtgatgaagaaggatggttggacatgatcgtgatacgcttggttcctaactgaccagagaatgaagcagagagaaactccaaatttcctgaactcctccacctcaaaatttccatgttgcatcaaaggggtaggctcaagcagccacttagtaaactgcaaagagttgttgaaattcaactcttcactccggactccccacgggcttgccagccagagagatttagcgagcgggcaatgacaaaacagatgaaccacagagtctttatgttcatcacaaattgcacacaccacatcgttgccaaatatgcgttgaagtctttctccaaatggcaagatatctctcccaagtttccaaaggaagagtttcattcgttgcgagatcttaagtttccatattttaccccaaataggatcttttttagcccttcgacctttgatgattgatttataagccacccgaggggagaattccccactagtcgcatccttccatatcaaattatcatcatggttattgggaagcatggggatcaaattgagagaacttgccacacttgggaccatccaagtagcagattgttggaagtcccactccctgtcctcattcaagagagaagaaacaagaatggaattcagaactatcataggattggaggcagctctaaattgatcccaatccagccaaggaatccacggtgcatgccacatgttagttgatctcccatttgcgataagaaacacgattccttacgatgagatcacgggaagctaggatactccaagctccaaaggataaggatttgggggattcgggattccaaaaggaattgattccattctccaatacttggcacaaaagacccttgtccataatgactcttcccctttagctaatttccaacaagcttggctaccagggccaagttcatatcttcaattttttgtaaaattgaggccgccatcctccagatgagtacacaaggaattccaattggtaagggcaagatatcgatctttctcggtactgcctgtccaccaaaaatttcctgatagcttgatccattttcatggcactaaagatttttgggaaggnggaaaagtcgacatggatacgcaggggtactgcagccacagaccgaatgaggtagccgacccgc

SEQ ID NO: 244027 - DNA, 1030 bp, Cannabis indica
gaatataactactcttgtatatatgttgtaattttgtagaaagagaacttatatattctttataaaagaatgtccgagatcattcgaattattaagatggtttaattggggattaatatttcaaagtagttcatcatttttctttttcaactaagttgttcatcatttataaggagttgggaaacactaactcatgggttgacttttttttatctacttttgaaaagtcaacttattaatgttaccaagaataacaccgagccaaattcatcgtaggtacttttttgttaggaagaaagaaaaaagaagaaaagggtagctagttgttagaacagtatcaatatgtattcatcatctcgtagatgcaaattaataattgctaataatgatatatggaataacaacaaagaaggtagatccaaaaataatggctaggaaaagacaccaattatagtccaatatcaaactataaatcaaatatttcaataattatgaatgtgatatgtattatgattatcgggaacaataagagtatttggggaactctttttcaaatttaatttattggaaaaattgatattctcacctcattttcaataaataaattataaaaaaaaaaaagtgtgatcgaccgtgcatgtgttttaattgtccgacacatgtataaatttaaagcatatgtttttttttagttttaaacatcaaattaatttaaatgtggggcgttttttacataagaaaaaaaaaattagtgtttgtcttttttttaataatatgtgagagcataatattatataagataaataaaggagagttttatttgcaccttataaaatgataaatatattttattattaaaaaatataaacttaaataatttttaaaagttactcttaatatttttttttaaaaaaaaaattcacattattttatgttaattttcaacacttattttaatttcattttcataattttttctaactcaagtatatattttttattttttctaaaaaaattcatatagtttttt

SEQ ID NO: 244028 - DNA, 1189 bp, Cannabis indica
aaaaaaaaatgtgaccaagagtcaaaagtctgctcggtcacttaggggcacctatacctatacaaagcattttgtaaagaacaaaaacaaaacgaacacaattgcatgatgattataaacaagggatgaaattcatttaataacaaaagcattcaaacccaggattaaaggctgtccggtcaaccagttgttcaaaaaatgaaaaatatattccaagtttaaataccgcttggccggtcatcttgccttaaaagaaggcctattggccaaacagacataaaaaatatagtaaaaagaaagcaattaaatagccagagtcctaggatccttgtacgggtcagctagatttgaaggggtcggaggatcattgtcatgagcagaaggagcctcaacattctaatcggtaggagaagtggaagtggccgcctcgagcccgtaggctgcctgagcagcgcagtatatgagaaacatgtgtttggaagcgcccaagtaatcatagtttgccttgggattggccttccaaaagtcataaagttttcgagaccaactgtctctaaggcattcaccttctccccgagcctcgccacctcggacttctggttctcaacctcagtcttgagttcctcttccttggccttcttctcatcctccagccagcggagaagagtccgaagaccctctctttcatcttggagactagtaacatcctgagacaaatcagcctcgagttgctcggttgatggcgcctcctgcagatccttggtcaactcagcaactctggtcttaactgctagaagtttcttattgacctcacctagctctatccgcacgaccccatgttgaacctgcacatcctcggcatccttcttggccaagcccacttccgttcgcattgtgttggaaatggcaaggtttttagcagtagctgacttagctcgggaatagtgtgacgataattataaacactacgaaagtatacgcagtcaagtagtagctcagagaattggattaactactactaaactatacctataattctatttggcaattcgaaaattattatgatttaaagtaattcacaaaacttaataacacaatttaaagttaagcaagatgagatgatagggaggagaatcctgttgttgtttacccaaatcgttaatgcctaattgctatcctattcttgaag

SEQ ID NO: 244029 - DNA, 1500 bp, Cannabis indica
atatgaatgatcattcacctttttgcatatttattgtaaaacccactgtgtatttccaaacatctttgaatctttttaattaatgcatcaaaaatagtattttgtaaaataaggcaaaatattggagcgttacaaaaattgagatgccaactattaaacctaggtgcaatgagattaatttaattccaaatgtaaaaattatattagctatcagaaaatttaaccaggcaatttggattagcattaaggacagttgggaaccacccataaaaatgttcaatcttacttcggggagcccctttaggagtatgggcaacttcccgagggactgtggctttaacataggcatcacaagcttccttgtaaaaactaatgaatggattcaaaaacttagttattttttattaaaaatatatttatatacaaaaaaaaagtatattaaaaatttaattttatggggacaagtttgagtatattttttttctctaaaattcttgatttatttaagtaaaaataatattatttttttatagtttaatttatatttttattgattttttaattattttttttattttttaagatacgggtttgtaaatataaataagcttgcactacaaaaaatcttacttttagtcattacaaaacttgtgactaaaagtaaaaaaattaagactaattataaattattattcttatgtcgtgactaaaaggtccgtggctaaaggtattagtcacaaaaattacaatttgttgtgactaaatgtatttttagtcacaatatttattgtgactaaaactaaattagtgataacttgtaactaaatactatgttttagtcacaagtaacattttttcgtgtctaaaggtcacatttagttacaaaaaaattacgttgtgactaaaaagttcactaaaagtaacagttttttgtaatgttgtttttctcttcacaaaatcttagtttgtttaaattatttaagatatgtatttataaataaaataaagtttaaaaatattttttagaaagaatttaaatttttaaagtaagtttaataatttttttaattaatttaatacttttattaggttttttttttaactttttcaaaattaatagaaaattataatttttaaatttaacttttttaataaaaatagataaaatttagtattagtcaaaatttaagggtaaaaatattaattattctttacaattatatcacaaacaacacaatatctttttttaataaaaatagacgaattttgtattagtcaaaatttaaaagtaaaaatattaattattctttacaattatatcacaaacaacataatatttccttcccttcttgtgggttgttgcaattacatcttcaaaatatctttatatattaaaagtgcctatctaacagcatttcttggtttaacagaatatagaatattctgttaaatttaacgattagatttgatctcccgttaacaaataaacccaataattaa

SEQ ID NO: 244030 - DNA, 2916 bp, Cannabis indica
tgaaccatgcaacataaaatgatatctaatctttattaattagtaaatctgattatattaaaatgggatttatttagggcacaaaatctaacacaaactggtgaaagtgtcaacagaagagaatgcctcagacatgctgaacaaggctcttccaattgaaaagttcagacattgttttaatcttctctggattaccaatgaatcacagtaatccttgatagtgtctgttgtctagtttgacattctttctttttgtgtttatgtttgtaatctataatggccttaacagaattccaaccaaggtagaaattgttagttgtggtcggtaattctgttgaatttctcttaacagcctgttagattagttagttacttattagacacttaagacaaagctataaataactttgtatcattcattgtaattagagaacacagtttaggcaccaaaactgtaaatattactactataatcaataaaagagcaagactgctcaagattatttttcattctttattcaagcatggtttgtactttgtagtgttcttggatcaaggtatttgattgtataggaatcgatcattccttacaattagtttactttagaggtgttcacggattggtttggtctgaattttcatatatttcaaaccaaaccattataatggttttttaaatattggaaatctaggccgataaatttttcaaatcaaactaaaccaaactattaaaaattgattggtttgattcgaaactactatttgagcaaaaaatttaattatttatttttttaagtaattgtataatttatcaatttttttaaaaaatatatatttaacataataaataatagtttataatatataaataataatattcctcaaaagtgaaaagtaggcaggttggttgaggtttagaattccaaacataaattagatgttaatataaatatacatgagatttataatttatatataaatatagataggagaaaataaaagaagaagattatcgagcaatgaaaacaaagtgagttagtaaccaatatagacttttttgcttaagaaactagctagaaagtggtgaaaatgaataattcatatatctatttgcttagtatttatatagaaaaaaatttggctgagacatttaaaaagactctatttgtagggcatttaatataaaatttcaattggtcaagtgcatggtaataatactacagtcattaacgtatagtatagaaactaagatttatatcttaattttctcttccctctcaaaatcaattgtctacaatttagatagatttgggaatataaatggtgatggagttttgatcaaggtagaccgaacacggtggatgtgttctcgattcctcctccgcctgaaacatcacctccaaccttttatcaccgtcaactccagtgaggtcttcgacatttcccccttttcaactgaagcaatgggtctcagttttggccctctgaaaattctgtttggtccccaaaaatagatgaatctcaatattttctaaaatcagagaagatgctcgaaagaattcttgaaaaacaccataaaaaatgggccaggttgacaaaatatcaacttgggcgcagggccagtcgacccaagtgtcaacctgggcgctgggccctattttcggcacctaaaaattgttgttcttctttgaaaggacatattttcctatttttgatgaagacaaagaagatgcaaaatttagatctcggatcagatacttggaaggcgcctagattgacaaattgtcaacttgggcgttggttgcttggggccccggggctccgggtgcttaaaaatgaactttctctaattcttattctgatacctcaaacatgtcagtgatatgtctagttgatgtcacaatacaagttttggtccttttgcactaagacggtctcgaaaactgaaactctagttaagaatgtcaaccgggtgaaaccctagttgcccaggttggcttccgaattgtaggtttgtgtaattttagttcccgagccttgaattaagttgttccatgtcttcatggtacagaatacggaaagatagtgggttgaattcaagtttattgaagcttaaatttccatctcggagttctcgaagtcaacctgggcgtagagctagggacctctcccagtttgacttgctatgactcgggactacttaactacgagatatcattttttttgccacgtgtcaaatattaatgtccacatcattaaaactactcttggtgtaaatagatataatacttactttgtattttgtttttcattatattatgctatttctaataaatacatatgaattaaatatatcttaatttaaaaaattaaaacaatatatatatatatataaaattttgcatgttaatgaaataataattaaaattattcatcatttattttaaaaaaaaaaagtataaatcaaaataaattaaaattaataaaaataaataaataagttaagaatggaaaaaaaatgaaaagatattaagaataaattttaaaaaataaattagtttaatatctttaagggtaaacaccggcataagtacccaaagtttgtttgtaagcagcataaaccaaatatttatttttagcgacataagtaccaaatatttataaaattgtatttttatctaattttgtcagtatatactttgttattctcttaaataaggcacatataagacctaaattcttgatcattgggtctctatagaaatatgtagtatcaattacttctaaatgttcttttaataaattcaaaacagggtttgtcctgacgaaattggaagaaaattatagttttacaaacattggatacttatgccgcctaaaataaatattagatttataccgcttacaaacataaaa

SEQ ID NO: 244031 - DNA, 1773 bp, Cannabis indica
tgatctaaacttccctaaaacaattacctcaaaagagctgcccccatctatggatctgacaataggatagataggaaaaacagcaatcacaaagaaccaaggaatttcaccaaacaattatgtttaattaaaattgatgctgatattttacacatgatccgtagagatttctaattaaaactgaaaatttcaagaattggatgaataaacaacaatgacttttgtatttctgatttcttattactattgctttgttaaataaatgagggaaacagtgaaaattttaatgagctctggactaaaaaaacaaattaaggggggaaaatccagatacagcaaaaagaaattaatttttttaaaaaagagaagagacgaggtcaaatgtatagggatgaactccgtttcattcatttaactagagttcccaaaaaattaattatggttgtgatgaacagtgaagtggtttttattcgcacgcttattgcagcaaattaatttccatacacttcgtggaagagaaattaggtggttattacatattcaaagttaacacatttatccatcggtgccatcatagaacttaaaagatgggacttaccacatgtggccatgtcaagatgttctcacccactatagtctccacacatggctcttcaaatgcacattgtttagccaatggcatcatggctgacactgaatcaattacaacagaaaaatgcgtgatgttgttttcgagtcataatatatataaaaacaaagtaacaatcaaaaagaaacattgtaatcatcaactttctcagaaaacttcactacaagtgctcaaggaaaaggtataagccttcttgtaattaaactctagatcaactttttgtaactgataacattttaagtcaagtttactacatgattaataaacattgaaggtattacagattgacgttctaatagtaacctccagtctagatggatcagttacaagaagaacagcacattatggagaacaagctctgtgatatataaacttacgccaagcgcaggttgctgttgtgctccggccaccagagcacccagttacatagtaccagacaatagaacagtcggacaaaaccagccaaacagccaagccacagagtataatattgaattagaggaaaacagacaacagtagtgatcccttgggatctctcagatgcagagaaaaattctcaattcctgcatacccactctattcccttcgtcatctatttatactatcctattctccactcataccccttttatttactatacaccttttaatacaagaagaatagcacatttagaacaagctctgtggtatataagctgagcattccaagcacaggctaccaagaaaagaaaatctatcccaaattgatcacacctaccagcaaagacacaaggatctttctgggtatcaaaaacaccaagcaattcttggaaaagtaattcaggagcacattcaatggaaaaaatgccgaaggtatgaggtcaaaagaattatttctattgataaatttcagatggtaaacatattgattaccactaggcttatattacgaaaaatgtacctcactatatgtgaaaacttatttcacaattatgtttacttaggtcctggaagaagcctgagaaagcttataagcaaataggaaacccgtttttgaaaagaactgaatggatagattactatctcaatgatgaagagaaaaataacaagacaatcctccctcccccaacacacaccaaccaaaa

SEQ ID NO: 244032 - DNA, 1009 bp, Cannabis indica
cttttacttttattttttattgtttgaaaatttaaggttttaatttcattgtagaagttaaagagatgataaaacgaagaatatgcaaagaatgaggaccttcaaaagattaaactgacatcatcactgctatttttgggacactgtaagtttgaaataacccacttgaatttggtcatgattttgattactgcctttttggaatcccatatctgatacaaatttcaattgactttcttagtgattattatttggctcttgagtaaatttttagtggcaagtggtccgagaaggcaagtgtttatagttttagaattcttgtcttttaagtagtatgtggaagaaagaacaattcttccaataaaagtccaaacccctgttgtgcagatggtaagctctttgtttcaaacataggttaaagacggtcataaataatgtgataaagaccattatgtaaaggtttggagccattatggaagcagtacacttggtgaattagttgatccaagcctaggaggtaattttcaagccgaggagcatcttggttgctccaaattgggctaattagtgtacaagcctctgttgagctacgaccatgcatttattgtggatctgcttaccgaaaatcatgagattccgtagccaacacaaccacctttttttgagctcaatctccacagaaattggccatggcatctcttctaactaatactattcttctaggcgtgaatctaacacgcagtcctctgggaacaagatgaaatgatcatttattttcttctttctaaatcactttgtgtattgcttccacattctatacatacaaggctccattggatcagtatttatataataaaaaagttatataatattaaatttttaacatacataactcataacattgatcaggtatataaacttaaataaatatcgataatttcttttatgatataatattgaattttttaacatacgtaactcatattttaaaatgatattaaaaaatctc

SEQ ID NO: 244033 - DNA, 880 bp, Cannabis indica
tgttataaatattaataattatgtggatgtccaaatcttttatttattaccatgaattgtaatcaacattcctcttttccttagtttccctttttcttagtttcttaatatctcactcttgtatttgtataaataggggttcaccccattggaataaacaactcagaaattctcattcactttctctttctctcttcatcttcttcttctttcttctcatctattttatattattttatattatttcataacactactagattattgatatttgatagaacaaacccattttctgctgatggagaaatgcatttatgaatttttgattgtggcaggacaacttaaatgatcaaaattaaaaataacgtaaaacaaccaatactaaacttttaccactaatttgcttttaacactaaaaatgttgttattattattattttattttagcactaacccacttcatacaatttatgtaaacattaaaaaaatttattatttaaatatgatattgacaatttatgtaaatatcattttttaaaaacattaaaaaaatataatctggtgcaagtgtcccactactttttagtagtagactctcacacaaatagtgtaaagatcttaattttaatatggaaaataagctgataattagagcttaattatgaaattagattattaattatgatttatgtttttcatattttatgcccgattacattggaacgcgatgtttggctgtcagaatcatattttttatgtatttagtattttagtaatagcagggcaagttagatagatattgaaaatgtcagtatattcaagattatagaaatgatcaaaacacccgtaagtggtaagtatgctttttggtgtgtgcaag

SEQ ID NO: 244034 - DNA, 1393 bp, Cannabis indica
ggcttcaccttctttcgctatacgtatagttcgaccgggctaacttttaatcctggacgtatgctatttatgcttaattgacgttttccactcgcacataattagccttctatattttgactttaaaaagttttaaatttgtttacttaagttattttgcgcttattcgatgttgtgcggtgtgggtgtcctctaagtgattgaacaaacttatggtctctttgtcacttgacaattaaccaagtacaatagacctttgcctgtgtattttcttgaaggacctatttgcactcattttgaactaaaaagaaattaactttaaaaagctaactattagcaagttatttaatttgacacaattcaaaaagaaattaaaacttctttaaatatttattggtcttacaaatgtgttattgttgtgcaaagtacatacattttttaataaaagcttacaaatctaaagcctgcttttaaaacatagatttgtgaaccatgcaggaaccactacttaagagttaagagtagtgtttttacaagttggttattggtagtactttttgaaatattttccattctagtatcttagtaggagaactaattcaatcttctcattgtactagccgagtttgtaagcacctttacttgtaatttctgacttggtatggtctttctaagttatgtccaaatactcctgctgcagaatctttggtgtttaggaatactcttcgaaatactaagtctcctacaaagaactttctttccctgacttgtttattcaagtatcaggtaactttttgctggtaggcatgcaactttaagttaacttaatctcttctttcttcaatttcatcaagggattttgccagcaaggtgtggttcatttcttggtcgtaagttatcctcctgtgggacaattgttccaattcgacagacataatttctccatagccataagctaaagtaaagggtgtttgccccgtagtaatcttcttagtggttttgtgtggccaaagtacctttgggagtaggtcaggcaggccaattgccctttgcctcttctagacattttttcatggtgtctttgaggatcctgttaacagcttctacttgcacatttgcccatgtgcaaccccagagaagcttttcacgatatagcgtttgctacagaagtcagtgaacatgttgctgtaaaactattccaaattgtcggatatgatcttctgagggagtccaaaatgacatatgatgtttttgacaacgaagtcgaagactttctttaaagttatagttgccaatagttcaacttgtgtccacttagtaaaataatcaaatgggactacaacatattgtactccttttcttttaggaaattatctgattaagtctatccccc

SEQ ID NO: 244035 - DNA, 557 bp, Cannabis indica
cggtgattatgcgagcttgggaccccaatgttaactttaaaaaggagaacattcactctgtaccaatttgggttcaattgaagaatttagatctgaagtattggggagaacaagtcttattcaagattattagtcaagtgggggaaccggttatggtggatgctttcactaaggccagggagaaattgacgtaccctcgaatactcatagaagtctcaatgcagcaagaatttccagaacaaatctggtttgaggatgagaatgatgaagagacttcagtccttgttccttatgaatggaaacctacgacttgtgcacattgcaaaggaataggtcatgagaccaaagattgcagtaacaaggaggggaagaaggctgaatgggtagttaaaaagcctactgctactgctcatgtgcgagaggaaggagcagatgaaaatggtttcatactagttaagaaagtggggaaagaaaagaaaaagactctagctactgaagtgcaagttattaattctttttctcctctgcatgagtcttttgaagaagccacagaacac

SEQ ID NO: 244036 - DNA, 769 bp, Cannabis indica
taaattattagaaattttttaaaaatttatagagatgatattgtaactataacgaacgttactttaaaaaatgtaaaaaaaattatttcggcatgtatttcaacaaaaattaattaattaagaaattgtaatacataagaaattaacagtagtactcctccatataatgttcatattgcctgccaaacaattaatctttttatctgatgaggatatatatagtaacattaattaaaataattgacaaattaaattttaggtgatttaaaaatttaattgttaaaaatagacgacactttaagttttttgaaataaaaataaaaaataccatcatgtttagggactatttttgctattttaataaagtctgttttatcatattttttttattaaaactgtgaagatctaagataaaatttaacaatattaaatacaattttggacttagtgacttgtaaaagttattaggccatctgttttattaaatgataattaaaactatacatttttcaaaatagtacaaaatggactttgagcttaatttttattaaatttgacataaatgtattatgacaaaattgtctacattttttgtatttgttaattagtgctaaaaactagtttaaggttagttatattaaaaaataaattgatataaattgagttcaaagtctattttgtactatttaaaaaaaaaaaatacatttgaattgtcatttaataagatatggagttcaatcagtaatatttataaaacacacaatttaaa

SEQ ID NO: 244037 - DNA, 1972 bp, Cannabis indica
cgtggtacgggattccattttcatggaatggcagccccggtttggcttgagttccgttatgaaaatcttccagatttttgccattatcgtttgagtcatattgtgaaccattgtcctgaattccttgaaaaatgcgactcttcttcggcccctcctttccttcactacgattagtctttaggcacaaagatctgcatcacatgaaaccccttctacattgcgaatacaaggactcggctgaggctgcatattgccaatccaatctcattggccccaacccctcactatcggctacaccagcctttagtcctttctaaaggccttttcaacgagcctacctcgacttatgggatacaacatttaggttagccacacactacttttgttggattctatatggctagctcctcccacaatgtacccattccccactcccatgatcttaaccaacctccacttccgacttccccatggtcttatcctcaagccgctcctactaccacaatggctgctccttcctatggggcacccacacctaccaatcctagccactccatgaccaccgcccctttaccttcacagtcagtgaccacggctgagcaactaaccatgccactatcaaaaattatatggaccacatctgctaccatcatggccacaactgtggcctcaacatgttgtccttgtttcccaagcttttttctactattttggcggaccttaactccactcaaccccttcgttttgctattggcgctacaagcaactcaactcctgctcaatctaccaaccgcaggggtaaaccaaagcgccctgactgccttgatgctgctgaatttcggaaaatgcttaaatgcacatgcaacttagcgaaatcccttgaggaaggttcaattgaagaggtgggtgacgctcagcgtacccgcctagagccatgaatatcatcagctggaatgctcgtggattagggagtaaacgagcattccgttctctctcccttttagtgaagcaatatcgtccaactattttgtatataatggagtctaaactccctgttggtgctttaaataaatttgctttgcatcttagatttcctaacggtctagaagtcccgcgtgttgggcttagtggtggtcttttgttgctctggacacatgatgtggatgtaactttgctttcttataatataagtcactttcactgttatattaaatttccaaattttactgttttacttttactgctttttacgatgcgccaagctcccaaaattaacctcactcctggaaattactcaatcgtcttggctctaaccctcgtttacccgcttggctcgtaatgggtgactttaatgattaccttactttatcggagaaaattaggggtgacatgtctcgtagtccgtctgctcaatttcaatctttcgttgatgactacgagcttcaccctcattgtcctttggttagtcccttcacttagttaaaccgaaaaaaacaaccatatcacaccgaagagcgtcttgactggtgcctttctaatgctgattgggatgcaaacttccctaaccctcgcctgcttcatggtgatttctttggctctgaccatcgccctttgatattaacccttcattttcaagctgaccagcctactccaactcctagatttatctttagctttggctttcagaaccagggttcgaggattgccttcgtaaggccttgtcgttgactaaccagcttcctagtcacaaccctttggtcggactcactgaaaaattggaaaattgttcttcatgttttaaacaatcgaggaaatcgttgggtcccccccttgctaatcaaataagagagcttcaatctcaacttaagttgattcaatatttcccccagcccaccaatgctcaactaaacagcagcagatacctcgaaagcgaattgaatcgacttttgcataaagaggaagagtattggca

SEQ ID NO: 244038 - DNA, 1125 bp, Cannabis indica
attccagattcagatcattccgccattgatgaacactctcaagctccaagatctaacctgtaatcacaacaacaagaaacaagatacgactatctctacagaaacaaccgaaataactgtctgaacgatttaatggataaccactttactaacagaaactgactatatatatccacaaaataagtccagctggcactaactaacacttaaatgagactctcgtaaacaaacgttagtgcagatataaaagactaaaaatccagatacgactagacattgaacagaacaaacactgtcacaaaataataacactaacacactggatcatacccatttaaatatcatatattgtaccattatacccagcactgctatcatactagtattagtagcatatgaatcacataaacaacatgtataatacacgtacacatatacatatatatattttatactgattttacctcatttccaaattcaagtatgttggtcaaccttaataaaaaattatgcgctgaatggaggcctttgggttcacacttcttgaaatcttgttgaaaaccccagagaattaacaaagtaacacttggtttctactagttattcttagggttcgaatagagagagaaaaagagacaaagttagttttctcttaatttttggataagtctaataaaaggattatctaatccttatttgttttgttcacacaaaaatcagattaagtgtaattaatctacaaatccccactaaatacaaaatatcaataaatggcaaaattctaattttaccccttacttcacacttaagcaaccaataggtctaggataaaatggtccaaaatcataacctcgcctaacctagatattccaaatatcaatatatgaatactctgctaaaacaaaagttctagagtaacccatgtgactttatcggtcattcgtcgcattttttatcgttaccgagcaaaaattataaaaatattaaatttcacatttagtataaataatacatatcactactacaatttggagttttagtgacgccccaggtgtgactgagtaaatgtgtcccgacacacttggcgtgtcactatatcataatcttattttttaaaaaaaaaaa

SEQ ID NO: 244039 - DNA, 2175 bp, Cannabis indica
aaaatataaaaaaaaatgtatatatattttagttagttacaacgtatatttgtaataaaagatgataattatagacatagatttggcatggtgtaatgattaagctagattacatatttattagaggtcaaatgatcaaatcctactaacattactttttccccttttaacaaaaaataaattacgcccccttactttaaatcttgagtccgccactactatgtgattaattttattttcattgaatgtcacactcagattataaatacattaaagggagaccttaaagatgtaaagttgaagacagtaggcaatgatctttggaaatttcctgaagaaatgaatggcaatttaagaatagaagatacagagcagagcatatcattgactttgagggatctcatattatttaaattaactgaatctgagcaatcctctcttggaagttgcttttggtgggatgaaaaagatgaaaatgaagtgagtagaaggagaatgacccctcaacttgaagataaaacaattgatgaggttctcaaattttccaactttacagaagctcagttcatgcactttattttcagagagtttgagattaactttgacaagaactttgatgaaaagaagatgaagattgaatcaagtgatctagcattgaaaatagttgattttaaaggttatttcatacctttaaatcttctttctgttttcaaaacattacttcacaaatatggagatattgctaaagggttcagtgattcaaaggcatacaagagcatatgctatttcttggtatgtaaagtgatgaaagagatgcatactactttcatcatagacatcaccaaagatcttcttcaacgttggtttgactacatcgtatttgcagaattttggggttactttgatgtggattttcttgaggcatctctaaagggagatcacaagagattttttctatctcaaactaactcaaatacttgaagttgacattccaacaatcataagggggaggataaaagaggtacagaagaagatagctgaggaacaaatgaagatagcaaaggaacaaaacaagatggtagtgtataaaaagttttgtgaatctacctcaaaaaaaagggtttatgaaggagggtttgaacaaagtgatgaaacataagtggaaggttgcaagcaaagtgggtaagttgcacttggattgattctcttatgctttgcatcttcctactctttattgatgtattgaattgtattgtgtgtgattgtgtgatgttgaataatttgtaatttatttaatgcaaatgaaaccctcaaaaaatcgttccactatatgaaaatttaattattaaatttatgtgtgaagacatgcatggtcttttcccataaggctacccgaagccaattgggaattttagacaccaaatatttcaattgaaccctgttttgaaaatatttatatgttgatacaaaaagtaggcattctaattatcaatgaacatacgcattaacacgactaaggtttttggattgctcatgtaaagaaagtaaggaagcttatttgtacgcctcgtctacatgagacaagagaccctctactcccctcgtgcaccttaggtcgcgagagaccccctcgcctcatgcaccttggtttatcaatgaacgtgatgcattaacacgattaaggttcttggatttctcatgttaagcaagtaaggaagcttacccgtacgcctagctagttcggacgagacgagaggctccgtactccccatgtgcaccttgggtcgtgagggaccccccttacctcatgcaccttggttcagggagggcctccctcccttcgtgcaccttggctcaatggggtcccccttgtctcgttcaccttagcccagtgagggcctctttgcctcgcaaaccatggcctctaataaggtctgccctccctcatctcatgcactgtgacccagcgaaggcctcctcgcctcgtactccacagcttagtaaaggcctcccttgcacgaggggtcccattatgcgaggaccccattgaccaaagaatctcgttcaatatgtaacaattatatcgcaaatgaatgaagaagagcctcatctccctctattagctcctcactaggggttccataatgaggtatgcaccctttgctgcataacgaa

SEQ ID NO: 244040 - DNA, 830 bp, Cannabis indica
atatttattgttcaaaatataaatttttgactctcctactgctctaggtgaaacaatgcccccgtcctaactcttagtgtcaactctccttcttgaagatctctccaagaattaagcatttgtaaatcaaaacaaatatggttagtggctctcgaatctactatcaagttatagccattatgttccactaaataagcctctgtgatcagtaaatcttatttacctttctctttgttctgcaactcctccatgtacttcttatagtttctcttcgagtgcccttctacattgcagtggaaacattatttttttgggcatagagttggcagttttcttgctttttcttttgttaatgcttttctgggttgcatttttatgaggtgaatattttctaacattcttctttctcttcttgctagaagaaggacaagtatgttactcggcaacatttgcttcaacaatttatttcttaaaatattcaaacctttgaagcttattaagaagctcagttaatccatatttcagtttattcttaatataatttctacaaaaatgatgaaaaggatcaagtaatattgaatgatgagagccacttaagtagcttcatctattttagtcccattagactgagcgtcatgaaaatatgttataatagatcttcttcttcttcttcttcttcttcttcttatctgattgctactagggagaaaattgttggtaggatagtgcaaaggtatcaacatcgactgggtgtgcccagccccacgccctcgcctcacaaccgtgaccttcagacagaaagagagagagaggaaagatatcagtgagag

SEQ ID NO: 244041 - DNA, 3478 bp, Cannabis indica
atattatacttttcactgtgtgagaatttataagtaaccttcgtacgatacttcacctcatcgatataacaacataatattagcatatatgctatatatattattaatttaaatataaaaagaatcataattattatcaaatccgattgttaattaaagccattatatttgtgtcgaaatcgcaatgcgaataagttctcgacaacgtggtgaatatatataaatatatttatatttatatatatatatatttatatatataaacttaatcacagagaaagtccttgacccttctggaatttggccttttggaaatgcccctttcgatcgggtaatgaactactgaggttttccaaattaacaatgaaaaaaagaaatcgataataaaaatttcaagttctttttttcttttttcatacggttttagaaaatttttaatttaaacttacagcttttaagtattttcactccaaaaatacatttgctttatatcaaatatataaattctacacaaaattatatatcttcataattgtatatgggtttatatgcggtcgaatactttttattttgtataatattgtccgttttaagtttaagtcttcacaattttattttgtataatattattcgttttaagtttaagtcttcacaattttattttcagacatttcttaaaagatctcatttcaataaaaatactattcatctttatatattttatacattcaaaatctttcacatttcttgcaaatattaaattttagttatacactcgacaatataaattacaataaacccatatacaagatatataattttgtataggatttatatgtttaatgtaaatcaaatgtatttttggagtgaatccaaattttcttatttttgttttcattatttccagcttaatatggcacatattaatatattccactaattttaataattttgtaaaatttataatatataataaatttaaatagtacagttttttatattagtgctttttttacatgtgcaattaattatttaatttaacatttttttaatttttgaatttttctgaactttgctctaactactatatacattgtagaagttaacaattgaaaagctacaaactagagaaaaagagaacaaagaatttataaagaagcttaactaaatgcatgtgagcttcaaaattttagttatatagcttaagatttaagatatactagtcgcttaactcaaaataaacagttaacaattaattaattaattattacaacaactaagctaattgttaactaacataactaaagttagttactttggttaacatccgctgaagcgaaaaagggaagaggccatttgaaagttttgatttgagataagtaataaatcagttagtagacaaagagttagctaaagtatctacaatctgattcaaggaggccggggacataatgaactgagagttgtttgtctaggatgtgatgttgaaaattaaagattaatcttgtgtgtttacttttgacatgaaaaataaggttggctgccaatgcatcaacactttaattgtcaacttacgaaataggaggatgaggaaacacaacttgaagctcggacaacagagaagaaatctacttgatctcaacagtagcatttgcaagggcatgaaacttacttttggtgcttgattgagcaataatttgttactttttggcagatcgagagactaagttgtcacctaaaaacgtgacatatccaccaatagagcgtctatcatccacaaaatttgcccaatcagcatcactatatccccacagaagcaaagctaaataaggtttgagccacaaatcgcttgacatggagccattgagataccttagcagtcgtttacaagattcctagtgaattgaggtaagagcatgaataaactgacctaatttatttattataaagctacatgggtgtataagtgtcaggctttgaatgttcttttatatataacatcttctaaaggttcaacatcatccagactcagcttaacaatagatcttttagggttggaataactcttacctccctccatacatggcttaactaataaatttgtaatgtacttctaacttaagtacataccactttgatctttgaaaattttcaccccaaaaatagtgaataggtcccatatctttgagagagaatgtgttgttcaggttagttatgagtttaaaaataagagcctaattagggccattaaccgaaatttcatcaacatacactgataagttcaccattgtagtgtcaacatatcatatatgaaaaataaagtatctaactttaaggaattcaaaccccggctgtaaagagtctgtataagcttgtcattccaagcccttggtgcctatttcaaactagacacagccttatgaagaagacacacatgtatagatttttgttcatcaacaaaacccctaaggttgttgcatataaagtatttattgtagtgagccattaaggaatgcattaacatccaattagcttactgtccaattgaaagtgacaattaatcaaatgaaaatttgaattgtagctggcttaacaactggactaaaggtgttctcataagcaatccctagagtttaaagatacccccttaggcacaaatatagatttaaacttgttttgataaccatcaggattgactttacaaatatggatttaaacttttttagagagtcatcaggctttactttcaccctatgcacccattcatttccaataacgtgcatgttgttatgaaattaaataagattccagatgtgttgtttcattagagcattaaactcttgttgcttggaggcatgccatttaggatcttaaagagcagagccttttaagagattggattcagagagcgaaagtggttcaggcaaagaatgtttggttgctaaatatgcctttggtttatgaattccactttaagatcttgtcctcataggatgaactttggatagaatgtcaacagttatttgtatttccacaagaaatgaagaatgctctattagtattggagaatatgatgtcattggaacaacaaatagaacatcacctattgatggaaggtggggatcagtttccagtatgtgcgtaatataattactgggaaatagctgggagaaatgaacaagcaccatgtataggtaaagagagagcagatatggtagaatactaattggggatagggtggcctagcagtggggcagatgagtctagtagtggtctcactacaagaaatttcacttttgccagcacatttttgtgctggcaaaagtttggtattgcgctggtaaaatagaatttacttctaatgtgttggcaaaagggattggcaaatcaacgttggtattagaaattttgccatcacaaaatgaaaagcgctggccaggaccggccctgggtaggagggctaggcgtgcgcctcggg

SEQ ID NO: 244042 - DNA, 1468 bp, Cannabis indica
gagacatattcgcctgaggtggatgcaataatatttagatatttggttagcctggctgtgagtgaaaaacttgatatgcgattaatggatgtagtcacatcttatttgtatagatcactatatagtgatatttacatgcaaatcactaaaggatttaagatgtctgatgcatataattcaagccatctagaaatgtgctcaattgaatgacaaagattattgtatggattaaaataatcaggacgcatgtggaacaatcgacttaataaatatttattaaagtaaggatatataaatgattctatttgcccatatgtttttatagaaagttcaagttctgagtttgttatcattgttgtttatgttgatgacttaagtattattggaactcttgagaaactttcagaaattgtgaaatatctaaagaaagagttcgaaatgaaagatctaggaaaaataaaattttgtcttagtttaaaaattgagcatttaaaaagtaaaatttcattcatcagtcaactcatactaaaaagattttgaaatagttttatatggataaatcacacccattgagaagcccaatggtagttagatcacttgatgtgaataaggaccctttccgacctaaagaagaacataaagagctccttggtcttgaagtaccgtatcttagtgcaataggagcattgatgtatcttactaactgtacaagagtataactttctctgttaatttgttagcaagatttagttcttatccaacatatagacattggaaagagattaagcacatatttcgctatctccagggcactattgatgaaggattgttctattctaatacttaagggtcgcaatttattggctacgcggatggaggatatttatctaatccacataaagctagatcttaaacaggttatctgttaacttatggtgacgctgctatatcttggcagttgagaaagcaaactctagtggatactttctcaaatcatgatgagatatttgcaattcacaaggcaaattgagaatgtgtatggttaagatcaatggcacaacatattcgaggatcatgtggattaacaaccaataaagaagtaccaacagttcactttgaagataatgttgcatgcatcgctcaactaaaaggagggtacatcaaaggagatagaactaaacacatttcaccaaaattcttctttacacacaatctttaagagaatggtgatatcaatgatcaacaaatttgatcaaatgaaaatcctacagacttatttgcagagtcattaacaacatcaacattcgagaagatagtttacaatattagaatgcgtcgattaaaagatttccaagaatgacaaaagaagggggagtaattttgtactgcactctttttcccttgatcgagttttgtcccactggattttctcagcgagatttttaatgagacaattattatggacatc

SEQ ID NO: 244043 - DNA, 1039 bp, Cannabis indica
aagtgtagtatagtttacttggtggaattttatttatgacagaaaaaacaattttaaaaaatgtcagtaaagattatttctgacaaagagcaatggagacaatatcactacagtggtgaactgaaacactgcctacatgttaaacaattcactaataatacttaactgtcttataaattatcttatacatatatgtgtttataaaaggtagatgcattaaatgatttttattggattgaatatggctgactgcagatacttgttctattactagcaccgacgggactttccggacactagttcctatcgaatattgacattaagaagaaatgtgttgaaattttggattccatgacttcaacattagcaagaagagaaaggaatgaaatcattagggatataattagtgtgacatttccttattcattgtttggtgtagtgtcgtaatatgttttcactgtgttttgtgatttctcaatgcctagcttaatacccttgatgagattctagaattggagttgaacatagcttttggtggtgaaatatcatttagtgagtttgaaatttatgaagcaaagagagctcagtcccaagaaaacaataaagattatcgtatctttatgatgcaacatatgcatcacctcagcaccaaatcttagaccgaaatggataaggtaaatccttgaagagttttcataatttttttgagtgactagtctcaatttatagtcatttttagttacattgacttttatttgctctgaatgttggtaggtagatagccacactgccagacttgacttggcatcacaaattgttggtgatgaaactaactaaaaaaaggaggaagtgacaaagaaattgaaagcatttcaccgagaggtaacagaaaccattgacaatcctaaggccaatcctgtcaaacttcaatatgtgaggaatcctagcaaatcaccgttggattgtaggtttaagaataaaaaataaaaagccaagaacatgatccctagtggtccagcaggtcgcactaggcaatctt

SEQ ID NO: 244044 - DNA, 1746 bp, Cannabis indica
aaaaaaaaaagaaaaagacaaaataaacatacaatagtgaatgattttgttggaggttaaaaaggactaccattatattagattggaaaagtgggtttattcaacttcaaatttattatagcaccattttttttagtaatttctcaaatttaaattatctatattcttaacaagaagaaaaaaagaaaaataaatatctatgtaaaaaaaccagtagttataatcgtaatttagtgttgatcatatatcttttcaatcataattggacaagagaatcatttttcagataatcaaaattcattacaaggagagaatttttgttggattatgacaattaagagaaagataaaaaaaggaagataatttgaagtataaagaaacaatgagtacagaatgtactaatccaattcaattataaaaaaaattagatatctaatttcaattagattgtagtggatgttataagttggtaactgattagatagattattagatgttaattttaaaatttaattaaaaactaatccaatctaattacatttaatatatattaaaaaattatttttatttattaatgtataataaaaaatatattttaattatacttttactttttttgtattgaatttataatacttgattgttttgtgtatttatttttataattttgttatattttattacttaacaatatttttgttttagttagtttagatttttaattgcattagactaataaggatgatcttgatggaatattaaacttaaatgaggagtgatattaaattttaggtattttttttttcatgttgttatgttaatattaagtatgtaattaaatattcaattaaaaaattaatctagtataattaataattagattgaatttgatcgaggatataattttataaattcaattactaattaaatttaatgggtatctatccctatcttaaattagcaataacaatagttattaaaggtgacaccctacttttattggcaagattattatcattttaaaggtataggatatatatgaatacaagaggtgacctctaatgatgtaacaccattagataaataaatgtttctttaagccattttcgtttgatgttataactgaaaaatgttattactcataatgacacttacaaattctctatgaacaaccttccacctatcttctataataaaagaaattatgtcaaaactaaaaaaaaaaaatttttttatatcctattaatggaaatgagatggcaatacttacattagtctcttaaaagtgttaggtgaatcgattgtatggttaactttgtcaaaatagccattaatgatttgtgagaagtaattaaaagtgggaatgtagatagccaaaatactagtcttaaggaaggcaattaaaaactttgaatattattatatataacattaaaatgaacataaatgtaatacggtccacttttctttacccattttcaatttggtaaagaagaaatcaactttttttctttcttttttcctttggcttttgtataattattctactctcaccaaataagcattatagagtttgaaaaaaaaatcaaagtctattaaaattctacaaactcaatcataatatttccaactaataataaattttaaaaacgtttagaaaaaaaaataaaataacaataataaatttaacaaatcttcctctacaataaagcacaaaacaataggattatcaaaaaaaaaaaaaaa

SEQ ID NO: 244045 - DNA, 1933 bp, Cannabis indica
tttttgctttcttttaattatcatacttaatcgctttatattttactcaatgttgttggctagaagagagatcaacaagtaacaatgacatcaatggacaacatcaagacctcaattttctattggtatttcttttttttttttctatattttataatatattttttgtaaattactaattattgttaatatcttttattttttcttaatctctcactcatcaaaatatttcacatatagatttattttatgtcaacaacttcaccaccatcaataattttgaattattcatgatttattcattaatctcgatttttcattggtatctttttctctttatattttataatatattttttggtagattactaattattgtcaatattctctgtactttactatttttttttattttagatatataatatatattctaaatttttctctcactcatcaaaatatttctcgataatttattcatgatttatttattagcataaattatttgatgtagaaaaaatcaaatttgcagcataaatacctaaataaattttcacgtgacaattcctgattagtctaagtcattaatttttttttttaaaaaaatagtttaaatatatcaataaaaaaataacacgtggataataacttaacatgtcaaaaattaaatttaggtatttatttgtaactggaagttaaacttaagtatttatgccgcaaattactctttttttaatgataggatctttgaaattcaggaaaagtaaaaaaaatactattagaataaagttgaggatgaagacagtggcataacatcataaaccctctacactaatttcttctttgtttctaattttttttttcaaatatatatatatatatatataaagctcaaagatgagtacactacttaataaaattattttttttttgataaattagtgagttgtattgcataaaacatatcatttgcacatcctaaaggcacctcaagtagaggccctaaaattcatctctatttacaagttggatattccagtattgctatgcataaattcttttacaatgattggatccattctttgtcctgcctgccaattttttgaggttgaaacattgttaatctcatcttcaacttctcctttatctctacatttactcgacctgttgctgcttgttctcctttccatatgacaacatttcttgttgtccacagatggtaaaccagagaggctgttgcagaagccaaaatttgcttcttacccctgcttattttcgattttccgatccacctgatgatgttaggcaagctctcacttctcacctttcatcccagccattccttaagtctgttgaggcattccactgcaaacttacactcaaaaaatagatgttgagctgtttctttcccatcctggtacaagcagcagcctttatctacctgtattcccattctactcagtctgtcttttgtcttcagcctaccatgcattgccaaccatagaataaaataatgtttaggtaagtttaaacgagcccaaacctccttactccagtatgatttggtcagtgagggagttagaattttatagcctgctgtaatagagaatttgtgtgctgcaaactctcttgtatctatcaaactcctcacttgatcctttagagccaccaacttcttccaataccaactagcatggatagaaggggtgtagctccaccaatcccctttcttcaaatacacactctgaatccacttcatccataaaagactccttgctatttgcgattgcctaaacatatttacacatagccgctttgttctattcttcaactcttttaatacctaaacccattgctgattttgaagtgcaaaccgtgtcccaattgattgctccagcccccgaaacattgactgccctttccaaagaaaagc

SEQ ID NO: 244046 - DNA, 1951 bp, Cannabis indica
ggtcgatgtttaaatgatgaaaaattatattagggtttatccctattatatatgagtcgctctaagcaaattgatcgtggtttgactttaaaaaatcgattaatcactattttagtttttcttcaaaaattttcccaatgtatacacatattatgggattattaagatctaaaataacctcttccagctcttccataggttttacctagtaatttttatctcggattctgggatctagatcttcttcttccttctcaccttcttttgttatgattaccatcaattgatgattggctttcttctgaagttctaatcgataacactcctgggccaataattggtcgcctcggacaactcatactcctgcttgtgttagaaaatttagggacaagtgtttgatcgagcttactgccactagtcgaattaatgttgggcgacccatcaataaattgtatactgagtgaagatcaataactaaaaattcctacatcagcgtcgtttataagggtggttctccaacagtcaatggaagtttgatgatgcctaggctggcaatgctatcacctgtaaatccacataggctcaccatgcaaggcttcaacatcgcatcctctaagcccattttttcaatgtttccttgtaaaggatattgactaaactcccatcgtccaccaataccgttttcaccctcttattggcgagctggactattacgacgaggggatcaacatgtgttttgagtcttcctctgagaagataatcggagattcatttgacttttccttttttagtggttctagagcaaacgacgattatcccatttttatttcattgatatacctgttttgggcattattgctatttccagcgaggtgtggccctcccaaaatgacaaggatatcctcaccctcaatcagaggaggttgcactctttggttatttgggttattagggttgtttggctggttcagctcattttcttgatgtcttacatactgtctgaaatatcctcgcgagattagattttctatctcgtcttgcagttgtcgacattcttcagtagtattccatatatctttgtgaaatcaataatatttcgtggaatcacacttatatctcgcatacctcatgggctcaggcttgtgaaatgcaaccctattttgatttgtgagaaatatgttctcacgagtttcattcaactcggtgtacactaaataaattgaaacttatttgtcgtgctttatatgtttgttttaattcttagatgattccttcgaatcatcctttcttttcatgtttgagcaactaggattgtctactttagtcgagactgtgcttgctattgccgtattcgtgttggatttacttctcgagccagttttcaaaagcttcatcttgtttcttgcttcttctttgagcataaatacttgcgctctttcattaaattcattaatgctccttactgggtgaccctgtgatcatcccacaattttcctctacccgtggacatgttagttgtgattcccgcgtgaagtgcagtgagttgaatactgtcattcaggtttctgacctttgtagtggcggtgctaaaatggcttaaataagccttaagcgactcgactggttactgtattatgttggttatggatgatgcttaaggtcgtctgtctctagcggcttgaaattgctttttaaagtccctagatagctattcccaagacataatagaatgatgagtaaatttgtcgaatcaactgctcacaagtcctcatagagaagtctagaataaaatgcaatgcaaattattcgtggcatgactggctcgcataatagtgttaaagttattaatgtgagcgactaggtctgtggtcccatcatactgcgaaacatgtgggtttttaaaatccctgggggaaaatctagaatttaggatatctggatggaagtggct

SEQ ID NO: 244047 - DNA, 3515 bp, Cannabis indica
aatcacgtaatacgcctatgttagttagggtgttacaactatcaacaacaatcttactccccgcgcttatatggcagaacacgaatgtgagtatgatcctcaagcctttgctacttcttttcttcctgactttggagacgactctggttggtttgtggataccggtgccacaaatcatgtgacaaatgggcttgaaaatcttgactccgctgttgcttatcccggttcagaaggccttgctgttggagacggcaagaagcttcttatctctaacattggcttagctactttacccactagcaaaaatactcatcttaatctaaagtctgttctccatgttcctgaaattactaaaaatttggttagtgtctctcagctcactaacgataatcttgtgtttcttgaatttcacaaaacatgttgctttgtcaaggacaagcaaacaggaatggtgttgctcaaggggactcttaaagatggattatatgtgctagaagaatgttcaaaagcatcaaaagaagatggcttgcatggcttaaagaaaagtgtgtccaatggtgatagacctacggctatgaattgtacctcctctgtccaatttcccaatgtaatgaatgaaaattcatgtacttcaatacatattaataaagatgaatttactcatatgtctctttctacacctactgccttacacactagtgtcaaaccagatgtcaatatttggcaccataggctaggacacccatcaactcccatattacacaaaatcttatctcaagttcctcacagtggcacacctcaacacctacagttttgtcatgcctgccaacttggcaaaagccataagcaaccattttctagcaccaactcaaaagcctcacaaccccttgagcttatacacaccgatttgtggggtccttcacacataaaatccaaagatgggtacttttactatgtccacttttttgatgactatagccgttacacatggattatcctttgactcaaaagtcccaagcatttgacatgttcatcaaattcaaggccatggtagaaaaacaatttaatctacctatcaagaaagttcaagccgattggggtggggagtataggccattttcaaagtttcttactgatcaaggcattcactttcagcatccctgtcccaaaactagtgaacaaaatggccgtgctgagcgcaaacatcgtcatattacagagatgggactcactctacttgctcattctggcctagatttctcttattggtgacatgcctttcacacagctgtgtttctcataaacaggttaccaactcctgtcctcaactattcaagtcctacaattgctctccttggtcaagtacccgattataacatcctcaagccatttggttgtgcgtgttatcctcatcttagaccatataatagacacaaagtagagtttcggacaaaacaatgtatttttcttgggtactcttcatctcacaaaggatatttgtgtgaaagtcttgaaggtagactctttattgcaagacatgttgtctttaatgagcacttgttccctgctacatcaaagcaccagtcaacaaaggtacactcatctctccctacttttgtcccatctgctacttttgacacttctcaacatgtaccccactgtactacacatgctcccattatcccacctaatcccaccattcaagataatatatcacgtgtccctgtgcatcctactccaccacctacttccctcaacatggatagacatgtcactatcacacatacacctaccattacccaatctcccatacacaatattgcaccagaccacgtgatcctagctgtccccacaccatacaatcccatatcacaccctcaaaaccatgtctctcatccacctactctcaccgtacccaacacagtcccacctatatcatccaacacatcacctcctcacccaaacagtgcccatctccctcaaacaactgtcaatcgtactcataacatggtcacaaggtctcaaaataatatattcaaaccaaagtcctacatggctactaaacatccattgccagaatcactcctcccctctgaacctcggtcacttaaggctaccttagctgatccaaagtggcataatgcaatggatactgagatgagtgctattaagaaagcaaaaacatggacacttgttccatatgactcttcaatgaatgtggttgggtgtaaatgggtacacagggtcaagcttaacaaggatggctctctcaatagatacaaatcaaggttggtggccaagggatatttacaagaagctgggattgactttgaagaaacatatagtcccgtggttaaaccaaaaacggttcgtacagtcttgtctttggctgttactcacaactggaatgtgtctcagcttgatgtcacaaatgcttttcttaatggacctttgaatgaaactgtatacatgcgccaacctcctggctttgaagattctactcacccaactcatgtttgcaaattgcaaaaagcaatatacggtctcaaacaagctccacgggcttggaatgacacattgagacaaactttggtgtcttggggatttcaaggatctcgtgcagacagttccttattcatatatggcacaggtacaactcttgtcattcttcttgtatatgtagatgacatactcatcactggcccaaactcagcattaatgtccaagctcatttcagacttgaacaaatccttttcactcaaagacttgggacaagtgcattatttcttgtgagtagaaatatatagagacaatactggaatgtatttgtctcaaactaaatatgtcactgatctacttgtgaagctacatatggaaggtgccaagtctagtccaaatcccacaagttccagcgtgaagttgtctctaactcatggtgaaccatttcaagacatcactctatatagaagcaccctcggtgctctccaatatttgtctctcactcgtcctgatgtggcgttcattacaaataaactcagccaattccttcatgcacccactaccgttcactgggaagcctgtaaaaagctgctgagatacttaaaagggactgttaaacatggcttatggttaagaccgtcttcttctccaactcttcaagcctactccgatgccgactgggctagttgcctcgatgatcgtcgatctactggtggttatttggtattccttggagagaatctaatcagctggtccgcgaaaaagcaacatgttgtcgctcgttccagcaacgaaagtgagttccgagctttggccaatgcagctgctgaactcaaatggatccgttcactgctacacgaacttcaagtccctcttgtgcacactcctgtcatttgggtggataatcaaagcgctactgctttagctgcaaacccagtttttcatgcaaggtctaaacaaattgagcttgatcttcattttgtccgagaccaaattttagacaaccaagtttctgt

SEQ ID NO: 244048 - DNA, 1752 bp, Cannabis indica
ccatttagagtactcgaaatattacctgtgataataatatcatctacgtatattaacaccagtacgatttctttggcagttttgagaaagaacagagacgagtccgcttttgaatgcttgaatccccaactcagtaatgtgtttttcaattggtcaaaccatgctcttggagcttgtttaagtccatacaaagacttgttgagtttgcaaacataatgctcttttcctttttccacgaagccttgtggttgtgtcatatagacatcttcttcaagaatgccatttagaaaggcattgttgatgtcaagttgtttgattttccaacctcttgaaacagcaattgtcaatattattctgatggttgatgctttaataactggactgaaagtttctttgtagtcaactccgggtctttgatgaaagcctttggcgacaagcctggctttgcatctttgatgtgaaccatcagagttaaatttgtgtctgtagacccacttgttcccaataagattgtactcgtctgaaggtagtaccagcacccaagttttcttggcttttaatgctgctatttcagtgcccattgcattgttccacacaggactttgtaaggcttcttcgacacttgctggttcagaaaaataggattgagacttgactgcttgactgaggtatgtcttgggtttgaatataccagctttccccctggtgatcatgctgtgagttgggactaaaggagctgtaacagggactgcaggaacttgagagacatcagttgcagcagcatgatcaacaagagtatcaaaattattaaaaggcaaaggagagtcactaaaataaggactgtcatgagtgtcttgggcatctgctgaggttgttgttggaggatgagtgatgggagtacatggtgaatcagaaccagtaggcgacagagaagatgctgctccaggaggtgtgccatcagatggttgagtggaatgtggttcaggtgtggaaagggatggagttggtaacatcgaccaagttgggctgtgaatgatgataggagtttctggttggtagttatttaaaaagccttgctggaagggaaattcgaattcattaaaaactcatttctcgaaatgtagattctaccagttgggcttaagcatttgtaacccttgtgtacattgctaaagcctagattaacacacttgactgagtggaattgaaatttatgggtgtggtaaggtctgaggcatgggaaacacgcggcaccaaaagttttgatgaagttgtagtcaggtttctgaccaaaaaggatttcatgaggagatttgagagagaggactggtgtaggcagtctgtttattaaataaacagcagtgtgaaaagcatcacaccaaaacttaaggggcatgctagcttgtacaagaagagtaagtcccatttcgactatgtgtcgatgttttcgctcagctctaccattttgagctgaggtatggggacaaggatgagtaaactcaatgccatgagcttgaacaagatcagtgaaagagcgaaattctcctccccaatctgttcgtaaacattttatttttctttcaaatttggtttcggccaaggctttgaattttaagaaggcatcaagtgcatcattcttgaatttcagaggatatatccatgtatatcaactatgatcgtcaacaaaatgaatatagtatctataattgatgtttgatgcaattggtgctggtccccacagatcggtatgca

SEQ ID NO: 244049 - DNA, 1103 bp, Cannabis indica
tatcaaattagttgacattaaaactttcaataaggttaattgctcaactctaattctcatgtctagctccacttgggtatcataagctttgtaattcaaaggacaacataataggaagatgacagttcaaatgccaccacttcttttccatctcttttttcttttcttttttggtgagatttcttattacattacataacatcagcttcatttcacattaccatagctgtacactaggacataagttgcagtaggaattcacataccacttcagaacagaacagaaagttaaaaagaaaaaaaaagttttatcttttaacagaaaaggaatataggaacttgatatggcactaatgattatcacattattcataaaacttgggaaaattaattttgacaggaagactgggatgatagcactgtcagcagcaacatttccaaaatgaggattcgaaacagattagaggcaaccacaaggcgtgagagagcgctagcttatgctttttcacaacaggtacactaaagtttctcttttgaatcaattactaagagagcaatttcatcaactttcacattatttattgtctttgctggatgtgacatgaaagtgtaaacttaattctccttgtgcatagctaagaatctgctctaagaagaaagagatgcaatcaaatggcaaagaaccccacatgggttggagctggttagagcgatggatggcaacccgcctaccggaaagctcctcagttgaaagccgtgtgaataaaccagtggtggattcaatgcaaagaaaccagatgttcaaaaccgacaatagatttttcgatttagcaggagaagagaaagagagctgtggttcaaatgaagtgtctctctcctttgatactctctcagtaaaatcagcaaatgacagagatggtttcaagccagctagaaacagaaagacaacgagaactgtttcaaggcgcaaaaccgtgccgagctatcagtgccaaaaagattataccaaggtaagaattttctacagcatttcaattgcataccttaccatactcgttacaaaatttaggggaaatttctgtggtgtcagaaaagtttaccag

SEQ ID NO: 244050 - DNA, 1388 bp, Cannabis indica
aaaaattgaaaaaaaaaaatgattgaagcagccacgttaaaggcacctagttgaccctgatattgtatataagcaattaattattattatatggtgtagacaatgataggtggagaataccatttaatcttctctcgcttgactctaattttctccgtgactccactttacggctctattttgaaggttgttgattagtgttactgtatagatctaaaacatacttttttactcttaaaatctagtttagaaggtgaaacatttcattttataacatcaaattgaggatatattgttaaaatataactcattttataaaaaatgaatatctattttaatagtgtcctaaaatttgttttaaatttgcctacagcaaaaattatgtcaaatttaacccactatgatacactttatatttatatcttttttattattatatttaatattaggaattttatagtaataaaattattattattttatatttttaataaaatattaaaaaagcattaattaaatatttaaattcatatgtactgaaacataacgcaaatatatttatttattttttttgaaaattataaaattatttttattaccaaatataacataacttttatatttggtttagcataattgaacaacaaaaaattcataattaatttcaattactttactatttggtttagcatatgtgacatgatggtctaataaaataagctacatctttaacgactttatttgctcccctttaacaaaaaaaaaaaaaaaaaaaagacttaattagggggttggaattcttttcgtaatttcactaaattttgttcaaatcttattattcaacaattaattattttttcttaccaaaaaaaaaaattaattattttttgcctactgatcataatttaaatatgaaaaggaattgagctatttagatataacatttgataattgtatctgtataagttacaaaatcttcttataatgagttataatagcgtatctcttaagtataatttctaagtacataactaataagaatgacaatattatattatgataaggtatttatggttattggattggatttgataatttatggttattatttatattatattaaattaaatatatataaatattaatattatttgttttaggttaattgaacttatattaattttagattaatttacatggatataaatattaattaaaatattatttataataatattattattttattattatctttaatattggaagtatgtttaattttaatatttttttttagaaatcaattttaatatttttaaaatttatatttattttctttaaatttttaaaactttaaatattatattttgtgaaaaataaaaattaat

SEQ ID NO: 244051 - DNA, 2439 bp, Cannabis indica
tatctctatcttttcttcttgtttggcactagcaaccctattgtacacttccaaattgacatggcattctcttgtaaccaccactttgtaaaagcagcatgagacattatgttggcaattttaattcctactgagctcatagatctaacttgagcgagcaagccatcaaacacaactcgataggatctcaagaattgtacctcgcttggtaaagccaactcgtaattgtgcatcgtgctgaacactttgcatttctaagtgttacatgatcttaagagtgaaattcgcaatgctgtctgacatccagttctagttagatcatgatcaggtcattttttctttctatgtctggtgatgtgaatttttttcaaaccctaggaacaacaaaccaacgtatgcattacaatgaccccatgagcacgccaaatatcatctttttttgtgctgaaacctatccctttcacgtacatctcatagaaggataataattttttccagttcctcaagactcttacctaacacgtcagatattttcaatctcattcactggttttttgatgtttagctaaactgttatgctttcccattgataagtttctttatccattgattcctcattcatgttttgtgttagagactcctcatatattttgtctgttaacaatttaaataacacaaattattctagaatgtatgttagataataaatattaaaatttggaagtagtaccttctttgaaaaaaatacattatctgttttatgttgaatacattataattaaaagtctagtaacattacaacgctagtgatcatgatattaataatgcattacaaacaaaattgaaaaataagagattaaaaatggtattagaaaaagataaataaaaggatgtcataagataaataaaagataaaaaaatttaaaatataaatattttaagtattaaaacactcaaagatcaagaaatatccaaatatgtctttcatatgtaatgatgcaatcaaactaatatgcaactgaagaagactactttttctagagccactttggacacttatgagaatacatgtggaaacatcaattattttaaaaaaaatgagagaagatacattcttagatattgtgccccacaccattcaataaaaaattaaaaatacttcaaaactaccatcaatttccaataaaaaatacatattttggacagtaaatgtgtacaaatgagagtggtattgtatggtccactttactcagagcaatttcaatagtaaaaattacgctaaaaatatcttctttattattatcctattttagtaatataataatattatttaattatttatttttgataaactcgttatttaattattaaaaagtacaaaagttattgaaatacatcttctttgtgttcatcctactacatcatgttccactctctcacgatccaattttgcttgagtgtttggcgcaacctattaacccatacccagtgcgtcaaatataagaacactcatcccacgatgaccttgtagaccacttaatgaaactcaattattatctctcatattattattcttttcttttttatattattatcaatgagagattaatttaaatttaaatatttattttcaattagtgattcccaaaaagatagactaatagtataatattttcttttgaaaaggggtaccgagaccctaaatctaacttgattagtgactttgtgtcccagaaccactaactacctataatgatagtgtcactagtgtgtttgtacattggcactacaaacgagaagactaattcaatagcaattagtgatttcattatgaaaagggttactgagatgcttaatctaacttaattagcaactttgtgtccctgaactactaactacctacaatgatagtgtcactagtgtatttgtacatcgacaccactaacgagaagactaattcgatagcgattagtgattttgttatgaaaattggtaccgagaccttaaatctaacttgattagcgactctgtgtcccgaaactactaactacactacaatgatagtgtcactattaagttagtacattggcactactaaagagaagattaactatatcacaattagtgattttgttatgagaaagggtatcgagaccttaaatctaacttgattagcgactttgtgtcccgaaactactacaatgatagtgtcactagtgtgtttgtacattggcaccactaacaagaagactaattcgatagtgattagagattttgttatgaaaaggggtaccaagaccctaaatctaacttgattagcgactttgtgtaccaggaccactaactacactacaatgatagagtcactagtgtgtttgtacattggcaacactaacgagaagactaattcgatagcgattaatgatttcgtgatgaaaa

SEQ ID NO: 244052 - DNA, 714 bp, Cannabis indica
acaaatgagatatgagatactgtgatgataataatttttatatgatgagtattctgtaaaatttatcaatggtctttttagatctcttgtgtgaggattctataattatcttttttaattttctatagcgtttgaactttgaagatatctctttatttatttatttatttttgataaaaaaaattgtatagtgaatttttctaaaatattcatttattttttttgagttaaaaaaacaaacaatttagtgtaatacttactcctattatgaaatgaaaaattacattaaaaaaatatcaaaatttaaaatttgatatagttttacaataggtgtttgatatttaataatggttagaattatatgtgaatatttttcttaattaatttatcaaatcaataataaaaaaactcaataaatttattttttttttttaaaaaaaaaatgagagatttaaaaagagaatagattgaatgggacatttggagtaattttagagtttgattaataaattactggttgtacataaatttatataatttataagtcactacaaaaaatcttacttttagtcacagtaaatttgtgactaaaagtgaaaaagttgtgactaaccataaattatcattgcaacgttgtgactaaaaagtccgtggctaaaagtattagtcacaaaaatcacaatttgttgtgactaaatgtgttcttagtcacaa

SEQ ID NO: 244053 - DNA, 878 bp, Cannabis indica
tcacatggagagtatcttgaagtgacagggacaaaatcaatataatgtttaaaaaaagaggtaaaaatgatagactttaaaaaagagggtaaaaataaaagaggacaatataaaagggtataagtgtaatttcctaaaaaaaaattggctaatttctcgcacagtataaatgtgagaataaaaattaagtagaaaagttttgccggagcaattaagtttgttaggaaatttttttacattaattaaacacttactttaatattttatttattttaaaacatgcgagcctaacttttccaacaaaaattgaagctgaataaaatccaaaccaatccttttttcccacttttttgttcttcctctattccacttcgtcttcaccaccataactacccaaatccgccatcaccacccacctccaccacctccaccattcccaatcagcttcaccaccatcctcactatctccaccactaccattctctctctctctctctctctctctctcttaattttttttttatccccaatcatctccaccactgccctccaccattactgcagccgtcgaaatcagagtcaccatcctcatctctaatttaaggtaactttatatttaattttaatgttatatatatttatttttaattattttatttatacgggtatgaatgtatctgcatttctatatatatgtgtttgtatgtatgtatatgtgtatgtgtgtatatattggtctgtacgtatatgtatatgtctgtgtatatatagtggtatgcatgtatatgtatgtttttgtgtatgtggatatatatgtatatgtatgtgtgtatatatataggtatgtatgtagatatatgtttacagttgcgacaaca

SEQ ID NO: 244054 - DNA, 698 bp, Cannabis indica
ttatagaagatactaggatattgtgggtggtgacacgaaaagtttgtccaagattttttgccgacgggcaaatttgtgagggtgatcaatcggacgtttattattttgattcctaagaagacaggagctcgaagattttgattgagtttcgactcgattcagtctatgcaatatggcctataaaattatctcaaaaatcatagctacaagattgagtaatattcttacaagattaatttcccccctaccagtcagacttttgttcctaggaggtggattgcagagaattcaatcttagcccaagagattatgtttgatttcaggaagaagcgaggtaaacaggggtacgttggtataaaatgtgatatggcaaaggcttatgaccgattagaatggagttttcgtgatcaggtgtgatggctcacagattcaatgagaaattcagagagttaatcaggtggtatgtggcaactgtccgatattccattcttcttaatggtggacctctgaaggacttctctccgagcataggattaagacagggagatcccctcttgccttacctctttattctttgctcagatattttgtctcgcttgatattgtgctcggaatgggagggctctattcagctttatgttgcttcgcataatggccttgaaatctcacatcttttgtatgctgatgatactatgatt

SEQ ID NO: 244055 - DNA, 1017 bp, Cannabis indica
tgcggacaccatgtcgaagaaaccaggagacaagagcacattggattccaccgtcgacgatgaaattgcggcgttgaagacggaagtgttgggaattacaaacgctatcaaggaatcgaacaccgaatcgatgctcgagatggggcacccaatgcaaatgatgcagcaacagttccagcgaatttttggaagctcaagatcacgcaagaatggtctaagaaccagtgatggacaatcacgaattcttcaagaaccacctaaaacaaacaccaattctagccatcaagatacctctgctgcgaagattctagacaccagaatggggataaaaagtagtccacaacggatagaacaaagatcaaaggttgtgatagagccggtgataagagaaatccgaggaagcagagtgcttgaggggcaaggaattgatcgaggacaatcaggccacaattacaggcacgagcagcgattaaagaaactaaaaataccaaattttgacgggaacaatccaaatggatgcgtcatgcaagctgaaagatttttcatgtgccataattatgatgaagatgaggcagcttttatttctctatcaggagttgccttgctctggtatcaatatgagaataagaagagaacaattctgagttgggaagaactgaagaggttggtgttgaagcattttagggacacccaaataagatccttttatgactagtttcttttagtcaaacaggaaggatcagtgggggaatttaagaagagtttcattcgactcttggctccattggacaacatcccattgaaattcaattgagtaccttctttaatggcttatggccaataataaaggcagaattaagggtccaacgtccccgaaacgtggatgaggtaatggaaattgctcaagacattgaagagaaattgcgaagtacttcttttttgcgccctaaaacagggaacattagacgcacactgatcaggggtctagtcccagtactacttctccaattcaagtca

SEQ ID NO: 244056 - DNA, 524 bp, Cannabis indica
cttcttcttcttcttctagcatcaccaccatcaacctcaacaaaaccacaactgcccaccaccaccacctcaaattcaaaatgtgtatatatattgatgaacaaaaaccctaaattgtataattagcatttgtgtgaaaatgcgaaaatgtactagtaagtagcttagccataatccactataatagagaatacattacatattgtagctcaattttcatatcttcaaattccctccaatatttgtcacccacacggagggacacatcccccaataaaaataaaattataataattaaaaagagagagagagaacgaaaatgagcttggggaaacttacttcttgctcatagtatcagatgaagcgtccattgataaatcggagacagattttgttggaaatattttatgtaacgcccgaatgctaaggcacgctacagtgttttttcaattatagtgcaatctttgctaatcaaagaattttctcaaaaaacgtgtcaaattaaaacttttgcattaaatatt

SEQ ID NO: 244057 - DNA, 821 bp, Cannabis indica
gcatttatttttcttttgtgatttatctcggagagttatagagaagattttttattagttgggttccagaatttggcctttagattacaaaggttggaatattttggatggcctcaaatatgccaaggggttaattaattcactttatgtgggttacagttttggcaacaataatttacaacatctggctgaataagaatcactgtttttttttatgactattctagttccatagctcacgagtcacatagttacaaatattaaaaggattgttttgtacagatttgcaaattgttactaataggaagattactagagagattatttaagaaagttataatgtaattatatattaatagtttttttttgttgggtgtttgagctgcctggtagtggttcggtttgtaatagttccctattttgtttgtctataatgaagttttttttcttcttcttaataataataataataataataatagtagtatctggtaatatataagatacaaatttacaataatataataagattaaaactactatgaaatacttatagtgcatcacatgaaggcataaattacatagttaactttacaaaaaaatttactctgtgctaaaagctgtacaaaattagtacaatattaaaaattagtgcacatatatcatatctaaatattgctgcacaaatttttatatctcccatgtagtagagaatagagatgatggtcttatataataaaccaagtcatagagactttaaagtgcttgaaaattatacaattttataataattaatataatgttaaaacctaattaatccc

SEQ ID NO: 244058 - DNA, 833 bp, Cannabis indica
tgcccatactgaaattccatatcgtccatgactctactcgacgaagccatctaaaccaaaaaaacaaaagaaccgagaacaataatcaacacacaagaatcgtctcaacacgcaacccaagcagaacccgttgtaagaaccagtcaacaatgcaatcgacactccgcctcaatcccagagacgcagaccgttgctgaacccacaagaaccggcgatgaaggaggagacactctcgacgcaacccagcaaccccagaaacaatctagactcttctggaaacctaggaatatcaacaatggaaccaatacctttgactccctgctccaccgatgaaaacgcagcaaatagaaccgagaacccaatcgcaagaaccagtcacaggtgcagagagaaccaagaacccgtgagaaaaacgatccaaaacgcagcagtgaaacactgggaacctctgaaaataagaaggaagaagctacacatacgacaacaacctccaccagtgaaagcgcagtgatcggtacgtgaaatctcaaacgcaagaagccgtcgcaagaagccgtcgaacgaaaccagacgtacgaatttgagagaaaaccctcacacatgccagctggcaagacctattttgagttatttgctctttaggaggtgctgtttttctcaacaaaaaaaaaaagataagattttttatttttttttaaattacttagttgaagaaaacaattattattgactctgaagtcaatatatattttttaagaagtatttttaccaactaaaacttaggaaaggagaaaaggaagaagctgtgtcatgtacgcgcagataatagagcg

SEQ ID NO: 244059 - DNA, 2995 bp, Cannabis indica
taactaacttggttatcatcccccctccaacgaaaaggggtagaaaccactttaagtttggacttcagatatttaaaccgatctttaggaagacttttcgtaaaaatatcagctatctgatcaatagtaggaacatatcgcacttcaagttctttgttgagcaattgatcacggacaaaatgttggtcaatctctatgtgtttgcatcgggcatgaaaaatcgggtttgcagctagagaggctgctccttgattatcaacccaaataatgggaatgtcagctagtgcaacttgcatttcagtgaacaaggagcgaagccatttgatctcagcagcagtgttagccaacgcacgaaattccgactctgtagatgatctggccacaacgtgctgctttttagcagaccaagaaatgaggttgggacctatgaacacggcataacctccagtagattttctatcatcaatacagctcgcccaatccgcatcggagtatgcaacaagagacatacgagaaactggtctaagtaaaataccatcagaaatggtaccctttaagtaacgcaataggcgtttgcaagcctcccagtggactgtagttggggcatggataaactgtgacaatttgttgatgatgtatgcaacatcaggtcgtgtgagcatcaaatattgaagggatcccagagtacttcgatacagagagacatcatcaaatggagatccttcactgagagacagtttgtgagctgtagaagtgggactagcacagcttttggctccctcaagatgaactttggtaagcaaatcagtgatatatttggtttgagacaaataaagaccttcactattcctgtgaacttcaacacctaaaaaatagtgcaaaggccccaagtctttgagagaaaaagcagagttgagatcgactattagcttttgaaccagttgggaatttggacctgtgacaagaatgtcatcgacatacaccaataaaatgatcaaggtagaaccagttccatgaataaacagtgaagtatcagcccttgatgcagtaaaaccccaattgaaaagtgtagttttgagtttatcattccacgcccgaggagcctgctttaggccatacaatgctttgtaaagtttgcacacatgatgaggtttggaggggtcttcaaagcctggtggttgaggcatatagactgtttcttgaagagtgccatttagaaaagcatttgccacatccaactgtcgaatttcccaattgtatgagatagcaagagtaagaaccaaccgcactgtgacaggttttattacagggctaaaagtatcttcataatcaatccctggtttttgaagatatcctttagctacaagcctagattttaacctgtccaaagttccattcgcattgagtttgaccctatggacccatttgttgcctatgagatgcatgtgaggctcatagggaacaagtgtccaagtcccttgagaagtgagggctgtgaactcattgttcatagaagcaaaccaaccagggtgtttaagagcagatttaagtgattttggttcagtaggcaacaaggattcaggcagtctgtgtttggtagctaggtaagctttaggcttgtaaattccatgttgagatcgagtgatcatggaatgagttcttacaggtgctgtagcatcattgagaggagcaactactctggtttctggtgcaggaacctgactgggagaattcgagattgctggtggagaatgcacagatgcagtagcatgttcataccaacaccagtaggagaattagtcccagtggacagtgtgtcattggttggctcaggtaaaattgatggtgatgcagatccagacatgatagaaacattatgcatagcattagagtgagtcatatcagatgcaaagtttgtagtaaaagtagcagttggataagtagttggtggagattgtacctgagagtgacactgagttgaagttgcagggaagacatgctcgttaaaaacgacatttcttgcaatgaacatgcggccagctttattttcacagagataccctttgtgcttgggggaatagcctaggaaaaggcactcttcagacctataatccaatttgtggtgattgtaaggtcttaagtggggaaaacaagcacatccaaacacctttaaaacaccataatcaggagcttgctgaaataggcattcatagggactgaggttgtttaaaacaggggtaggcattctgttgatagagtatgttgcacacataaaggcatgccaccaataggacatgtcaagaccagatttagcaagaagagtaagacctgtctcagttatgtggcgatgttttctttccactctcccattctgttcatgagtgtggggacaagaattttgaaacccgataccctgatctctcaaaaacctttcaaaagcacgatattcacccccaccatcggcttgaacccttttaataggcaagttgaattgcttttccactaagcttttgaactgaataaaaatctcaaaagattgggacttaactgacataggaaagacccaagaaaaacgactaaaatcatcaatgaagacaatatagtacttgtagttatcttttgaagtgatgtgggatggcccccatacatcagtatggataagggccaggggctgatttgcacgagaagtggacaaagaaaagggaagcctatgactttttccctgttggcaggcattgcaaaactgcaggcctttaaggctatgaggaatattagcttgagacaacattttagtgagtgtagaggatgaaggatggccgagtttgcaatgccacaggttaatgtcagtagacaaattagagttgtacacaagagctttatgtaaaaaacacaaatcagaatcagtatttattaaaaactgtaggattacaagcttcttgaatacaagattgactacaagattgacagaaagattgcttagactgtaatgagctgc

SEQ ID NO: 244060 - DNA, 2223 bp, Cannabis indica
ttaaactgctagtttattagcataaactagtttataatggcatacatgtggcgtccctaagggttatggtgttatacacacacatactctctatctctatctctatctctgggtgtgtggaataagtgaagggagagtgagaatataactctatttataagatagtctcccttacttccaatccatttaggacttcatttaaattcaaaaaatgatcaaaaatctcccatacttcgaagcccactaggacttcatttaaatcaaaaaatgatcaaaaatcaatcattttcttgattctttgaaatttttcagaatctcatggagtaatggaaatcactcaagaaggccagaacaatttcttgaagtcaaaaattgatgcacaacttgtaatttcatatggaatgggcttaattcgcgtcatgaagtcatcctcacataagtggaaagctcacttgggggtaagtgtttaccaagagattgaccctgaagacttggacatcctacatgtggccagaagaaaaacattcttagagtaaggtatccctactcataatagtcaaacttaggaagggtccttacccttgcactgaggttgacgttgggggctccaaatgggtatttggatcctgcaaaatcatttctaaatcaccatcctttgatgttccaagctaacaagtcaagaagactctgagtcataagcatggaagctgaaagaagatgatttaacatgtggaaagccaactcgggtgcctaatgtttcatccagcgcccaagttgacacctggcccaagattttatttctggtcctgtattagtgcaaactactcaaaatttttacttagacatgaatcagacctgccacaagcatgttagaggtattagaatcaacatcaaaacataacatgtttagagcacttaggcactcgatgcccaggtcgacctagtgttgtccctagcacccaggttgacatgaagtcgactagggcacctcctactttatttttggagatgttttatgagaaatttctccatctaatccaaaatgaagctacaagtgatttcgggaaacaaaaagagccttctgatgaccaaaaagcctacctagtcccaagttggcattaggactaggcatcagcgcccaggtaaacactttgttaacctaggccacttcaaaggaattttcccaggaattcttctgtattttctctgttttcaataacaataaaataaagtgttcttaggaaacaaacaaggccacttggcgaccgaaatacctgaccagcgcccatgttgacctaggcattggtcttagcacccggttgacaatcaacctggtgcgcatggttctgttactcagatgaaaaatccattttgagaattcttcttatcttgatccaaaatgggggaggaggcctcattttcatattcaaatatcatggaagtaccaaaaggacattgaaaaggctcgagaatagggccccaacaccttggttaacatatggcctggtatgctagcttctgcttatccgatacaagtttcgttttgagcatctggctattttctcataataaatgagatctacaacatgtgtcaagtcaaattcacactttgatgtttcacatttttggtaaagtaaaatattgaaaatttacttacaaatctggcagtaacgaatcacccaattctgggaaagagcaaaacctatgagaacttgtgaacgactttagcagagcaaagaaattaggtaagtgatgtaattatatcacttagacttcataaaatatgattttgacatttttttcaagtaactagcacctaggtgacatcagacaacttcttaatcgcatgattgtcaacctggctatagggtgttgaatagcctgtagtaaaataactcgcttaatattactttgattgacaaaattcctagtgcattggaaatttattttcaagctctttcaatgcctatcttacactcatatctcaattccaaagttttcaagtcaaaaaattgcccccaagacaaagtgaaattttttcgcaaataatctaaaaaacgatccaatgactacaatccaatctttgaaaattgacaatcataatctgaagtcatgattaagcatctatgccattgaatctcaatctatggtcaaaatcactctagatggaatattcctagaatattttatatttttctaatatttattggaaattattttacc

SEQ ID NO: 244061 - DNA, 1061 bp, Cannabis indica
gtccaattttagtaaggaaagtctaacatagataaaaatttcagagacataatttaatagatttcaaagtcttgggagcatgatttagtacataaacaatcgttaaattagtacatttgaatgaaattagacaaaaatccttaaatttaataatcttaatagttcacgaaaattttttacaattaaaaaaattaaaaaatataatttaatacatgtcaaaatttaaaaaacaaaaatactaataaacctttcctttccaaaaaaaaaaaaactcttatagttaatgaaatttcttttttaaaagaaaaaaaaaaaatgagtaacataagatagaggcacgtgcaatccatgaatctatcacgtgctatttggtgtgttatcatctattttcattgtggcttttctctcagagaaagagaaacaatggaagccgtcaaagcttggagcttgagcctccaatggcgtccattgaagcaactcttcaacaccacctcatcatcttccttcagagcaccacgctcttcctcctcttccttttcttcttccccattcctcattcgctcttgttcttcttcctctgcccccgccgccactactaaccccaactcccgtaatcgccgctcttcttctgccaatactactactactacttcaagtcccgagtcagttcgagccattagattacaaaaggtatgttctttatatcattcattggttttgattgaggtctttttatggtaattggatgatgagtttatgtaattgtttttgaggtaatttataatgcacgcaaactgtttgatgaaatgtgtgtgagagaatagttttgattgctgatgatgctgtgtttgattttttgtgttttgtaaaaatataaactattaaaaaaatttattagcaaaataaccacattttgattgcataaaggaccgaaaattagagtaatttgccaaactaacaatttgaaatagtaaatttacaaaataaccgtactctatgcgaacataatgttcgcagagtctaaatttatggttgttttatggtcgcacaaattaacctat

SEQ ID NO: 244062 - DNA, 1005 bp, Cannabis indica
aacctcagttcattaggattaaaacatagtaggattgacagggggcaatccctccccgttacagcaatattcagccaacctcaggaccctcgcttgaacagccaggtcattgacaaaagcaatactattccgcttgacaaatttaaaattacaacattcaaacaccttcagtttgtccaccacactacagaaagagtaggccaccctccagtccggcagtttcctttgttgcagagcttcgacagccacattgcagtctgagaaaattgttaggcttgtccaattcattccagcagcccactccaaagctaactcgattgccttcagctctgcatccaatgcagatttgccttcttcactcttcgctcttgtgtgccatttctcttccctttggtcattccccaacatcgccattccacaccatccatctttgaaggcaccatctgtaactatgaaatttgaattgaagggagtcctttccaacaatcctttcgactggtctgaaggatcgtggacataggcattttgcacaacaacaaactcctcaaaccttgcattaacatcatccataaagcggcccaattccaccttttttccaccatgaagcagtgagtttctatacttccaaatcccatcacagataacataacagcacacaagtattttctgcaaactccccccatcccggtctttgcagagattaaccaccatgtcaaggattgtattcccctggatctcaccactccgcactgttaaggggcttccaaaccagacacctctagcaaaatggcattcaaagaaaagatgtttaggggtctcgggcatacagttacaaattaaacattcattctcattcccacttctaatcttatcccgagtgggaagcacgccactacacattctccataaccaaaggcccatcctcgggtgtagcttattagaccaaacataactccatccttgaagcacaggcccaaaccgctcttcattgtccaagcagtaagc

SEQ ID NO: 244063 - DNA, 1810 bp, Cannabis indica
gttgtcgtttcttgacatgatcactgaatgacatctttgactggggtggtggtagttgtggtgcactaactctatccatctctttcttttaagtcttttttctttttcttcttatggttcattctgtgttctgcaactatttagtgatcatatataattgttgggaaagtgaaatccttttgcttcaattgtaaattttcagaaaatgaaaaacagctgtgagatggcaatggatgtctcctcattaaattttggtggttagtaggaaggtttctttttcattaaattctaatgtgtttcctctcttctctttactatccaacaaagtgtattaaataattgcccaactttggtacacatatgcaggtggaatggaactgtcacatgtttgcttttaatgttcgaacatggctgattgagccattatatatatcatcatcatcatattatgaaatggtatggtgaatagtataagcagaaaatcataaaatgggcattggttaatttaaaaaaaaaaaatccttagcaatgaacttcttgaatatataaataatagtaacaaagtattaagaatttgtcttgacaattttgcgaaaatgaaaataacaacatttttttttcttaaaaaaatatatatattttaccaaacactcctagcaacaattttaaccttgcattttttgaatttgttatacattttaatatgtaacatgttaattaaatttctttatttttcttttcttaaaaaaaatattgcaaaacattgttttattttctcattaatttgttatacacacgaacttaaattactgaaaacataatataaagattattttcccaaatcacagtatactcagtaacttttagtttctcattaagttacatttgctggttcctttatgtaactttttgtatttataccttattttaatataagtttttacaaatacgtctttctatttttttttttttaattttcgttcaaagtatgaagaaatataaaggaaagaaattccttccttatttttataaagtgtcaagattgctaactttaagtttgttctacgttttactttacagctcatatgtattagacaaaaaagaaaaaaaaaataaaagaggtgagatctttaacacaataagccaacttgtcatgggcccaagttgggctggagaaagcatttctatgggctacaactgcatagattattttttctaatgaatattatcacattttaccaaaatgaaattaattaagaaaaaataatttcatcctctcaaaaaataaaaataaaaataaaaaaatttacttgttccatgtatatcttgttgagtatgaagagcaagtattacaatacaatttcaatccaagtcaaacaacgaataaaataacaaaatgggttaaatcccattgatcatgattcatgattaatggggacaacaaacaacaattacacaaaagcttctcttatttatttggtcctaattaataaaaaaaaaaaaaaataacaaaactctcctccaacccaaatcaatagattgagtggtatttatatatatatttttatatatatatatttaatatttagtattaataaaaaataataataaaaaaaaaccatcaaaacaaaaaaagccgtgtctgtacatgatcatcttgtgatttaatttgatatagcttgatcattctttttcttcttataatattatatcaattcaactccggccttctaaattttgaagatctatctctttcgaactgcaaaaaccaaacgcaaaatcagcaaaaattacatttgatatgattttt

SEQ ID NO: 244064 - DNA, 598 bp, Cannabis indica
tctacctggaatccagtagctgagaaaattattgaccatctaaagtaaacaacgatgacaaacgtaccaaccgataataaataattattacagtctattaatttaagaaaagaagcatcagtcattttacccaagggtccactgtctatgtccaatgcaaaattttgtcatttcccttcttcaattttagaagatatatataattgaagacatgtacctaagtcttgccctatacaatatattacaatgataccatgaaaactggttttggtttaggtttggaagtttggattattttcatgttaccacgtctaactcaaacataaaaggataacaatttatttaaaagggataattgcggtaaaagtcctcaaaaacttaaggttgatgcaagttagtccccaacctcaaaaattggcggtaatagtcctaaggtcgcaatatttgtaagtctgttggtctttttttctaacggatccgttttctaattcaaaatgccacgtgtcaataaataattggtccaaattataatcttaattcaaaataatttaaaattaaaagaaaactaaataaattattttaaaattataaattatta

SEQ ID NO: 244065 - DNA, 1595 bp, Cannabis indica
ccattaggctttaggaccaaaactggattggcgagccttattcgatataaggcttccttgaggaagtcaatgttggtcaacttgtacacttttgccttcactactttcgaccttactaaatctaagggtctctgcttctgtcgaactggatcaactttgggatatatgcttaatgcgtgacaaatcacctgtggacttattccagtcatataaaaatgactccaagccaacacattgcaatttgctttgactgtggagacaatcttttctgtcattattatagataagttctttcctactccgaggactttggtagggtcatcatcactaatgcatacttcttctacctcttccatcgattttattattcgttccatgcctatcggtggatttaactcatcttcttagaccacacccagtgctagctaggaaggtattccagcttctactacatttccttcctagaccacgagaatagtcctagttgaaacactatagaaccttcatgcgcttctttgatcacctctgattgtttcaatgcttctagtatcacttggaaactttaggaaaaagtggagaatggatgttaccacctgaaaatccatcagaaatggttgtcccagaatggcgttataagcagtaggacaatcaactattacaaaggtactatacttgaaagatgatactacattgcttctggaaacttctccatttattgtcattggaagttgtatttttcccatgggaatcaacatgtctccattgaagccttgtaattgaattggacaaggcaacatgtttgcttccacaagaccaattgttttaaaggaacctttgaagatgatattgacagagcttttattatctacaagaattcttgaaacccttttatttgctatctgtgcctctataaccaatgggtccttgtgagaaaaatatacatgcctggcaccattttctgtgaaagtcattggcaaattaatcatcctacgatgttatgcaggcgattatactaggtggcaagctttgttttagttcaattcagtcaagtacattttttgtgaatttcaagtcctttcggcaatgtgtggtccaccaggaatggttgctacacgaccatccaaagtttgcagagcagctcctaggggtatggatttccaggaccaggggctataactaatgctcctgcttgagaattttgcgccccctgaagggcttgtgcatttggaacttggattttagaagctcgtggatggcctactccctgaggaggatttatggctctttgctatctcgaaatgaaaagttatccatttgcaaccgttatccaggataaattactagaatcctcacgcaattagaaagatgtccatttgttccagtccttcgatttcatccttcagagagtcatattcatttgtggtgtgtccaatatcacagtaatattcacatatcttgtttggatctcttttttgtatttcaccattgtccatttgtagaggcttcttgtaatgaaccatgttataagtattcttatacacgttctcccgagtatctgcaagacttgtgtattttgtgtatcttgactcttgggt

SEQ ID NO: 244066 - DNA, 806 bp, Cannabis indica
ctactatatttccttgtgttcgttatttttccatttgtttatgtagtttcatttgaatgctcgtcattctatgttgagtattcgctctacttttgttaaataattagaattttattttatttggtgttgtctaaattactcaaacaatactatctttaccaaataacaaaaatatcactcatattcaattatatataaatttttataaaactataggttaaaaaataaaaaactactaattatatattatatataatttattttttaaaatataaaaagtaattaaaataaacttttattacagtggttatacttgatatatttttttacaaaaaattacggaaaactattatgaatgaatttttttaattatatgtaaatatttatttaaattaattaatcaatcaatatttataaacttaataaaaaaaaataaaaaaaaatataagaattaaagagataattgttgatgtatttgaagtgattttagataaaaattgatccccaataatggtaaatctagataattaaagaatgaagagatgtataaaatattaaaaattgataaatttataaaaaaaactcacacaaaattaaagaatatctaaactcaaaatatttaaaataattgagcaatataaaagaaaaaaaatttccaatgtgggatgtagagaaaaagagatgtgatcaatcgttatagtaaaaaataataagaattacataaaaaagctcacctttaattaaaaatacaatacatatttttgtgaaacttatttgccaatgatgtgtttaaatttgtatcagta

SEQ ID NO: 244067 - DNA, 1356 bp, Cannabis indica
aagaacccacacttcgattttacctttggctactatgagaaccttcccttcaaagcttcctctcgatttaggaattaggcttatgtttttctataaaggtttgggtttaataaagggctttttttttttatcaaagggtttaataagtatttgattaattagttgtaggtttaatttttaattttgtaatttattttatgttttcattttattattgaagagaaagaaataaaacaaaaaaggggattgaaatttaaatcagaggtgtatacgtgtaagttaacttacactaacagaaagggaatgaatgaacttacaagataagcgagcttaagtattattattgataattcttaagattagggactaatctgcaacaaagtgaataatttgatgacttttgctgcaaattttcataaagattattatgaacaatataatatagagaagaaaaaaagggagaaagtgaaagtaaataataatttctactcgtttatttcaatggtgtgaatttttatttatacaataaaacaagacttagcaaataaacataaaaaagtaataatatgagatgagaaaggacaaaaaaaggtatagtaaaagatagaaaggtcgaataatcatttaatcaaattgtaatttttattcgtcatatatagctatgtaattaggattctaataagtagtattagaatttgagatatggtgaatgtggttccatctcaaaaccaattgacaatgggaggagtagctcattcatcttatatatgataatttatttccacacattagcaatgtgggactaactctaatacactctcctcacgtttgggtctggaaagtatgggtataataaacgatctttaagagaccacagggtcgaacgtattggcgaaaaggtcccaaatagaggttaaaggggagatagcagaagtatcttttttggaccaacagtactttagctcacaacgaatcacaaacaactttttggaccagtgacaatttgggctcacaacggatcacaagtgactctaataccatgttagaatttgagataagatgaatgaggttcccaggggcggaggtatattgtagccaagggtggccctgaccccccaccccaaatatatatgtacactattttattcatagttttctttggctgttgttagtcaaaccaaaactaaatataaaacaatttgaaagaaaatattaaaacaaacgttgagtgtaaaatagctgcatgtatataatatacacatatatgatattagtatctatatataaaaatgtaataatatggcaaatattaaaaattttaatattaaataaaaagttaagaacaattttaatact

SEQ ID NO: 244068 - DNA, 774 bp, Cannabis indica
ataatattgtgatgtgtgctttcatattatagtgagtgcccaggtgcttttccatctatcacctttaaagtttcttgtgttctttatgagtataaataatagttactaaaatgttgtctggaagattaagtttctgataagaaccgaaaactccaaacttaagaacacaataaaacaatagcaaaataataggaattgtatattgaatgtatgagaaacccacttacatagtatgggagccctcatttaccccttttatatgctatattctagtacaccatattattcctctctcaaaacacacaagttctcccttcttggattcatcatcaatttctggttgattgatctgttgagtaatgatcactttagttagacctagaagactccttacatacatacatactttcaaatgtattcttctcaagtgtattatagagtgaaattccttgtctttctattgtgaattgggctattaattaaggccattgttgccttattgtgtttgattaagtaaattcctcatttttcttttcttctttataataaatattttgcagtgcagggtattattagatgatcaacataagtcacaattcatcaactcatcacaggctgttgttgacaactgttgagctgaacttatattcttgaagagtgacagtttatatattatatatatatatatataactcaaaaccgtttttggtttatatcctagtacttattattctagtgaaaaagagtttgtacttcaattgaagaaggaagcca

SEQ ID NO: 244069 - DNA, 3561 bp, Cannabis indica
aaaataaaagttaaaatgtgttctataaccactttcatttacttaaaattttatttttaagaaaattaaaatgtgttttatagccacttttaattttaaaacagaaaataaagtgtgttctataactttattttctatttttattttttgtattttatttaagtcgggtctaggtctaggtttgggtcgggaccatagtttgagtccgagagttggggccggggccggagtccaggtcctaataagatttaggttggggccaattaagaaaaaaaatatttaaaaaaattttgaaaatgattttttttgttttcaaaaattttaaaattttatttctcaattaaaagttaaaaagtgaaaatagttttatagaccatgtttttggaaaatattttcactttttcaattaaaaagcaaaatattaattcaaaaagtgttaccaaacgcatcctaagtgtttaaaggataaaatatattgagaggtgaaacagtaatttattccctactcaatgtagactagaggatcattgattattgtgatcatattagtgaaaaattcacaacatatatattgggagcttgattacataggcccatgatccccacagtactcagggtaatattacgttgatgtctcaattaattgatttatttaattagctaaaatttaaaaattgattttgtcatatttgaaatttttttaataagttgagctatattgagaagacaaaagaatatagacttatttgttcagtatgataaattggttttaaattaataaattattatatttaaagtttctatttataattattaagaattaagaattgaataaagatttatatataatatataaaagatttaattattatttaactaattagttaataaaggttgttgtcggctgaaagatagccaagtgactcggagtcaaataatcaccgattaatcaccaataaggaaataaataaataaaaaagacaccaaaatttatagaggttcgacccttttttatataggtattgacctactcctcttttagttgtattgcttgtgagataataccaggcagatcactaaggaagacacagttaaatctagctacgactctcaaagtatttacagagaatatctttcagcaaagtgctcttacacgtgtaagtacgatttcaggtctaggtcccttctccttgtgaattcattcgctatttataggggaaaaattgttacattttaccttataaaaagagtgaacaaaaaataaatatccctatattctagggtatagttacgatctgttgaatctcctttattctcaaatagatttgctggatttgactttgtaggattgagtttgagatatttgtggaagcttgttgaacaagaaatcaaggcttgcgtagccctgtttggtatccctggcagcatttcttttggctagcatatttactacccgaccaggccttctacaagatttgtcttctttatgggatttgcttgtagaatcacccttgcaaggtgttgctcctatcttccctggtcagtaggtagataacccggatagatgctttatggaacatctacaacttatggatgttagctctatatgggaccttctaaacatgcttctacccaaaatatcgttgttatgtttaatagctagcttatattatgccacgtgtaagtgccacattagatgtgcaactttaggataatatttccctccaagtccccatagaaatatatgtccggatggggacttttgatacctgtacgagtgctagcaggcagtgagcttcacatggttagtaccttggcaattgtaccgtgcggaagtgaacagtcaaacttcagtctcttcaattgaccattaaatgtcagttctcattatgactgttttaaagctcattttatgagagatcgtgctgacgattgcactcccccataattgcctttttttttttgctcttttcacttcctcatgaggattttattaggaatcaatttcccatttatttaatttttttaggggaaattaaattaaatgaggtctatataaaagctttttctttcctcaaatccttttactttcattttcatttcctgaaaaattccagagagaaaaatcaagatgagctctaagaaaacttaaagcttccctcctcgtgttcttccttcgtcttcccaccgcgcagaagaaaatcagccatctctttgccttcgtccaagcttcacccaaggattcacccagtgagtaagttctttaacctctctcttctctttaaaagttatttgtttttgattttacaccattgttggaggtgaaaaaacctccatgccatgggtttagggaaacccaacctcaacggttgcacgagaatgctaggatagataaatgtagggtttttagctggaaaaggttgaatcttagctctgcttcctacattttggaatatgggtcttaaagaacatgaagaactagggcttaatggtttcttttcgtagaataggttattttagatctgttaggaaacctgactggtctattcaaggtgtttttaccctgattatatgctgcccgtatggtctttatgctgtctgaatgttcacctccatttcccttttgcacagatgaacctgtgcgactattggggaggtgaacactagatagacgtagatatactcaagcttctctttgaagattaactcgcattccaagcaagtgattctttgtcttgccattctctggccagctctttgagcaatttttttgacttggaagtcagcagtggttatcctaaaccaaaaatccaacaccaccaccactctaatcggattggaggagaaaactacggtcggttcatttgggaactaaatcggggttggaggaaattttttccagcttcttggacatatattgtcccagacaccttgccagagggacgtaggtcatcctttgtgaagaaaccatatgaggttgaggttgtcgttatagttgtacagtataccagcgagaatccaaacctagcccgaacaaagaagacctaccgtgcaactccttcatttgacccccaccttgttgaactaatggcaaggggatgggctgcacaggccaaccaagttgagaggcccacagagtctaaagaaagggcatcacctaccctgaggctggtcagagattgggatgttatcgtatttatgacaatggatgaggttgttggtgatattggtgggaagcaaggtagatgcctctccttaaatgaggtatctatttcacttgcccccagtgtggtgactaccaaggttctatctaaaatttgcctctttggcaaaatactctcatctaaaacatttattgctaaggatgtggagaaggcttgctccagtatctggaaaactcaggttaaagtggagcctacagatggtttactttatggctctaacacatttccgtttatgtttgagaatggggatatgctggtgcttctctcgtggtcttctgggtttggtgtcaaggttttggcttttaactcgatccatttttgggtccaaattcactcc

SEQ ID NO: 244070 - DNA, 1394 bp, Cannabis indica
aagggagtttccttcaccttattggttaacttaaatgcttcgaacttagcctttattgaaccaaagtacatgttccctctatacgtgatatgccctgaaaatgctctgacaatggaagaataagttctggagccatctgcattaataaaaaaaaaagatgactattactttgtataaattgcacaaaatcacaaaacaacacttacaaattgcatatagatcacacacgtcagttaaaatagcttaaagtttattcatgaaattcgcaaatcatataaaatgtacatcacacaaaaattgaccaaatgtcatccaaatatcgctcaataacaccaacacacaaatctaggccgattagtcgcacaaaatagcacaatgtcaccaaaaaattgcaaaaaaaaatatgagcacaagaaccattaattaggatgattactcgcatgatgtcgtccaaaaaaacaaaaaaaaaaatatgaacacagaaaccattaacttaggatggttcatcgcacaaaattacaaatatatcgcctaatgtcgcaaaaacatacaaaacccaaaaaaaaaaactacatcccaaaactcagtttctttcccaaacacaaaaaattagaaatcgaaagtttaatcatcaataatttcaatttaatcacacatatcgcatttaaaggataaattaaagaaatatccaaaaaaaatgcacctaagttcgagtgggtctctggacattggacggtggcggggacggtgatcggagactagttcgagtgggtttcatgggtcgctggggttcaagtggccatcgtaagtctcgtgggtcattgaggtcgattgggtcgctggggtcgtcgggtcgattgggttcgagtacgtcctagtttgaatggagtggctgggttcgagttcaaaggttcaggggggacttcagttttgggtttgaaaatggagagggaaggaggagggagaaaggagttagagagaatggggtagttaaaagataggggtaattttgaaaggaaatttaaaaattaacatatatttactatgtgtaattttttgatttaattaaacaccatgattaatatttttagcatggtttatcaaattttctaatactaacatactaatgatgtaccctttctggcacgcacagtaattaaatataaatattaaaaagtctattggtagacgtggatttaaacaataccagtgatataaataaagcgttttctttacactcatgcacaaacatcaatcaatcatcaatacatgatgtaccctttctcacacggataatttttatatttatgctacaatactattttgcaaatgatctatactttttactttttatatgacaatataatcatgcacaaatttttagtaaaaattca

SEQ ID NO: 244071 - DNA, 4592 bp, Cannabis indica
gctatgactattaacaaagttcaggcacaaactttagattcggttggtgtattcttaccagagtctgttttctcccatggacagttatatgttgccctatctagagcaaaaactttatcagctctaagaattctcattagaccaccatcagaggcaacaaagatgattataattataccttcaacattgtttatgaagagatcttattattaagcaatactatacagaagttcttatgtatgattctcttcttatatatcttcgcaatttttatcaccaatatttattatacattttaattttactaattgctattatttttttttacagatcaaacatgaatcctcaatataaattactacaagaaattacaccaactactagaggatggatagcaaaagttactgttattaaaaaatttatcccacctctttctcgcaatggagtattgtaccaacgtataattcttgttgatattgatgtatatttattacaactcataaatctatataaactatataaattaaatttaaattttgtttcagttacaaaatataagattattaattaattaactataaattctctacaaaagatactttcttacattactttgtgtattttttatttattataaatagaaaaatcgcatacaagctactctgtatggcaatgcaatcaatcatttcggggataccttaaatatttcacaagcctacttaatttccaatgcttataaagccagtacatgaagagtttaaaattgttgacaatcaatttgaatggagcctacttctacatcaattgaagaaacaactgaagaaattcaatggagctttgaagaaccctacaacttgtattatcttgatcaactagacgcctatgttgatacaaaaacttctgttggtaatatttatataatttgaatttttatgatcataattattaccaaattactaatgatatttctttcaatgttaattacagatattgttgcagttgtgtagtgctgatccaataaaaaaaatccacataaggtctggacctgcaaatattcaataattcctccttgttgatcaaaggtctaaaactaatatcttttatattttttagaaacttactgcacatgttatattaatatttttttttttgaacaagaagaggttctttattcaaaaccagcaaagaacaaccaaaacaacacccagccgcccaaaaaccaagcagcccctctaccagctattgattacattgaatatatattcatcaaacttttttgttttccccccactgctacaacaaagcaacctatatttcaccacctgccttatctctttgctaatgcagtctatagtattacatttaagataaaaaatacagcaaaataaagtataaagtcgccaaaacaatcgcgtttagcaccttctcttgcaagttgttcgagggacgggagaaccactccaggatgttgttcggccaagaaaaaaaaccacaccaggtggttatttcctgcactactttttgggtgaaacaaaagcttataaacaggtgttaatggtcttcaattgttgaattgcaaaccgggcaaagagtagaaggaatagagataaatctgctaagtttgtgtcgggcaaagagtagaaggaatagagataaatctgctaagtttgtgtctagttaatagctgatcattgacaatttgccatcccataaatatgtgttttggcacattcatcctattccatatattctttgcataatcaaccatgtgagactgactaaaagagagatagaatagttttgctttgaaattacctcttttttcagccttcttgacatcttcttcacctatcaccgagcgaagacgaagaagattcttaaaataccaacttgtgtcttgtttaaaagttgctgcccagaaagtctgacccttcaggtatatagcatctatccaccgaacccataagttgtcttgttcactcgaaatagcccaaatatatttggccattagagcaatattccattttttaccctctcgaaactcaatgcctcctaacttttttgggagacagaccttttcccaagaaggactgtgcattttgcatctattgctgttagagccccaaagaaaattctgcaacatttatcaatagctgcagtaactttttggggaactaagaacaaactcatccaataatttcgaaccccaaggagaatagaatggatcaactgagctcttcctgcaaatgacaaattcttgctagcccaattatgcaagtgtttgtggactttatcaataataattccacaatcagagaaatgccattttgttggcctaagataaactccaagatatttgagtagaaagcttccctcatccattctaagaatcttcatgagcctttgtttgtttttcagcttggatccctccaaagtacaccgtagattttgctttgttggccattaaccctgttgcttcactaaatatctgaaaagcttcactaacacacttgacagatttctcatttcccctgcagaaaattataagatcatctgcaaagcaaagattgacaagccctaaagacttacaaaggggatggaacccgatcccttctccttaaacttctgaataagcagtctcgttagatactccataatgagaacaaaaaggagcggggacattggggtcgccttgacgaagacccttctcacctttgaaagacccttgaattcttccatttaatataagggaataagaagctccatggaggcaactttgaatccatgaaataaatctggagggaaaacaaagccctttcaaaaagatcatctacaaagcaccaatccacagtgtcatacgctttgctcaagtcgatcttcatgatgcatctagcagagatgttactccgagtatacccttttaacagatcttgtaggattaggatgttgtgagctagtaaccttttcttgataaatgcaccttggttcttggaacacatcatcttggagatacatttataaatggtgttgcagcaggcaataggccggaaatctcctgcattttgcggactttcagtcttgggaatgagagaaatagtagtctcattcatctccgtagggagagagccaatctggaaaaaacccaacaccgctttagatatgtcatctcctatctcctcccagaggcctttgaaaaaaccagcaccaaaaccatccggccctgggcttttcgaagagtggatgtcaaataaagcctctttcacatccttctttttaaatggacgaattagttgaacttgttgctcaatgttcagcttattttcgtgttcaagacaatccagttccattcttctagtcgccgtactttgtctccccatgaagttatgaaagtggttgagaaagtgttcaacaactttgtcgtactcatcaacaacaactccatcaatactattggaaaaaattctcttctcttcttcttttcataattgagtgaaaatagcttattttttcatcaccaaaccgcaaccaactaacttttgaattttggtggaggtagctaaagtattgctctcgagccttctgaaatgcttcatgagcagctttctcctctttagctgttgtattacagaggggattgaacgccaatttctcttgagcaacattgtaattctctttcgcaacagtatactcgtttgtcacatcctcccgattagagacaaaggaggttttgagcaagtgtttgactctgtagagttgtttgcttaggcttttgagatcattaacattcatcttcttccaagtggagagcactttttccatgtacccatccttgaacatccagtagttacaaaagaaaaaaggtttgagacccctgttgctaatgttggggtgtttaatgagacaatagttgtgatctgaaatcacaccccatctgtagcttgcttctgtgttagtgaagctatcaagccacctttcgttgataaaaatcctgtcaagctttgaatgtactctactgccctcctcatgcttgttagaccaagtgtagaaagcacccgcagttttcatctcttccacttgaccctgagcgagccaattttgaccatcttgaatctcagcatctttgatttttcgacccccacacctatctctatgagtgaacatggcattgaaatccccaaggacgatccaaggcttattcaggtgaccaatagccactagattatcccacaactccttcctttcatttagatgattacttccatacacaactgttagaaaaaattcctctttaaaacccaccattttgagcttacagtgaaccatttgcttatcctccaaaaggatttctactttcacaagagtatctatccaaaaaaacaaaattctatacgatattacctgactagagtagaacttccagcctgggttattagcaatcaaactagaaacattatcatggttgattttggtctcaaagagagccccaaaaccaatattattcatccgacaacagtcaaacaactcccgctgcttctcaactttattcagccctctcatattccaaccaataatattgtgttaggttttatgcc

SEQ ID NO: 244072 - DNA, 1546 bp, Cannabis indica
ggtaaaatatatgcagttactctgacattttgtagaacttaatgatgtatcaactgatactgaagaattatcacctacaaacaaagcttcatcacctaaatcacttatttcttcccaatttgatcgatcaaaactccacttaaaaacatcaaaacatgttgttacacgaaatgtctccatataaacatacctttgaacttgcaaaagatctcctttatatgattccaccaaatattttttatcaaaaacaacatcatcatcattgttacggttgtttgtttgaatcccaccaaccaactttaaactcggttcataagacgaatcatcatacttaatttcgaaagaaacaagtccactcgtataaaaatcaactccatagaaagcatctttatagtacaaaatgtcgtctgtaacaaaggccttattaaaaggcgacggatcaagtacatgagtccatgaatcgtcttttaaaggtctaatataagccacttgaagaagtggtccaaatatcactatcgtaatgaaatttggatttgatattggatttggtgtgaatgttatgaatctgttaaatgaatcacgatgcttataatcatcaaataaaggaggaaggaaaattgttatagtgttattaagaggcttaaaaagtgtgattttcaaatctttttgaatagtagctaaccatccttcggaggagcctataaaaggaatatcgtatgaagggagtaataggtatgattctaaagatatgtggcggtatgagcttaggttatagacactccataaattattagcttcgctttcatttggaatcaaaagctttggaactagatgatggtttagttcgattaacttacttcgattttccattgctatgtcgcgccacgagagacaaacacaagcaaatgaaaatgaatattttgcttctatcttttcaaaaatcaattctaataggtgacatggaagatttgcccaatctgaaacaaaaatgaaatttgtgtcaacatttaatgaaattcatatgaaatttttaagaagatttgatcttaatttaatgtagaataatacataatatacaaaaatatatatatatttatatatgaattacctgaatccattttcttttctttcagtttcagaaattaatttaggaatgtaccatccatttgcttcgaattaatgtatagtaatacgagtgagaactaaaattaagaagaaattaaaaccatgaaaatgctaatgaaaaagtaatagtaataaatatttatattcaaagctatttttttttctaaacaaatttcacattaatatcggtaactaatttgccttcatttttataggaaactctgttttgttttgttttttttcttgacgaattaaaaagtaccaatttattttttcttttttgaacaattaaaaactactaaagtgattcaaattattctagttgatctgaccaaaaaaatctttatatctttatatattaaaatttattggtttaacgattttttttttatttagccacacgttaacaaataaataaacc

SEQ ID NO: 244073 - DNA, 1003 bp, Cannabis indica
gatgttaatgaaacatacttgttagtaaatctagatcctggtaaagacatgaaaaatcctagtccaaggttacgactgctacaacactttgttggcagtcatcaagaagacctcctccattgtaaagatgaggagaagaagaaggtctcctctgctataaagccgaggagatgctgaaggcctcctccattgtaaagttgaggagatgatgaagacctcctatactataaagctaaggagttgacgaaggcctcctacgctgtaaagctaaggaattgacgaaggcctcctctgttgtgaagctgaggagatgatcaagactaccttcactgtaagtacagcctagagaatgctaaagacctctaacaatgcaacctaggagggaacaaacactacatctatattacttaaacaagcagtgtaacaagagaaccaatactaagaagatagccaaagatcaaagcttgtgttgacattttagtgttgacatgatttcatagtatctcaaattaaagggaatcacacaagaagacaatcataagacaattgctaagattgtcaaaattgatgcccacctcgcagtttcctataaaataggcttagttcacgtcctcaagtcaacctcacacaagtaagaagtgaagggcaaatattaacctaaaaactatccctagtgacatggacatcaatgtttgacatgtggtaagaaagaaaatatcccgaagttgagtagtcccgagtcatagcagtcgacctaggagggttccctagccttgcacccaagttgactttggaaactttggaatgggtgtttggatctcgccaagttgtttctaattcacttctttcagtattatgtaccatgaatacatgaagaatccaagtccaaggcctggaagttgaaaatacacgaaacaataccctggaagtcaaccagggtgcctagggttttgacccagtgttgacattccaactagggtttagtttttggatctgtcttagt

SEQ ID NO: 244074 - DNA, 2175 bp, Cannabis indica
cttgtactttcaaggcccaaaattaactcacgggcctattcgttaggcccaaacaaacacaatgggccaattcataaagcagagtcggactacagctccaggttcaactttaaccctatctcgacaaaatcagatgtctttggtcccagaagggtaaatctcatccagagaggtgaagattcagagaaagacaaccagataccttcaggggtagtcctggaggagtagtcgaagaggtgtttgggtattatcctacgtggcacccctctgacaccgaatcccaaagaatttaagaggtttgtcccctatgtcaaacctgggttaggcacacaacacaaaaagtaacataccttttgtgcaacgtccactactctgacatttactaaacacgataagcggtgcatggccacctgtcaacatcaggttgtacgaacccgtacagacaaataaaaatcctccaatttgtgcttcacctacctgtcccaaagtcaatattatattgtattttacccatcactgagcttatttcactacacaaatcctagcaggtccatgttcacccaggaacccgacttcagcctataaataaggctttatccctttatgcaaagggttacaaattttggcaagaacactcttgagtaaaatactccacaaccaaagagctcaagaatattgactcgtggactaaggctcattgacaccccaaccaagtaaaaaattttgtcttcttttagtctaagttatttttctttaagctcaatctattttttaataggtttctgaaaatttcgataaatattttggtgctttcattaagatcttgaaggaagtcattaccatttttttcttatacgaccattgttgcaacaagaaatgggactagaaaatcatctgctcccaatgacaatgaaaatggtgcagccgatgatttgaaccagccccttccgatgaacatccaggcgcacaccgtaggagatggcaaagcattgaaagtagctagtcgactaccttaaaaaggccaacactaagaaaaatgcattgatgagactcccattgacgaagatgaccaaaaaggccaagacaaggacctaaaggatgactacaacaaaaataatgacaaagaatataaggaggacccaaaggtggtaaggttgaggcaagtggtctttgaccatcaaagggaaatggcagagcaagaagaagttatgcgccatatacaagaaactctctgacagctgcaagacatggtagccaaagggaactttaacactaaaaacccaccagtgggaaagtttaaccatcctgcgacaggatcttcaattcagcaaacgacaaggggaagtatgcctaagcctgttggtaccaattattcgtatttccagcaagggacacgtggatcccgggttaccaccaaaagcccactagtgggtcccaaagaagataatttgggccaagtccaagtcatacaagaccttccaggaaggcaccttagctctgtgactagaagagcttccgccaataatagtctgtattcaaatgtagccctagtaccgtgttgtcggaaggtcagacattatgttcctagaagatcggtctagtttctctttttattcaagcgcaaaaaataagaaaataaatgcttctcaaatctcgacagaagatcgtatcaagccaaaaaaggaaaattacctaaatgaagatcaagcaattaatttcccataattataggacacaattttgatagcattaaccatatccaatctgcctagtcagcacaccaatcctctaatgggctgagtttcacaaagagagctcaacttatgtattttcatataaattccccattagagggaaaagggaaactaagtataatttacttaacactataaatacccaacaaatcctttagattaagggttgaattctcttgcaatacttgctcaagaaaaaatagagaacttaggctcattgtattcctaaaggcttttccatctaaaacatacataataatatcgactcgtggcctaaggcttgttaacgccccaaccacataaaaacttggtgctttcattgagagttgaaggaagcaatgataccatcaggtgattacgctcagtaatcctggtactcactcgaaataagtatgtgttggaatttattttaccaggatct

SEQ ID NO: 244075 - DNA, 1255 bp, Cannabis indica
acaaggcgtattttggagttaaactgagctggtttcgatgaagatgaagatgaagacattagctttgagacaaaatgccacttgaaaaatacatcttttttctaattccaaaatgaccctttttccttacaagtggcttggtggctttctagttctacctatggcttctggaaaataaccgagatggcggggccatgcacggatggtgaacctgtcagtcttaggaagagagaatatggtatgtctctgccttgtgcttacactacatttctgtgcatgtactatgtagatggatcgagaattatgatttgactatatagcacttttcttttttcctttttatgcattggataggataggtagggaaaaataatagacaccttaatatctcctttaactgtggaaataagttgagtaagagagatgaaatgaaggtgtcccacctctaataacttttttcaggcatagttttgggtcttgccttccttaccaatctgtcaaagttaagaccaataggagagttgaatgaggtgttaaggcatcatcaattcttattagctaaaaaacaagcaactatagaacaagagagtgtatacaccacttttggagaatactactactactactactattactaccccttttgtagaaactgaattagaacaacacacgtacttggttggagaggagttgtttttgtggataagcccacccattgttgatggtgaccatgtgatttccacgtggattttggaccgtttctttattactagtactatcattgtcataatatgtatatttaccaggagagttatgatatgtgcacacaacaaaatatgcaccaatacattacacaaaatggtgtggcagatacttctaacacaattagttccatcttaaataaatttaattagttttttaggttacatatttttgtaagcatatatcattactatataaatattatataatatagttatagtggtctttttttttttacaaattttcataaaatactaaaaatgatacatcttggtacatgggtatttgttttaagaataattagttttttttttttttttgcatcttgaattttttacactactaagttaagtccacaatatatgacttgttaataatacttcttgaaatataacttttacattcatgtaattcttctgtcacattttatttaattttatcgtgaaatgagtaaagtggtaaataataactgataaataaatgtaaattaaat

SEQ ID NO: 244076 - DNA, 892 bp, Cannabis indica
atttaactcaaaatataccccattaatattaatttacgaatggtctaataatacacgtgcaaatcatatacgaaagagtggaagacaataattgcagtaggcttgtctagtgggggaccaatgcaacttggcaagtttaattttcaagatgaatgagaaatttttggatgagtattaatttaattgatttgtctagcaacttcttgttttaacaagatacacaaaatattgattattgggagaatttaattaatttgagctgtcttcattccacccacaagcatattcaattagtttatttattacaaatatattataattagttttcaacacctaaaaattttaatactaaaaacaattattttgaagcttgaggtaaaaatatattatttatttgagtattttataataccaattgaaatgtattttataatatattactttctcaaccacacttaaatgtcttgctagtgtggttgggaaagtaaagaatataatagttagatgtatgataagatatacggaattctttctcaaaatcaattaacaatgattattgaagtaactttatattatggagaaaggctagcttttttggagactcctcccggatggacaagaaagccttctcagaacactcttctaggggacaacaaacttcctggaagatgaatatattttagagacctttttatttaaaggaactattccagtacaagtttttaatgccaaagttggtgtagtataacactaaatttagtgtataggttggagatgctgttacgatttggctattgtgtttgtgagcaattactagataacaatttatagtcaccacaaaaaataattaaatatctttagtagcaacctttaagtcgcaatataaattttt

SEQ ID NO: 244077 - DNA, 2416 bp, Cannabis indica
cctaccactggtggtggcattggatctccattctgggcaccttgtgcccgagtttggtcattctgcacataacgacgcatgtggggattgttatagcttatgaggtattcaatcttcctcttaagattttgacactcattggtgtgatggtcaaagtcgttgtgataccaacaaaacttctacatgtccctcctgcttatctcccttttaatgggaaagggcttttggtaggggattgttgcctgagtggccatgaagatggcctctggtttctctgtcaggaggatgaagcaggtgtacttttcctccttgttcttttgtggcgtgggagaagtattaaacttcccctttttgccattgttccatccagaattgttagtgttgcgcttgtttctggtgttcttgcaactagaggtttgggaagagttgttggtgtctgcatgtgcgcctagtaggtcatgagattatagggtgtctcgtgactacctattgttgacatgccctatcatatggcttcttctagtttgagaaatttattagctctatcaaggaactctttcatgttgttggttgagatcttcagatgtctttccaaaagtcactcaataagagtatgcccccattatgtccatatatcggccctcttctgtaaggcccttgacttttgtagcctcggccatgaacctctggatgtaatccttcaaaggttctccttgtcgttgtttgagttcgacaaggtcttctggttgtgatggtacaagccttgaagatgcgaattatgtgtaaaattctcgagagaactcggcccaagagttgaatcttcctggggtgagtttgaagtaccattgttgagctgtttcggacaaagtggctgggaatatgaaacatcgcacatcaccagtaaccttctggagatcgagtttcatctcagagtatttgatgtgagccaacaggtcttctcttccagtatacaccttccataccagcatcttgaacttgggcaagggcaaggcatttatttatgccgagaatggtgatccccttgaccaatctaatttaagatctaaaggctttggataggctatgtcttgaatcatgtccttgagttggtcaaattgtgcctgcacagaaagatctgttactgtggggatttgattgactgccatccttggaggggttgcaagttctggtgagataggggttggccggccatactctgagagagtgtatggtgaaggtcagccagacctgtgttgaattacagaccctggccgaccattctcaagtatgggtattgtccaaggcaagctagacctacattgggcagggtatggtcacccataactccttcatggccggctagacctgcaaagggcaaggtctagccatccataatgcctccatggctagccagacctacaaagggtagggtctggctacccgcgagtcctcggttaattgacgtcggctgtgtgttaatgggaggtagatcgcaccagttgctagagtttagtagatctaggtttctgaattgattagtttcacttctcgaatcaccattttgggtgtttccacctgctcacagtccttgtcgattgaagattgacctttgagtgcctcgctcccctcggggaggtagtgctcccctttggttggccaagggtactcttacaggtggctggccggccaaaggctaaatggtgggatatgtttttgagccagatattcctggcggagcccccatgtcattggttttcgggatatggctattgtcatcgttagacctttgaggcaatgtatgtcctccctctggcaaggaagatctgtcctagtccctgagggaccaggctggtcagcttgtcgatagaccctccttgatctatcaatgagtcttacttaaagtggatctttgatgagatcctagcctcttctatcagttctctggttgaaccgccttatcagatcgctggcctctctgttgcgacaatccatctctgcttgatgagatcgaaggatgcactcctgatcatccatccatctttggaatttgcatctctactgagcgaatacattgcaatcaggagcgcatggtgcttcacttaagcaggcttggcctacagcttctctgagtttggctaactcgagatcttctcccaagtccacatggggctcgccaatcgtaggctcgccaactcctggtcctgtctttccagtgtaataccagagataagatccaatggttgttcctgggggctgtcgctcatgagtccttccttcagtgggaggcgtcaatggtgggtctttccttggaggcaagggcctgctattgacatccaccgagatgtttgtatcagtttggccagctgtagtggccaaacttatggtgcctattgtggtgacaggatttaccacatct

SEQ ID NO: 244078 - DNA, 825 bp, Cannabis indica
catttttttttgcggtgtgggcggtttgagcggtttgatgaacacccctagcctcggggccttgattggttaagaggaatcagtcaattagactgatgtcctcatagtagtgttgtacttgtggaatagttcctccaaataaatagattttcgaaacatattcatcttccttgaaagttaattgtcacccggaagaatgttttcagaaggttactttgtccatccaaaaggaatctctaataaagttagccttcctctgaaaaggagttcaggatggctagctgctccctcctagaagggaggtccagatagtcgactctagttatcacttttcctattcgaaaagccctttcagtgtgcttcagtccatgattccgaaagtactttgacttatggtgatgtggagatctcgctaacaggagtttgtgaagtcttaacttaacttaacaacttattaacacttacagccaccaactttaggatctgatgaggacacaaagactaaagatccaagtcaagttccagttgatccggtgacgagaacacgagccaagagattcaaaaaggaacttgacaacctagtccatagagttctaaaataggaggagaccgcggtcaacactgaaggagaacaaagatttggactgctcgctcatcagagttgacttaattcacactactacaaaaatgggtttcagtgacacttctttgcatgtcactaatgtgggtgttaggaaaagtaatatatagtgactcttcgtatgtgtcacttaatccttttagactctctcaaagcgcgtccttgtagacttttagaatctcaaa

SEQ ID NO: 244079 - DNA, 1150 bp, Cannabis indica
ttttatttttaaagttttgttttcgaaaaataattatctagaattataatttttgtaaaacaattttgttttccttttttggtcacgactcacgaatttgcctccaagcgatcgtgagataatacttaaatgctaattatgaatcttggactcatttattatggtcgttgtaattaataattgagtaaaataaagagcttgcctttgtcttctttttattaatatttggcactcatttattatagttttgccactgatattgatacttgtagaaaacaaatatgtaatagctcctgcctttttaatctttttcatatgaataattaagtgaaatattattgtggttggtgagtagtaacaaagaatttaaagcctaaaaagtactaaaactgaaagtaaacataaaaatgtttgtaaagtgaagccatcgaacgacccatttaattgcacttagtaacatgttgttgctaagtccaggctcattaacgtcttccttcttcgtaaacccacgcgcaaggaatggccaaaaatcatgagaaattataacaaatgaaaataattacaggcctttcgaaaaataaataatgatcataataataatcaaaggaaaattgtacaacctgcctttgcatttcataattatggttttcaataacaaacattacctcataaaattactccttacatgtcgattttatttaatatttggttttggtcaacataatttatttaatttgatcaaagaaaatgacgttatcctccgtaattatcagaaacaaattccaccaaagggaaataaaaattataaatcaattatatcatacttatatatagtatagctagctgggtatgactactactatatatcctttatagtaatatctccttgtgtcaaatttatacttctaattcacactattttacaaagatgaagcacaatttatctaatcatgaagctctagatacaggaatcttttcagtgtatgtacagttttgtgcattagtttcatcaaatgttcaatacatttaaaaaatcaggttacgaatagtctcaatcactattaaataattcgtatttagcactatataactgatcatgttcattattttagccaattcaagtatcatgtctccactacaacaaatgata

SEQ ID NO: 244080 - DNA, 435 bp, Cannabis indica
attttaatttaaaaatatttgtatacagagttgatgacatcatcttccgtatacagagttgatgacatcgtcttccgtataacatgtaaataaatttgagtataaactatattttaatttaaaaatatttataaaaataaaaattaaaaaagtagccgtttgtgtaaaattcctaaaattaattatattagttatcgaaattttcagtgtgtctaaacataagactggacaaattatacctaatccagtctaatcgtcaagcgaaactgtccagtattcgtattcgacgattcatgggccatgaatttatttattttcctttttaactccaaaaataatgctaaagttagtcaatccaaagtttaatagtggttcaagcattccgaagttcaattaaacactactaaaaaaaatacaattagtaacacttttttt

SEQ ID NO: 244081 - DNA, 1254 bp, Cannabis indica
aaacctcttccatatatatattttatctttttcagcattttaagagttttgtagtataattttgttttattaatatgatggtatatattatagttattacattatagttattatgactatatgtaaattactagaacattttgaataatttacattgtcgaaattaaaattcaaataatattttattacatacatggctattttttcttattagtatagtaaattaaataatttgccaaataatgccactacaaaactcacattaagcatcaattttaaatcgactcctaaacatatatcgtcaattcataaaatgacgcttatatattccatggatgtataaagtatactctttggcgtcggttcataaccaatactattgagcgtaagtgttagtttaaaatcgatgcttaaaatatatttttttcttctgttttaactttaaatcgatgcttacgggtggaaaatccattttgcaccgacgctagaaaaaaaaaactttcaaatctagccacgaattacttcgagctagatatgagatctgcaaaataatatatattatcaaatccagaaataataatataaatgatcagatcacaaaaaaaaaaaaacaaaatatattatcaaataatcatacaatataataaaataatcaatcaaatcaaaacttaatgaagatcaccgtcgataccccacatcatcgactgatgccattgagatgcaaagaaacgaaaatgaaagaaaaaacaagaatgaaacaaaaaaaataagatcgatctcaaatcacaaatccatttcccacgcaaaaaacttgcaaaaattgaaatactaataacaaaatagagagaaatagaaaagaatgatgtgtgtgtgagagaatttgttgcatcatcgtttggagcgagaacgagagaaagagagagagatagtgagagaaagggagaccatatctgctggcaacgttgcttggggtggtgcggtcttggccgaagctcctccaacatggtggagtaggagtggggcacaactggaacaaaatagagacagagaaagacggagggagatcagttagagagagaagaagggattggctgacaatgtttagggttagagtatagtttatgtgtttatgtattagagtttttgtgtataaataagcttttaaattggtttattttgtcagttcattagtgttagtttagaagtaacactaatgagcatataaatatcatcaactgacacttaagaaccaag

SEQ ID NO: 244082 - DNA, 1462 bp, Cannabis indica
ctgttctaatattctccttttttggaattgatatttggatctgaattcatgatgacaagccttttgttgaagatagtatgccctcccatgagtatttcatctctattcttaatgctatcaaatgaatcaagaaaattccataagaaaacatacccaccttatccaccttttctttccatagttgtcttgcaaagctttcgagcacagagaggggtggattagctccaagaacgtaacacactatagaagaattccaaaagaaattctcctcttcaatatcatccatagttatcttaaccttgttgtccttcccataatttccaaaaagaagatgccaaattccgaacaatgttcccaaatcatagatttagaggattagctggcatacctttagataaagaattcgagcattcttgattagcttccataaagaaagcaaagtctgatcgaatcttcttgctagaggatcgatttcatcgaggacttcgtaaacagaggagcctgaaggacatctcgtaaaggatctgacctcacaggttccccgtgagactcagcacaattttcttcatctgtgagatttagtggttcaatacctagaattttctccatagatttaatttttttcatatcaactgttgaattaggatcttttttcttcttcttagtaaaaacttttagctttccttggacctttgcccgtgttttcgccatggcaccggctcgagacagctgaaagagctaggagagagagaaaacttctttgtgtgttggatttttccagtttttatatattttattttataacattttttaataaaatattcgtttaaccaatttttagggacgatgtgtcaccactataaaaatattaagggaaattaatatatactattttttaaattttttaatttacggtttgggttgctctggacgtggttgctccggtagtttttatgtgggttgttatatgaatattggttgcgatttaggttgctccgtaagttgctatgtagatttccgtaaaaatgcaagaaaaactattttgaagtgtaaaaataaaaataaaaaaaatcccaaatattaaatgtcacccctaaataatttgaaactaaaaaacaaaaaaattgatgataattattagcaacgacatgagaaagttgccgctaataacgagttattaggagcgacattttatcgcccctattaatgtcgcccctaaaacaccattttcttgtacatagtgttatatatcatttttattttataaattacctgtcaaatttattaaactgagagtttataattgtgatcacatcagtcctcgtcttgatcaccttcttcttcaatatctgattttaatgttgtaacgtactaagaacaaagaaaaaattcatgtggattttcttcactttattaaagtagaatttgatcttttctaggtttctggagttaaggttgtcac

SEQ ID NO: 244083 - DNA, 1375 bp, Cannabis indica
aaaaacaaaaaaaaaaccttaaacaaaatcacatatacaaaacgatgtcgttggaaggaaaataaaggaagagaaggataatgactaatcataagagattttatgatcatcataaagtaatccgacatccacgtagaaacaaagaaaacaaatgactaatcataagagattttatgatcatcattggtccctctcaaatgattctcaacccttcgctctcttttcatttcatttcattctctctcttcttctcttcttctgaggttttagaagggtttctcttcctctgtccgtacgccaccttaaccacgcatagagaagaagaaggaaaaaagatggggtctttgacaatggggtggagagaggaagtacccatatgagagagaaagatgaaccagaagaagtggatgagcatgaaccatataatggagcaaaacgagagattttgtatgtttcctgtaagatataagcaaatttgggagatgtacagaggctttagccagcttttggactggtactatttattgccaaccgatctctgtctctgaatttccacttttaataattctattcaatttatctttttgctgagtaattggaaatgggtttgtgttattttgttatttcatttctatttatatgtcaaatttagcttttctgttatcttgtgaataaatgtgaggctttgaaggggttttctttttaatattctattggattctagctcttactcaattttgttaacacggttttccttgtcagaaacatgaatttgactttgttctgtttgtttttgaggttgttttttcaaatttatgttgttctacccttttctgacttatttcccgaggaagtgttttgtgaagaaagaagtagcttcttttatatctcttattgggacccagaagattattttagatgagaattctggggtctgatttattaacctgataataatttagcttctttgaatgacaaattttgtattttggctttactttgttttggtgggtttacaactctagtctagtcttcaagttcagcattatatttatagtatgtgtttcagtttccatgaaatgtatttttgctttcactgttgtctcactgtagttgtcctcttcctaatttgagttattatcatgtcttataatgtcttattgaaagtatatggagtataaaataattataataggaatatactaccttttacttctcctagcataagtgaagtgaaccaagggtctaacacaaacatgagttttgcacatgcaccaaatgattgggtttgaggaagttgcattttaatggtactttagaaaaatatgattttaggtgagacagtggcatggttaagtaagaactagaatccaac

SEQ ID NO: 244084 - DNA, 1521 bp, Cannabis indica
gatgaaaaaattaatttcttgatgaaggatatttggtgattgattttgatcgcataagaaactaagcaatttgaatcgaatgagagagtaaaaaatcttttgtggctggagagagcatgatcctcttttgaaaaattgattattttttaaatacttttatgacattttctattcaaatacccatatatttagttagtttgattataaaaagtcatatttagtagtattaactttagatgttatatatatatatatatatataaatatcaaaatttctatttattttctcataattttgtaaatatccctaaaataaacttacctcaaaacatgatattcgtcatcaaactaaaggagagtgcaaaagagagtctccttagcacttctcttgttcttttagtaaataaataaataaataaatcaataaattaacatttttgttcgtatacttattatcattttaataattatttaatattttcgttctaaaactatgacctatatattattgtgcctctaaatttttcatcccattaaaaatggtctccaaagtattgagtaaattgtgcattctattaaattttgtcacacgtgacaaatagaatgatgacatgtctatttaaacaattatgacactagcgttagatcaacgccaaatgtgtaattaatttaaaaaactattttaaaatttataatttagttttacatatttttttaattattatatttttaatataaattatacatgttgttttttaaatatccatgttatcattatgtttgccacgtgcgacaaaacctgataaaatgaccactttacaatattgtgaatagttccagaattatttttaactgtctgaaaagttcaggggtacaataattcataggtcataattctggagcaaaagttcttaatccaaacatataaaatatataacatgaacatgaataatatataatagagcattactattgggtaccagtagtgtccaacaccttttataggtgacgcctcacgattgattaacgatatttcttaaaagctattttttaaagttatatgagactcaatacttaattacactaataacagtatgacactgaaaaagaaggtgctaagcaccaataacaataacgtcttttagcaattctctatatagtatgacaattccccaaaagtttgtcaagtaacttttaaaggtgtataatgattttatttgggtaaaatctgtagaatgttgttaacattgttaccataacttttgtataagatcttggagaataaagtctacctatttgagtctctcttcatcttactcttcgtttttttccccacagatgcagtgtgatgatttcatttattatttttattattaataacaaataattcttaacgaaaatcacaaagcccctatagctcagtggtagagcgtcagtcttgtaaactgaaggtctgtagttcgatcctgcatgggggcattttttgtttaatttcggcggtctattattctattatttatc

SEQ ID NO: 244085 - DNA, 1758 bp, Cannabis indica
gctaaactttaaaaaaaaaatatatatatgtatatagtagtaatgtacctttaatttgtatttcgatactcgggatcccgatccataagattattaatatataaattattaaaaataattttcgaatttattattataaaatacgggcgttacataataggcaatggaatgtgagctttgttggtgcaaggtggttgcgatcaaagtcgatggtagggagaagagggagtgaggatggtggtgttttgattggtggtgcaggtatgagggaaggggcggtgttttcgggttcgattggtagtgaagttgagggtgaaagtggggggatagagactggtgttattagttcgacattgattggtaaagctattacggcagtcaatgccaatactaatagatatattaattgtgattactctggtgggagtaataatgttgtttctaatgaggaaaatattgacttggtggatttaaaagaggaagcttgttgtggttactagtggtgggacgaaaagtgtcatgagtgaggttatagatcttgacaataatgaccttccaaataatatttttgtggtgagacttatggagcaggcctgccagctgccatgagtactctatgctggaattgtcgtgggcttgggaacctaccaacgtctcgatttcttatggatttgattatcctaaagaaaccaattttttttatgtgagactatttgtggtaaggaggttgttgtaaaattcagcgtacgtattggttatgaggggtatttttcgattgaggctcaagaccatagtggtggtattgctatgttctgttgctgaggaggctatgatacttagttattcgaaaaatcatatagatgtggatgtttcggttgagaatctagtggcatggaggctaaccggtctatatggtgagcctagctaatgtgaggtttaggcaagttacttgggatttggttcgtaccttgaaggttcattcttctctttcatgatgtattattggcaacctgaataatgtggggagtaatgatgagaagagaggagggaaggtgtagcctaactggttattggatggcttttgaggtatgttagatgactgtgggtttgtaacaccctactagattaggcgttttaccgtgatttaaatgctagttgtacaatctgttgctaatcaacatatttattggaaaatgtgtttaattaaattttttcataattagccttttaactttaaataattgaactttacttagtcgagatcccgtcttttaaaagttataactgtattacaaaatattaactacaaaagttgtcacctagcgactaacaaaatacagtatgttgtcctgaagatcgtgttgtgttttgtgccctaaataaaacctattttaatataatcagatttactaattaataaaagatcagaaattattttatgttgcatgcatggttcacataatttatttcataattatatactttatgtataaaatctattaagtccagaaaatctatatatttgttcatgattatagtgttgtcagcacagtggaatataatcatgattacatgttcaaaagtttaagtatcatgatttgtcagtacactagatttagactgacatgataatcagcgataaggtatacttacacctaggataagtgttatgtcctttccacggcattggcaaagtatatcagcatcagatgtatggagtacacattagattggatcgatattgatcttggataagat

SEQ ID NO: 244086 - DNA, 925 bp, Cannabis indica
gtgtatgaactggtaaggtaccaatataggtctgttatcttttttggcatgaatatgctacttttcatgtgtaagagtttggcaaaagggtaatctggatagaaatcaaattcttcggatatagccctgccatatccccaaacaagagtgggataacttataaagatcattggattactttaaccctcgagttttttcttttaaaaattgttttgacattgttggggaatgtaggaaggataagagataaattatccatgtagattaaagggattggatttttaatttgtgtgttgatcatatttatattaggtttgcctggccaagagaggaaatcagaaatcacatttatctttccatttatgtgtttgattttgaacatgtaatgtgagaaccacatggctaacctgagttgttgagaattgactgcttgttctatttgaacataagcatcctttgaaatacgacaaaatttatttccactaggaaattgtgttcgatgaggtgtaactcgaattttgtgatgcctatttttacagacagtatctgtttgagagtgaaatggtagtatatttgggaatctttgaaagccccactttgtaaccgcactttgcgttatccacgatcttttcccaataggactgctctctagtgtttgtcgctcacatctgtctgtaaatattctttttgcgttagagggaatctgaaggaggagtaggctttgcattacctctttcatttttttgattgcgattgtttgttctttccccaaggaaaagatcttttttggagtatttttgataatgggcttgtaatatttagtggggtacaaaattccctaggtaatacaattacgagaaattgttggatttggatttttgtgaggcattcatttgagaatttcaacaactcttgggctatgtgt

SEQ ID NO: 244087 - DNA, 1439 bp, Cannabis indica
atatttcggtattatgctgacgttggcaatcggtattttgtgactaataaatttttctttaaaaggtatttttataaataaaatcaattttaggtataatattgaaaagaccctttaaaaataacttagtatttcctctaactttttaaaggattatttatgtaattttcttaatttgttttttttttaattttttggctttgtttatcactgattctctaaattcattttttttataaatttaagaggaaaactttactcgcattcgattcttatttcatatatatatgatattttttttgacataatctcttatttcatttaaaacaattaatttttgttatcatctgttgctaatctctctcccttatactcctttatatagttgtggaaataatacgtaccaaacatagtgcaagagtaataatggtttaggtatcttagtgaagaaggttataagagagaggagatcaagtaaagtatatataataatggatgaaatagcacgggaatgagggatggaatgatgggagggaattgatcaggaaggaataggacccacgcaagagtggcagcacagcacagcaaagcagattaatttggatgagtgattgagagtgtgtgtgtgtgtgaagtgggggccattaatggaggtatagatcgaatgaatagaaagaaaatgaaagaagaagtggagtatgatttgatggtgatcaacctacaacagaaagagaaagagaaagagaaagagaagaaatatatgtcatctctgtccaactaccatacgacacgcttccgatggcgtgccatttgggtcctgattggtcctgattgacgcccacgcttttcctcactctctctctctctctcttctctacatttccctcttgcatcatcatcacattctaatattttacatatatgtaaccaattagggggaaagagtacggtattactagtaactagtttagctaaacatttaacaatcccattctaaattctaatccactctcaataaatattattattcgtagaatcatattccaactctgtttaatacaaatcccaaatattccccacagatttcagtacaaggaaacgattttgatcaaataagttaattttcatataataaacaccaaaaataaatacatcaaacaaaattcccacttattatttctaattaaaatatatatatttaaaaatgagttttgagaacaaaatgtcgattatgcaaagaagctccaaaataaaaaataaaagaaaaattaagttgggaaatttagaaaagttgaatatgaaagtgaaactacatataagtagtatcctaacacacacatacacacaaaatgttgaaaaggcatgatatcatgaaatgaaaatgttgcttaattttggaaaattaagagaatataaatcaaaaggaaaaaaaaaaaaaa

SEQ ID NO: 244088 - DNA, 1213 bp, Cannabis indica
ttttttttttttggaaaattgttggctgaaaatttgaatacccacgagttttatgataaactttgaatgtttgcatctttatgatagaacgttttttttttgtgtactcgcatatttaggtttattcgccttcaagtcaaaatttggtaatggttgggggtttcatacttatttctctgggtaacccttaggtctgtgaaacccccaaccactctgttcttccttggagttggtcattttttatgcatatgcattcaagttgtgactagaaccaactgagtcttgaagtggtgggggtgtcccattaacctaatgttcatgtggccgcatgacccttaagatatcgggacacacccgccactttttgagacaatcgttagttttttcgcacttgaacttaaaattttgttgttcgggtgagaacatttcttgtttaaattgtacttgcaccacgctgaaaagatcttctatctttcagatgaacgatctatcaaacagccgaagatacgatctggagatggggcttttattgatgaatctcaaaagagcgatagcttcatccccacatcactgtcgaaagatgaggttttttctttcttttttgtttgttgtaagaaatacaacaatagactttttttctctctttacacaatttgtttcgtacgttttattttttttttggttatagtttcttatgtttttttaattaaattgcagaaaataaaaattaaactaaagataagcttgtaaaagctttgagaatttcatgtaatctcttatattattatgaatttgatttatatttgtatttgataactttgtaacaaaattttgtcaaaaagctcaagaccatctccaatggatagtgtatatttgagttagatttggcctaaaatatactataaaactatatttggtctaatttttatgtttgtgctccaatgtgcaaattagttataaaagtcaatattatcattaatattcattaacatttttattaatgaatagtattaatgagtgtcaaatagataattaaaaatatgtcatttattgtgggttaaaatttggcacatgttattttttgtgccaaatttggcacaattttaacttagatcaaatttggcacacattttagatcatcgttgaagttaactttttgcaaaatattttaaaaaatagcaatgcatcatatttatagctcttcattagagat

SEQ ID NO: 244089 - DNA, 1547 bp, Cannabis indica
actactgacacccagtgagcagatttttttgatttttttaccagtttgtcccgtcttttcatcaattgactgaatttgacttttgataccccgtgaacctcaaaacaaggaaaatcaagcgtaaaaccgctccaaaagacaccaataaccaagaaaacgcttacttgttagacccgaaacacagcccaggtatgatttctcctcttttgttactctttctttctctctctcgacatgatttctttctcactgtctctccgttcttgcatgtatttcgtgggtggtgttctgagaatgataacttggtggcgaggtctctctctcattgtctctttgttctctcaaaatctttgatttgtgtattgtgtaatatatatatttattgtgttttaatatttgtgtaatatcttatatctgtgtttatattgtgtaatatttgaaatttgtggtttattttaattttgattgtggctcaaatttgggttcataatggctcaaatttggatttttttgtgtgatggtttaatactttcgaaaattttcactatagtcgatagtttaaatctgttagaaatttctttgccgactattctaaacgatcgactatagtgccaattattactaatagttttaaaacagtcgaaaaataatataaccaactatttttcaccaactcctattttactcaatttccaataggcgtcaatcataatttgtattcaaaatgatcttgatccctttttttttaagagaatttgtattcaaaatattgttatgattgaggcccccacattttttaatgtatcgcataaaaatatcaatgtgaaaaatcggaatcctaagaagaacaaaagatattagtcgtcacacaggtgggaaaaatcacacacgagccgcgacccgcctatttaaaaaaaccgaaaatcccacctttacaagccacacgggccgcgacccgccccttttcagcatgcaaaaatatctttgtatcacgtgggcctgtggtttcccaatttaatgctgaataggattttcagcatgtgcattttttatatatatatatttttagtccctcaatgcctaaataaggagcgaatttcagttgattttggtaagcaattcgggaggaaataaacagtagacaaaggagtacaaattttagagaccgaagtcaatactggaggcattcttcagagggttttcaacattattttcttctctcttttcttatcttttcttaagttaacatgtgtgattttgcttccatgaacatgagtagctaaacacttgattaaggtttagaaagatattgtttgacattgttttatggttttaatatgatttatattttcccagtttctatgtattctattttattcgtacttaattacttttaattgcttggctatcaattaattattttatgattttgatctgagatttgagaagtgagtgtcgattatgctatagtgaaatagaactgaatttcgatataggacgagagtacctatatagtttagacagcttatagggtttctgtgtttaat

SEQ ID NO: 244090 - DNA, 1602 bp, Cannabis indica
tattgagaaagtaatacagaagtttaaaatgtcagattctaaagaggttaatgtgcctctagctggtcatttcatattaaccacagatcagtcccctaaaactgataaagaacagaaggaaatgcaagaagttccctatgctgaagctattggcagtgctatgtacactatgataagcactaggccagatatagcctatgctgtaagtgttttaagtagatttatgtctaatctaggggaagagcactggaaaggattaaaatggctattaagatacctaaaaggcactgcaagatatggtttaaaattcaacaaaattggttcaaagatgaaattagcgggatttgttgatgctgactatgctagcaatagagacacaagaaaatcgataacaagttactgctttcagctaaatgaatgctgcattagttggaaggttcaactccaaccagtagtggctctatctataactgaagctgaatttatggccactactgaagcattcaaagaggcaatttggctaaaaggaatcttgagtgaaattcaaatgaaacccaggaaagtgattgtatttttagacagtcaatctgcaattcaccgttgcaaaaatccagtctatcatgagaggtcaaaacatcgatgttagactgttttggatcagtgataaggtagaagaaggagaagttgaactggaaaagattccaagtgaagaaaatcctgtagatgtaggtaccaaagttttatatgtcagcaaattcaagcattgcttgaatttgctgaacataacttctacctgagttgactggtatacccccttatggattttctcatcttgtttgctttgtttggattaaggtggaatttgtaggtttggtaatccaaaaaaataaacaagttattttttaaccggttccaagtttgttggaagttagttaattcagttatatttttcaatcctcagagttcgggtagttaaatctgttagtcttactctttatcttcatgtaagcctatatatataaaggcatgttagctctttaggaagcaagagagagagaaaaatcagagagagtgtagtctaattggggtgtgaagaaacagagtgaaaagtaagagtgtggcactgtccaagttgtgtttcttggagtgtctgagtgagagaattgggttttctcttgtactgctctgaggctgtgtaacatacctgttctgattgtaactttggatcttgatatgaatgaaatgaatacctaagggagtagcaggaagtaggcatttttgttggccgaacctggataaaattctgttcttaattctttgctttaagtttcatgttttatgttgtttgctgatcctaacctgtgatgtttatgtcgaattgaagtgttgttgatttacaacataggtaatatttttagggcattttacaatcttgtatacattattttaattaattacaaaatatgtgcaaaaaaaacttattaccattttcttatacatttttagatacaattagaaacttttttaaattttttataaatatatatggtaataattattgactattatatatatatattttttttaaatttctataattat

SEQ ID NO: 244091 - DNA, 729 bp, Cannabis indica
cctagagtctccatctcagctcgaaactcacgaaaaccttggaaagcatccggatcaagcttcttgatcgcgacggtaagaccgttgttgagcttagccttgtaaacgagtccgaagctgccgtcgccgacgatcaaatcagtcgagaaattcttagttgcgacgacgatctcggccatggagacctggagagaaggatcgaaggaagcgctctcgtcaacgccggcggcaatcgaagtcaaccgagaactggcggtgatgctgcgatggcgattccgatcgggtgagtgttttgccttcctggactgacagattatgattatggcggctaatattagggttatcatcaagaaactccccatggcggcgaggacagcttggaaagtggaatctatggccatgaagatagatagatgagagagttggaatatatttctgtgagattgaaattaggggaaagagagggagaagtgaaattgatgaggaaggtgataaggtggagatgaagatgaagatgaggaatagtggtggtgatggtgatggaatgagaagtttgactgagaaatgagaaccagcagagccgccattaacggtaattgggtgagtttcgtggaagatggtttcctcttatattattatttattacaatattttactcagaaacatatattataattattttctaaaaaatacttcaacagtatagaaattaaaataaataaaaaataa

SEQ ID NO: 244092 - DNA, 989 bp, Cannabis indica
aaaaaataaaaaaaaaactataaaattttaagagaatagtagaaagtaaaaaaaatatattatttgcctattagagcaactccaaccacaacatcatatttggtgttgcactaacacaatataacactataatttttttcattccaaccataacactaaaatttacacaaaaaaatatattttattattatataaataaaatataatatattttaatattaaacaatatataaacaaaaatcaactagtataaacaaaatgtatgtatttacccatacagcccatacagtacacctatacgcacataataacttatataccaattaatatgtattatctaagctttggataatatatataaatacatctatatatattatatctaatgtcgtttcaaattatttgctcaatactatctgtaatccttattttggccaaattatacattttacaaaacaacattcggataaacttatctaattattaacaatttactaatttaattataaccaatagctaaacattaaatatctaattatgatagaattgaatgttatttttgaatatccaattagatcggattagatatttgatgaggtgtcataaaattcaatacatctaacatctaatggaactaactataatattttcatttagtttaaataagtcattagattttatgtggttatacgtgaaaaaaaataatatatatatatataaattagactaattagaatttttgtccccagacttttacatgtatcaaatcatatctctctgaacttttaaggtcgtcaaaaatcactctacattattgagattattgaatttaaaaattttgatctaattttagtaaaaaaaatctaacataaatgaaaagtcttattttgtcaatgttcgaggggcttgctttggaagctatcaaagtttagggagcatgatttagtacataaacaatcactaaattaataacactacaaaaaactgct

SEQ ID NO: 244093 - DNA, 1278 bp, Cannabis indica
tatacattaaacataatcatgaaataaatcatgtgaaccatgcaacataaaagcaatttctgatctttatgaattagtaaatctaattaaattgaaatggattttatttagggcacaaagcccaacaattaacaagttgtgtcacatgtgctctccttagggcgaatatcttcatgtgttatatttagcgaacttagtacctctattttacctcttaggttaaggtgtcgagaggttgtgcctaatgatcgacgcgacgagatggcctaaacgagattaaaagggaaagtttgggcttaaacaccatttcaccttcttattcaaccctaaccaccttctaaccctatttcgtattccctgccgagttcgtcatcatcctcatcaaaaatcatcaatctcatctcacaaatccaattttttttcatctatttttcaatccttcacccttaaccaataacactattcccctcatcaacccatctcttcccttccaaatcatacctaaaatccctgatttacacccaatttcaaaaatccactattcattatcttcaacctcaagattttcaaaggcattcatcatcggaggttgtgtaaaggtttctctcatcaatgtgagtatttttcatgattattcttcaatatttttgaaataattgtggattttttagattattgcaagaattggtgtgtgtgtgtgtgtgtgtatagtgtttatcttagataatgttgtggtgaatattgtttgtgtgtgttaatactattgaatattaattgggtattcatctggaagtgaaaaaattatggggaggtgctggaaatttttttgagtgatttttggtttgagtgagaatggatcttaagaggtgaagagttgatgaagagggtgcttcatcatccaacccgccaagggtttcgagaaggtcaaatgtagatcggacaaggtttgttagtgctaaggcccaagatcgctatctagaattgaagaatatggcatttattgatgataggggtattgatggtggtgatactacgatgcctagtcacccactatttgaagaaattaggctacaagtccataggagaggatgggtgcaatttgttcatgttaaggagagagtgaaccgaaccttagccctagaattttttgctaattgacccaaaagaatgaatgagatagttaaggtgaggagtattgatgttccagacaactagagcactgataactttaggaattagagttattttcacaatttttttaaactaaaattggtttag

SEQ ID NO: 244094 - DNA, 1623 bp, Cannabis indica
tttttcttcatcaaaattgttgacatgttgctttcggtgtcatcatcatcatcatctatcaatcaaaaacacacaaactttcatcaaaaacacaattttattttaatttcaattttttttccaaagggtaaaattgtcttatcaaataaagttcgatccccaagtgaccacgtcatcctacctcgtacagaactacagatatttttctctaaataatttaaattaattaaaacaaataaataagtaggacccaccaaccaaagcccacagtggaagtagtacttttcttaatttagaaataaataattttaaaaaataattataaaagtgattttagttattctaggaattttaattactcacacaaaaaaagattatccattaaaaaaatcaaacaggtcattgtcttaggttagtgcgctatagctgtctctttaaaaaacactttgataagcacaaaaacttatcacttcacttattatgatatgttaatgtacttttctgacacacacacacaaaaacataaaactcacttatttattttttaaattttcaaatatctgataatattatcccttcaaaaatataaaaaatgataatttattattatgggaccactttagttagaaagaatcattttaaagttcattgatggtatttttggtaaattggccaccacactaatataaataattatatttttttatataaattgtaattgttattagatattaaatactaatcccaacattaaattattttgtagagtccttgtagtgtggtgttcgactatataagagttatatcacaacacttttttttttttgtttaaatgatagtgatatttaaatgagttttattaattatattagtaaattgtaaatactaaattaggggttaataaattatcatatttcattgaaaaaaggggggttggattttaatattaaagtagtggacttaaggtgggaaaagaattagaatatttccaaaaataaaaaatattatattagaaaaggtaaagttaaattcaccaatgaggaatctacacaaagttgcttcctttgctctcatgtaaataaattaaaaaataaaataaaaataaaaatttaaaagtagctacttttgtttcttgggaagagaaaaggaagaaaaggggaaagaaaaagaatagattgacatgcaaagagaaatttataaataataaaataaatttaaaacaaaagaaagtaataaggaaagatagatgattatcatgatggccttcttgaagttcttcaaagcaagtaaaaaaattgttggttttgtaaagcccatgtattttttgtttatattttatttggaatttaaaataaagtaatttgaggtataaatattaagtttaattttggataaataaatatttaaattattattttagaatttttataggtatttaagtaaattatcacttgtcaattcttaatcagtccaagtcattatatttttactttttgtttaaaaattaatttaaatatactaataaaaaataagacgtggataataacttgataattaacaactaagtatttataaaaattttagaaatataacttagatattattacttaaaaaattatttat

SEQ ID NO: 244095 - DNA, 1190 bp, Cannabis indica
tagggcataaattcccaacatgatgaacatccctatttgaaatacaaggcggagttactattttctttgtgacagttactatttctttaattttacaactttttcatcagttttcttccatgctccatgtctctcatgttagcattattggaggatcttaggtgtggttaaagcagctatctacaatactttccttggactataaaaaagtggatactcaaaatatgctaaagagattgtcgtttcctttgaacggtcagtgtttcgtcgtctttccttcacgagccaatgtacgccaccttagccaaagctgcaagtcctcaacttccttctttgcctctatatgcccctttgtcgtcgctcccaacccaccttaaagatctcgtatacaaatgcagtttagatctggatcgaacaactctagaattgtgttcatcattgatcatcattgttcttaattgaacaaataattaaagtttatcttaattatttgtaagtttttgtatgctaatgatgtggtgtggtaggtgttgtatggtatggatcccactgccagtcgtaatcaatatctataatgtcattcaatatattaattacattctggcttctccttaacaaaggttctccagttatctctactgcataaattacccaacttcttgtttcatcaaaaagtccattataaaagaacaaagtaaaacacccacttgagatattgggataatatctctttccaagctccttaaatctcccccaagcagaatagaatgacaaaattcacaaggtatagcatttgcatttacctagaaggtcaaacacattcagtaaaacattagtaaaattaaataaaaagaaactaaattagaatagaattcgattatatttatattaatttaaacagtccccgacaacggtaccaaaatcgttttgtgataaatctaacacgcaagtatacatatcgtttacaagtaatagactcacaagagtgaggtcaatccgacaaagactttgttgggattttatgccctaaataaaactcatttcaatataatctgatttgttatcaataaaagaagaaaacacattaaggtttacatgtagttttcatgtttatggtttaatgtgatcaaaatctgttaagtccaaaatatatagttattcacaattacagtgatgtcaacacagtagaa

SEQ ID NO: 244096 - DNA, 1000 bp, Cannabis indica
ttgacaacatatttgatcttattcacatagatatttgaggaccatttaacataataagtattgaaggctataaatactttcttacaattgttgatgacaaatcccgattcacatggacattcatgcttaaaaacaaatccgatgtccataatataatacctatgttctataacatggcatgcacacaatactcaacacctatcaaagccattagatccgacaatgccaaagaattaaatatgcaaggcttttatgcctctaaaggcattgttcattaccgttcatgcgttgaaagaccccaacaaaactctgttgtggaaagaaaacatcaacatattttaaacattactagagctttatgcttccaatctcatttaccacttccttattagtcttacctcattctcactgctacctatttaatgaatagaacaccctccaaagttcttcaaggtagcacatcttatgaggtacttcacaaaaaacccccgatctatgaccatcttcgatcttttggatgcctagcttatgcctccactcttccatctagtagacacaaattttttcctcggagccgtgcctcaatttttattgggtacccccaaggcatgaaagcatacactctacttgacattgaaaccaagaaaatctaccaatctcgcgatgatattttttatgaggatatttttcccttaactggacaccagtctatcactgccataagccagttcttttagcctataatcaaaccaatttttcgccccataactcaggccacaaccccctgccaccacctggtgtttatcccacaccagcaccttcaattgacacaaatatgtcaaattcagatgcactacctgatgccactcccacatcagaaaccacctctggtgcccatcccacaccagaaattcaaataactgatgccattcccacatcatcaattaactctggtgcccatcccacaccaaaaatttagacaactgatgccattcccaca

SEQ ID NO: 244097 - DNA, 1927 bp, Cannabis indica
taatattttttttaagtaaaaaaaaatctatactacattatttacctaaatttggaatgaatttattctataaattgaaaaaaaaaaataagcatctaaataataacatgagattttataatttcttttttattttttatgtaagaacttgtattaattgtagattaaatataattcaaaagaattcattaacataattaagttttttttttcaaacaaaaaaaattatttttagtctgaattctctaagttaatattttattagcgtttttttttttttttttttcttaaaacagtagatttatatataaataaaaataaaagatagaatggagggaaatcagattcaaaactagatctaccaattaaagaacaaacacatacactaattatgttaactaacaattatgtattgtttctatctctaattttatataatctaatctgaaatttgatggtggacttaagccttccttagactctatgtaggtctgcctatgaatatggctagtatgatatttttattgttgtttctatcatatatatgaaaatataagaatcaagctaaaaaaaaatataattttttataattgttttacattcaaaataaaaaattaggattcattcacttaccttgaatgtaatcgctctcttgacaacaatgttgatcttatccatatgtaagtgtaatataaattaattttctacaaatttgaagagattttataagattttgagagattttttgaaaaatagaggaagagcatgaaagcaccatgtgagggagaggactttttttttttttttatgatatgatttttgtttttttaattaaaaataaatataaaataataaagggtattattgagatataaaagtttcattaaaagagaaggttaatgtagctaaatttttaaaaatgaagattactaccataagctaacctttaaaaagggaaagcctttaatctctttggagaggggctgtagcaatttttgaacctttgacttaagaaattttttttttaataaagacaatacgtacaactacaccacacaacacaccattttaatactattttaatggctttctctctcttggttctagagaactctagtggcatgcatccctctgttcctccaccgcaaatggtggctttggtccatccgaatttgttttgtgatggtttagttcctcaaatcaaattcttctcttctaagttttctttgtttccattctctcaatccattaactcttgcatttattgctctgagtgttataatgaatatccatcccatcttaaaatctctcttcagatcattaaatgtggaaatcccttttatcttctcctcagcccttacatctgctgtttctctctatctctctcatctttctcacccccaaatttcattattactcacgtttatcactttgggttttggaaaatggaggcggagcaatggtttaatgatgatttgaagcttagaatcatcatttttcctattgggtctaggatcctggacaagatggatagatcctccaagagatcacaaagggcactctggttttatctatttaaaggaaggtccaggtatcatcttctccacttcacttcttttttccattttgttgttcaaactttgcgggtgtggtgtgtgtttgtcaatatggaagagttctttgctaatgtctctaattccttagccctaagttcagaagaatccactgtttttacttatgaggtgggtactgttgattctccacataccactacctccttcttcgtcttcataccattcgccattttaacagatgttaggttatttttagtattaattttagaataattttaatagagttttaatcgagtttggagcatttttacgtttgtctttaatttgtgcagatttaaaatagaagaagatta

SEQ ID NO: 244098 - DNA, 1545 bp, Cannabis indica
cttgagacacttgacctgagttacaactctcttgagcttggaggttcaattccgtgcacctttcgaaataacatgagccttttaaaatatcttgatttgtctcgcaataatatagactctgtcattcctaattgcttatttagttttcctaatcttgaacacctccacctttctaatactaaactgcatggagttatctcaagtgatgtagcaaatttgacctctatagtcagtttaaacttgagaagtaatgctctagcaggaaaaatcccttcatctatgggaaaactctgcaatttgaaagaatttgatttaggaggcaataattacaaaggcagtgtctcaatggttttcgaaagcttgtcaggtcgcctttctaaaagtttgaagtcactgaatttggggaggaattttttcgattcctttggtggccaattagtggataaaataaaagattttgaaaatttagatgatttctctcttcaatctaataaattttcaggccccattccaattccaatatttaaaaacataatatccttgaagtctttagatctttcttataacaattttagtggacctcttcctgaaagcttagattctctctcaaagttagaatctttctacatttccaataaccatttcaatggtcctctaccaaaaagtcttgggtctctctcacaattacaaacactaataatttatagaaaccatttcagtggtcttttaccagaaagtcttgggtctctgtcacaattacaaacactaatgatttccaataaccatttcagtggtcttctaccaaaaactcttgggtctctctcaaatttagaatatctttcaattgaatcaaattcttttgaaggtaatgtgtgtgagtttcattttgccaacctcaaaaagcttaagcacatatttgcttctgaaaataacttgagctttaaagtaagtttagattggactcctcccttttctcttggaaccatagaaataagaaattggaacttaggtcctcattttcctacatggctaaaatcacaaaaagatatctttagaatagacatgtctaatactggaatttcagatatcattccttcttggttatggaatttttcttcagctgatattgacatgtcaagaaaccaaatttatggggaaattcctaattttaaaaatgatggttattatatgttgaacttcagttacaacaagttgacaggaccattacctcatatcccagttcgaagcatgctagatctttcaaataattacttgtctggtaacatttctaatttcctttgtgatccaaagagttctaaatcaaatgttatggcattatatctcgaaaataatcttttatcaggaaagattcctgattgttggatgtattggccatcattaaatttgataaacttggataacaataatctaagtggaaaaattccaagctctgtgggatctttactcaacttaatgtcattgcatctacaaaataatagcctcagtggagaaataccaaagactatgaagaattgttcagcttta

SEQ ID NO: 244099 - DNA, 2318 bp, Cannabis indica
aatatatattaggtggggtaattattggtaagtaagggatagtcaagcttaaaatatgtatcataagtaaaatatataatatggttatgataaaaatataatagacaacaagcttgtaaaggtggttgctgcttgagattgtcaagcttgtaaacaattaacaaactgcttaaggaagaataacttataattaagttggaaagtacttgtataatttaagcagttgaagatagagaaaaactaaataaaggttttggtgggacaagtgctttttgctcctgattaggagtgcctcttagattcatctaactttttattttataggcctatgatacttgcaggctaagattcatgagacaagtccaacctcagttaaatcttatctcatatctatacaagtgatagtgatacacacttataatattgtgtggaaatagattataagtgtgtatattataggaaggttaagactgcaataaaggatagaaaaattgagatcaaacttgaagaagtaatctcagcactctagagatgaaggtggagaaatttggtaggtctaatggagatctaaatctaagaagatggagacctaatcagaagaaatcatagaaaaatcgaggaagaagtcaaagaaggggtccacaacaagggaaacagtcaaaacaaaagaagatctaaactcaagaggacctaaagactgcaataatattgtgtcattgccagaatcttacagagaggttaagattgtaacaaagtatagaagaattgagatcaaacttaaagaagtaatctcagcactgaaatctaaggatttagagataaaggtgttgaaacttggtagctctaatggagatctaagcctaagaagagggagacctaatcagaaaaaaccatggcaaagcatgggtccacacaagggaaatcatcaaaacagaggaagatctaacttgagaggacctaaagaccccaatggatgctatcactgtggaaatgttatttttacaagagaagtggtggaaaacctaatttagatcatcaagaagatttaaaaaaacagaacaataacaagaataactatcataatgccaatctcagtgatggttatgatagtgaggatgtgtatattattgcatcatcttataaagatgattggattattgattttgggtgtacttctcatatgactaataataaatcctatttgttaattacaaggaatctaaaggaggaaaaatgatttaagggaatgatcagacatgtaaaattgaaggctcatattctattaattttagaatgtttgatggtattattagaatctaaaataatgttagatatgtgcctgatttatctataagtttaatctccataagtgtacttgatgatctaagaatcgtaagtgaaattgatgtaggtaccattaaactagctaaaggttttatggtgatcataaaaagatagaagaatggtggcctatactacttgcaaagaagtccaatgacttgctgctacaatactaaagaacatgtaacaaaagactctagagttgtactctatggcatagaagactaggacatataagtgaaagaggaaaacaaatcatgagtgaataacaaatacttggtaagaataaggtaaataaggttgatttctatgaattttgtgtgttagaaaaacatcatagactaaaattctaaattggcacacataaatcacaatgtatcctagactatgttcattcaaattaatggggacctgagaaaacactaacctttggaggtagtgtctattttttgtgtattatggacaactattctaggaaattttaggttttcttgttaaaatataaaaatgaagtctttcaaaagtttatccattggaaattgctcgttggaatctaagtaacagaaaactgaaaacataaagaacatataatgacctagaattttgtaatgaggaatttacagagtattgttaagacaatagaattataaggcactggacagtgaggaaaaacccttaacaaaatggagttactgagagaatgaacaagactatactaaataaagccagctgcatgctattcaatattggcctttccaatgatttctatagaaaagaagtggtaactacaatttacctaatcaatagatgccactccagtataatagaagggaaggccccagaggaaaggcggtgtggtaaaccactagacatttctcatataaggtctttggctgtgcaacatatgcacaccaaagtgttggtaagttagagtctagggctctaaaatgtattttttgggctacccagaaggagtt

SEQ ID NO: 244100 - DNA, 1121 bp, Cannabis indica
aaaaaaaaatatatatttaaaaacaggatttaaatgacaagttggacttgtatttttttattttattttataagcttggaaaatatattatttaaatattacttatttttatattgtaaattatttcgaattttttaaaattttacaagatatttaaataactataacgtacataattaaaaaaaaattagactaaaaaattttttagaataaccaaacatataagaggatgtaaggagtgcattgtagaatagcaccctaaattatagctagagtattattatgggacatcaaggtgcctattacatctatgagatgacatattataattggttgaccgtttatatgatctttgttaaagtaaaataaatgggatcctaatttatctactagcatattacaccttgtgctaagcaacatgagtgtgatttaacatttctctaaattaaatatacaaaaatgaacttgtattcttgggcgggttggtaatgcaaccagggttatttccttagacattttatttgttttggcattcacaaaactttttactcaatttttttgatataataaatttattaatatatttaatgaatataatatagggtgtttatacaatgtaccctttaaaattggtacaccgatacatttcttactgttttaacgtaaaaaaaaaaaattaaaggtcgagtaaaaagttataacacgttgaaaattgagttcaaacagtatattgcacgaccgtaaaagaaaaagactaaaagttttttcttgatgcctaaacagatttaagtgcatcagtgcactccttttaggaaacgcaccataaaattttcctataatatatagtattaacaaatatagaaaaattttatagtgcacccccttaaaaatagtgtatcgatgtacctctatctatttcatatctagaagaattttttagtctaattttaatagttatttaagacatactgtaaaatttgataaatttaacatgccaaaaataaggttcaaacagttttgttacaagcgtgactctttgatttttcacgcgtgtgaaataaactatttttttaatttgttaaattattatgaatttctctaacattttttagtatgtactt

SEQ ID NO: 244101 - DNA, 1656 bp, Cannabis indica
ttggatcactcaacatatagtctcatctctaaactcaccaaaataaatgcctaatacaatattcattctgacaaattttaaagaaaacatgcgagaaataaaatataagattaaactttactaaacgaaattatactagaagacgatccccttctttgtacactatttatagtgtattacgtgctatggaaaaattgctcaaagagaattatttccaataagcaatttccacccgtcagcctagttcccagtgatacttctctaaaggccttgtcttcatgttgcttgtttgggaaagttattgctcccatggttgtggaggagatcaacgtgactgatttcgtggcaaaaacctggaaaataccagtctctgtggctactgtagtggatgatgtgaagagttcgaatgtcttcaagttcggttttgaatgtgctgatcataggaactgggctatggagaatggcccttggtgtgtgcatggttattggttggtccttcgagcttggactcctaccgttgaagggccggtggctttcaatctgttgcgtacatggattcagattcataacctccctcacgagtatttttctaaggcaaacggttatctattaggggggttgttggaaaagtggtgcgagtagaactggatgaaggaaagccagctgcttggtgtagtttcctcaaagtcctggttgatatcgatgctgaaaaaccattattctcaggttgtttttttgatattgcattgggggtgaagaagtggatacaagtgaaatatgaaaagataggcattttctgttatttttgtgggtgtcttgggcaccaacgcagaggatgcaagctgacatctccggtgatggtctcgaacagcgatggaatcctttttcccatgttcggcccttggctttcaaccttatcctcataccagtgcgtttttcctgggccgaagtcaactgtctcccgtagactaccagcttcattggcctcggggaagaatgctggaagtgtgttattgctgccggcatccatggaagatggagatgttgaacggaggagcttctctgcttctcaagctcttcgttcgagacgaccagcgatggggacatctcacggtgctactggcctcgggaagtcgaagcgtgcggtgtggttccctaaaaattgcatttctcgtggtgagagatcgattgccatttctggctttggtggtgaggcagggtctctgcaagcaggaaaggaaaagaatgacttacctgttttggagatgaacagtagggaccaaaggattttgaatatgatgaccgttggtgaggataaaaggaatgatgggctttttgttaatgggtcgagtgatgtgaatgttgggctgactaatcatcaaataagtaaaggaaagagcccactgtaccagaatttaaatgtgaataatattgttaatgggcctccttcttcttctaaggaaaccattcagtgtgggcccgagttagtggagtccttgggtaataatacaaaaaatttggaggggctgtctaatttagataagggctctaatgatattgggccgaaccattatcctcttaatgtccttgggctcgtgggggatagctcaaaattgcctagagaaactaatgaacccgaggagcatgctaatgaag

SEQ ID NO: 244102 - DNA, 780 bp, Cannabis indica
ttgattttttatttatataattacatgtagtgtgtatatttatttaattgcgaatgtaattatgtaaaaaaaaataaataaataaaataatttataaaaaaacaataattaataattttaattaataatgagagaaattctttatgcatttacaattggatgtatactattgttaacctaaaatttcattaaaaataatgaagccttgtcaataaaattagaatattaattatagtgactaaataaaataaacaataaaaatttttacgtggttttgtagttaaaatttatatacttcacgagtcagtattatttctaattattcttttataatgttttttgatacaaaataatatttttggatattttctatacttaattcctcaaagtttttcttcccaaaagatcgtctgtccttatagaaagaatttcacccatatttatagtatttttaagaaggtggttatttccctcgttttatctaaataattatttttgggattgtggacaaacccctcatttttccttatttacaacgtgtctgaaatcaaattactgttagtaactattttttaatcttatctagatgtgacgagtctttgctgaagtggtgcattcagagttgtctcgcattcttttgtaatagaagaaacaacgagatgaccattctgacacaactcgatgcttgctcccgtcataacattaagaagtggtctaaagctggttcttctggattggtcttctcacattgttaatagagacagatccattcttgatcac

SEQ ID NO: 244103 - DNA, 1416 bp, Cannabis indica
agtggccgtgtctatgttgcccgaagtgtcaattttaacgaaagtgaatttccttacaatgagctattctctgtgtcaccctctactcccactacacctgtctttcccaacacagaatactatattgtacccaactctatgaatattcaggctgctccctcaaattctcagcccacaaatcaatctctctctatacaggcctcaaacaacaccacttctgcatctcagtcatcaccccttgctgtatcgccatctcacagcccacaccaagatcaatctagctcaagtcacagcttctctacagcctcttcccttccctaccctcttcctactctcagatctgagccaactcaaagtgtcacccacaatacaccacctgtcccaaccaataacactcactcaatggtcactcgctcaaaagctggggtgtttaaaccaaaaagttacttcactcaaattcacaatctgttagaaccaactaatgtcaaacaggcccttgccaatcctaaatggaacaatgctatgaatcaagaatttcatgctcttaagaacaagaaaacttggatacttgtccctcctacaccagaaatgaaagttattactaacaaatggttgtttagaatcaaatataatgcagatgggtccgttgacaggttaaaagcacgtcttgtggctcgtggatttcaacaaacaccaggtctagactttcttgagacattcagccctgtgataaagccctgtacaatccgcattatcttctctcttgctgcaacttatggctgggatattcaacagatagacataaataatgcctttttaaatggagaactcaaagaagatgtgtttatgcaacaacctcaaggctttgtagaccccgaatttcccactcatgtttgcaagctaaacaaagctatatatgggctcaagcaagcccctcgggcctggttcgatactctcaaaacaaccttaatacaatggggctttcacaactccacttctgacacaagtttatttttctccaagaaagataacaagatggttttggtattggtttatgtggatgatatattagttacaggggactgtccaacacaaatcaacaacatcatcactgctttacataacaagttttccctcaaaattctgggatcagttcattacttcctcggttttgaagtgtttcgtgattctaatgccatctacttaactcagaggaaatatattcatgatcttcttgtcaagaccaacatgttagatgccaaaccaatgccaacaccaatgtgtgcctcttccaagctttcctcaacatcaggcactcctcttacagatgctacacaatatcgcagtgtcatcggtgcacttcagtacttactaatgacacggccagatattgcatttgctgtaaacaagttgagt

SEQ ID NO: 244104 - DNA, 1511 bp, Cannabis indica
taaggtagatcgagttgacccatttaacccataacaagtcgtgcttctccattatagcccaaatatacttagccaagactgctttgttccaaaggggaccctctcgaaacccaagacctccatacttcttaggaaggcaaactttttcctaagaagccaagtgaaccttgcttttgttccccataagaaccctctgtaaagtttttcaacttctttgataacactctggggcagtaggaatatgctcatccaataatttcttaatcccagaagaactgagtggatcaattggactctgtcagcaaaagataaatgtcttgaagcccacgtgtgaaccttaagtttaattttcctcagaataacatcacagtcttctaccttccccttagtaggtcttaaaggaacccccaaatattttagggggaatcctccttcctcaaattgcaaatcacgcaatatagtctctcttgttatgttcgagacccctactaggaagatttgagacttaactttgttagcttgcagccccgtaacattgctgaaatcatccaaggaaaattttaaatgcctcacagattgaaccgtccctttacaaagcaagatgaggtcatatgcagaacataaactagttagttgaagaattttccacattggatgaaatctgaaagttccttcttaagattccactttcaattttcttgtcaattactccataacgagaacaaaaaaaaaagggatattggatctccttgtcttaaacccttggccccttgaaactttccatgtaatcttccattcatcatgattgaatacgaggtacctttcaagcaagtcattatccacctaacaaactagctaggaaaacagtaagctttaaggagatcttctaaaaaaccacagtccagcgtgtcataagccttactaagatcaatctcgatagcacacctagctgaaacatttttcttgccataatctttaataagatcttgaaaaataagaatgttgtgggctatggacttgtttttaacaaaagctcctagatgctagtgaattaaatctggcaaaacttctgaaagtctcaagcacaatagctttgaaatgcatttatagatggttgaacaacatgctataggtctataatcaatagccttagttggattatcaactttaggcacaagagatattgaagtttcattaaactccgaaggcagaattccagtatcaaaaaaattagtcacgactttactaacctcttgtccaatttctggccagagagctttatagaatccgaaaccaaacccatccaggcctgggctcttgtatgtggggatactgaaaagaactgctttaatctccttttgagtaaaaggcttcagcagcttaagttattgcatcacatcaagcttgttcccaacagctatgcagcttaaatccatcttcttgttggctgaactatgacttcccatgtaactatggaaaatgcttgcaaaaaatggtcaactacttctata

SEQ ID NO: 244105 - DNA, 3206 bp, Cannabis indica
agattttaatccaatgacgaataataaaagaaaatttttaatatttatgtttagtttaactacttaattaaaaaatgctaaaaaaaatatatctatttacactatatcaatatatttagatataaaatatttaagtcgaactcaattagattaatgaaagagcacaaactagaaatgaacataattggagagcacaaatattaataatttgagcaatttaattgtgcaaatacaaagtaaaacatattaataatgagtgtttttttaataatataaattttatatttaattttaaaaaaataaaatataatttaatgcatttattaatattattatacaataaagtctaaatatttcaaattcaagtattatttagattctgatgtctaaattttaaaaaaaaattaaaaacaaaaaaacaaaaaaacaaatacactcttagaagatttacttaagactcttatctaaagagttcgcatacttcagctaatgtaagacgtttgactcacaattgtgatataagtttaaatctaactggctacagaaatagacgtaaaaacaattcggctaactactgtgatataagtaaaattctactaactgttgcggtataagtacgaacaattcggctagctaccattatataagtagaacaatctagctagctaccataatataactaagaaatattctaatagtaactatgacttgagtatgaagtccaattctatatcgtggtaactatgaatctaatttatggattacattatgattaagggagtacgttcagctaagaattcagtttgttagtgatccacacccgttaagatgtatcagtaagttatgttaagcaaaataagatatgataagaaagacgagtcatgttaagtaagacaaaccatataaagaaagacaagctatgataagtaagctaaactaggtttgtaactgtaatatctaaagatatgcttcaatagaatatattaatattatgtatgtagtattccaattatttttgcaatgtattggggattctataaaatcttcaacaattttttgtcaaactaacctctttacgaaaaaaaaccacgctagagaaccacgagcacaggcagagaccacaggagaacccccattgctacattgtcagggagccatagatgaggttgttgcttcgccaaggagccacgaacggggttgctgctttgccaaggagccactggaacctccttcccgctgatacattgtcggaaaccacaattgagttgcggttgagaatttcaacattgaccacaagaagagaggaggtcgatattcaaaaggataagaggaagaaagtgaacgagagtgaaccctagtgttaataagattatttttaaccttttaagtgggtgtaactgtaagattagtttcgaaagaaactttttaagaaaggtgtagacttataattatggagtaagtaggttattttatagaatttcccttataaaatcctttaaatttgaataatacaaagactaattttcacaagtaggataatccaactaatataatagttatatggggaaaaagtgtacactttttagcataaacggagactagcttccactataacatgttatcttaataatatgtcctaataatactagtgtccaatcctattacagatcaaatgaatagaaaacataaaatttaaacatgaacacatatattactgtaggacatgttcaacatcctaaacattcattggatgtgctcaagaatgcatcagactactgtctgatgttagcattctccgaacaatgaaaacttaaaaaattgttaaagatgcaatatgagggaaaattaatctctattaacaatccatcttttcctcttttatcatactaccatggagtctctaattttctgtgatgtagtcaagtagcagctgatacctttgtgtaagtaactaatgtgcaaggtgtaaagcagaaaactccatctggatcaacttcaacccggtccagacaacttgctccttagatctttgagagcatctactacatctgaatcaagattatgcttcaacaatttaccttggaaagaactggatctgaaatggtagaccacaaatcagtagcagttgcatcaattgtcattagcatattttttttcctgatgtatattgaaaatgaattgctttaacttaatcatgatcataacaaagactagtctggattaattgacttaatcaaaggcaggcgagcacaaggctccacaaactgagatctgatgcccaatgaaatatgcatttaaatggtaagccacagataaattagattattaagtcaacaaaaatttaatataacatgtgattatataatcgtggtgaagtcttcttgatcttttcaattaaacgtaactattgttcacccttctttctccattgaattccaagttcatcaagttcagaagtcaaaatacttcaaaacggagcatatgtttactgactcatgaggatgtacaacatacctatgttcttggagcatcatctcaacctccttctttgatgctttaatctaccaccaaaatcaaaataacattagaattcaaggtattaattttatgaaaaagaaaactaatcaatacaaacaacttgaattcttggtcaagtttttcttcacgttcaaatccaatagaacatctatattgcaataacctgacactgaaaatttaagtagaaatgttttgaatcgaacaagagtactgtggccatgtgtttatttatagggattatagttaatatatatagggattatagtaaatatggctatatagcataaaattgttttttttaattattccatatgcacatatctaaagagtatctttctacattatttatttttttttattccaatccgcatatctagaaaaaaaaaataatttctcttattattattattttcatttttaacaataaaaattgaaaaagtgttgatgtttcttaaaattaatattttgaattacaaaaaaattatctttctattactatttttaaaaaaattaaaaacaatatttataaaaaatgaaaagtattataaaaataaaaatattacggttaaattaaaattataattaacaacatataaacaacacttaaattaaatatttttttaataaaaaataatgtttattgaataacataaaaaaactaattgtac

SEQ ID NO: 244106 - DNA, 1075 bp, Cannabis indica
ttggcaagtctagcaggggaggttattgacgttcagatggcggatattccacgaattgtaaccaaggatttcttcacattcaaagtctggtgcgatatcaccaaacctctatttcccggcctattatttccttcgattggggggaagaaatggctcccgttcagttatgaacgtcttccatttatgtgctttaattgtggttttttagggcatgatactcgggtttgtgcagaaactcccaagatgtttgaagatggtttgggcaattggaagcaaacatatggaccatggctaaagctgatgacaaacgagaagctataatctattcaaagtcagcgaacaatgtgttaatacaacagaatgaaaaatgccctgctctgaatgtcgaagaaggctcttcgaataacaagcagcgtactgtgttgggagtcgaagttccagctgctatcaacaagtctcctggaaagatggcagatgtgaattcgggattgtttaactctggttctaatgggaattactttgagaacttgacaagacagagggataacaagttactgatgatggaaaaggggtaaagcagtcaagttaattgcaagaggaatggttcttggaggaatgatcatgaatctttaaagggctttgctgctatggacatggagcgtgagtttgattcggaaggcttgaggaagagcagacctggtgaagaggttgattataataatttagtggaaattccaataagttatgatgttgggattgagaggttaatcaaggaagacggaccattaaagaggagaaaagtgactccaagaagaacaaagatcaaagggaaaggggttcagacagagaattctacagtgcagatggctatgaatggagggggtactctttcaaggggaatttataaggaattggatttgacccttgacgacaatttgaaagcggcgaacctaggtaatctaggtcgccgagcaccatgatggccatgttttggaatgtccaaggacttgggaacccttggacattgaatacttttaagtcccatgtcaaaaattatcatcccgggatgattttt

SEQ ID NO: 244107 - DNA, 963 bp, Cannabis indica
atctagattctggtaaaatatttccaataattgcctgcaagaataatatcatcaacatacactaatttaaatatgcaatttccattgaagtgtttgatgaataatgagtgatctattatagaatgatgaaaaccttcatcaaccaaagcactagaaaactcggcaaatcattgcctacaagcttgctttaaacaatacagtgacttctgcaatttgcaaacaagattgtgtggtagctccccttttggcttatatccttgaggtaaagacatgtaaacatcttcttttaagtctccatgtaagaaaggattgtttacatccaattgatgtaggtaccaacctttcatagcagccaaagcaagaaacaatttcacagtaaacccaccttgagccaataacatgttgatcttcaggtaaagaaacaacaatccaagtgttgttttcctcaagtgcatcaatttcaaaatccatgacattatcccactctagaatgccatgagcttggctgaaaaattcaggttcaaagtgacttgaaatggccaaggaaactgctcgaaaagctggtgacaacctgctgtaattgataacttgagacaaaggataaggagtaataaaagagccatgaaaagataaagcagtagggttagtggccaaaaatcaatgataatcatttaggtatgaaggtttttttatgtgtctccctcacttactttgattagaagagggtacatatatagaatcaagggtagacataggtaaaaccttattggatggagcagattgtgttgtatgcaatagttcagaatgcaattgtgcagtgcacaagtggtctgtatgcaagtgatcagtatgcaattgctggtaagcagcatcaccgtgaacattagagaaattctttcatatggagtagctattactcctgttttaacaaaaggaaaactctactcgtagaagtaaacatct

SEQ ID NO: 244108 - DNA, 2270 bp, Cannabis indica
aacattaaatgttatttctgatctatattaatgagtaaatctaattatattgaaatgagttttatttagggcataaaacccaacaaacggcacctacgacgactcatggtaacactaccctagtagtaggtatcgatcagggaatgcttttataagctttgaagatgatcgagcagcagagaaagcccatatacaagctgcatgtgacttctcctttcactacgaaagtgcgacaagctcgattacctaaggaatttcgactatccgagtctccgaaatataaaggtaccagtaatcctataaattatttagaaaaatttaatactattatggaagtggaccaggtaccccagcttgcgaagtgtcgcattcttatggcaaccctggaggataatgctcacgattggttcagccaatttcttgaagcatctatatccacacgggagacttttgtcgacctctttctcatgcactttcaagccacgatgacctataggccaccctataccaccctggctaacattaaacaagaggtttgtgagtctctacaagattattttaaaaactttaatgctgaagtaacaaaagtagagaaggcccccgagtcttcgttagtttgtatgttgataataggtgtcctgccaagaaccgatttctggaaggagctgcaggcctgaagacctgaatcgttggtcgagttttttgctagaaccgcataagaggattgaaaattctctagctgaactagagaaagggaaggataaacgcgagtcgccagtaccacgatcacggtctcgcagtcctagaggaaagagttccagggggagaagtcccaaaagacgcagtccgcggagacagcaaagtccaaagctggccaaatcccctccaaaaaaggagtcatcccctaagaggaagggaggaccacgatttgtgaactacacagaattagcagtcccacgggaccatatctatgccatcgaagaaaagaacagagtcttcaagaagcctcccctaatcaggggaaaccgcgacaagagagaccctaagaagttctgtaagtatcacaaatatataggtcataccactttggcatgtttgtttttgcaggacgaatagaggaattaattagacgagggaaattcaataagtataagaagaacgaggaaggtcatccccaaacgaatgacaaagaagaaaataacaatgcgagtggttcaagaactcctcgcaatatactgaccatcatcggcgaacctcacatcgtaggagattccaggaaattgcaggagcgatacgctaaggaggccagagagaggccactcaccaatgtgaacactttgagtgagtggccagaaaaattgttcaagaaggattgggatgatatcacatttatggaaagcgatgccagatgggttcaccacccacatgccgatgcactggtcatcgttgctaatattggaggagataatgtccaccgcatacttgtggacaacggaagttccgtgaatctcctgaactttcaatattttaaggaaatgggactacaagagaaggatctacgaccggtcgtgtcgagtatctacagttttaccgaagacaccattgctttaaatggaatgataaaactcccaattagtctggggaccacacttgtcgtggccaaatcaatggctgacttcgcagttatcgaccaatactcggcatataatgcagtgattggtcgccctatcctgaaggagatgaagattatcacgtccatctatcatctcaccatgaagttccctaccccctctagagtaggatctgtgtgagtagtctaatcggactcgcaagaatgttacaacgcggcatgaaagctcgcggaaaagaactcagtcaacgtcatttatttgttagaagcaccaccccttcgacaggaggtgttcagaatagaggaaataatgcatgaagacaaacaaaacttggatcctagggtcctcgattacaccaccaccgcccaagccgcgaaagacactattgaggtacctattgatcccttagataataacaaggttttgaaaatttgttctaaactaacttttcaacaacgacaaaagctgtcactttctcaagaaaaatcttgaagttttcgcctagaaacattcagacatggtcggaatatctctgcaggttcatgtgtcaccgacttgaacacaccgaagtgcgaggtgtccgataaaagcgccacaaaaattgaccttacgaggtaccgaagcgctgaaagaagaagt

SEQ ID NO: 244109 - DNA, 588 bp, Cannabis indica
atttcctcagctagctttgaatcacatcaaatcaaattctgatcctcaaagtttgaattttgttcaagaaagaaagttggagaatgagatgttgactttataagtagatcaacggtttcaagaggttagcctttagctcaccattgttttctggttcactgttgattcacttccaccacactgtctttactccttttttttttctttgtatatacatataaagtttcaggtgaattttgctttttcaccttttgatccatggatctgcattgttttttcagtccactataacttgcttttgagcttctttttagataaagtctctttaaaagtgtgttgcgactttcctatttttgttttcttgatgtttgagcgaggcattttagtgggaaattcagaaacataatatttctgttcataatattttgcctttgtctatatgtgtcactttttattattctgataattcagttaggttttcgtttttttagggaggggaattgactaaggtattgtgttgatcagattttgtttctgtggtttttgattctctgaataattttgtggattttgtttaatttaattttt

SEQ ID NO: 244110 - DNA, 2068 bp, Cannabis indica
tcatgagtggtggggcatgaaagacgatgatggatgccatgttcaatgagataagaggtgaaagcctgaaattccccaccccagtcagattgtaaatttttaattggtaagccgaattctttttcaacttgtgtcttaaaattgatgaaagtctgaatggcatcagacttgtttttgagtaaatagacccaagtgaatcgagaaaacgcatcagtaaaatgaacataataaaagtatccattggaggaaatcatgggggaaggtccccacagatctgtgtggatcaattgtagagcttgagtatagatagtagtggaatttgggaaagggaatttgtgaattttacctaagcaacaagctgagcagaaatcagaaaaagttttattgatattgggaatgttacaactgttcaatacatttttgacagtcttggctgcgggatgcccgagcctagagtgccataattggaacaatgagtcattgtttgatgttgtagctgcttgaacagtgtgacaagaatgaggatttggtatgatctgcatattgttgcaggaagcattcaaagggatatgtaggttgcagggttggtttctgtcaggtatacatggcagatttagtgagggaaacacatacaatccagcttcaagtgaaccctgcagcagcaccttctgtgtcttctgatccttaacaaagcaaaagttagggtgaaattaaaaataaacaccattgtcagcagaaaattgagacacactaattaaattcttggtaatttgaggaacatgcaacaaattatttagagtgagcaaggtagatttatctgaagccaagaattgggttgtaccaatgttctgtataggcagaccattaccattgcccatatacacttgttcactggtgtgacattcattcttttgtgcaaggttgtcttcattggaagtgcagtggtgtgttgcaccagagtcggggtaccaggaatcgtcacaaactgtgtctgcagtggctagcatagctgagggattcccttgattttgtgaaccaagaccaggaaaagaaggattgaacctttggtagcatttagacgcatagtgaccagttcgagaacagatctgacaaataatcttgttgttattttgattagctccacggttttgattatttgggtaacctgtcgatccaaaagagttgaagttgttgcctcttcctcctggtattggtggcctgtaaggctgattatttgatgagttgctgcttgggcgattattggcataagggttccaatggttactccctgattgacttgagttgcttcgagatctgaaatttgagtttgcaagattaatggaggcagagtcgagttctttgttcttgcgttcgattcgatgttcttgagccaaaagaagagcttcaagtgcagtaacatcgaggggttcagatcttgagttgacagagatgacgaatgtatcgtaatctggagaaggcaaaccacgaaaaatagcagcaatgtgttcttttgatgaagttttgtgcccaacagagttgagtttatcgattagggaacgtaccttgagaagatactcattgagagtatgagcacctttcttgagattctgaagttctgtggtaaattgatcgattttcgcctctgtttgagatgcaaagtatgtggacagaacagaccacaatcttgcagaggtttcacagttgacaactctggttaggattggttcagtcatggaagacaatagccaggaatacaggagttgatcttgttgatcccagtccaagaaggcagggttgatattttcagagattcggtcttgtttagaaagaaattgaggaggaggagtgaaagtatctgaaatgtattgctgaagtttatggcctctaatggcagaaatcacttgtggtctccaaaggagataattgtcatgatcgagcttggtggagagtttatgtgagaaaacaacggggttgaacgatgagccaccaggagctgtacttctgttctggctggttgcagaggaaagagttggagatgactccatggatgatcaacgaagaagaaaga

SEQ ID NO: 244111 - DNA, 618 bp, Cannabis indica
cacatgtttgtggtaaaacttttatgctcttaatcaacgacattcatgaaaatctggttgtaatcagaataggcgtccatgaattacatgagttcgcgtcccggtggcatcgactagttggtcaatctgtggaagtggaatccagtccttgtggtatgcttttttttagattcgtaaattcaatacaagtgtactacttacaattgggtttgtgaaccaaaactcggctggcaacctaaatggaatagaattcctcttgaatgaaatttttggtgaggattttggctatttcttctttcaagaccacatatcttgcctcattaagaagtctcctttttgtctttttgatggaatgtccttacctaaattgaggacataaatttgcacatcaagactaatccccaccatgtctaaatggagccacgcaaagatatcttggttgtcatgtaacaattgaataaggattttttaatttccttgttgaggcgcttgatcatcttaacaatttcggtttgttttagtaggtttaatatgaccttttcaagttgttcaataggaccgagatcggccctatcatcaccaatgtgaggatccctttcctcaagctttggcacttct

SEQ ID NO: 244112 - DNA, 759 bp, Cannabis indica
agtctagtcttctttatttcacattggacgataagaatctttctgaacttttaaattttaggtacgactcttgtagttgtattcatgcattaatgttgtgagtattatctgtttatgtagcatgctatacctacctattttaattatagtcaattgagtattgcctctattatttgtaagttgttgttgaaataacttgtcaccatggaggttgtacaatggataattctttggaatttattcaaggatgagttcgagaatgagaagaacgtgtttggaggggtggacaaagcagctgtagatttgaaatatagttcttggtccaccacgttcgcgttatgtgaaagtgtgaaaggatttaggaaaactttgcaagaaaaataaagctgaaactttaaatttaaattcaaccatgttctgttcagatttaggaaattcaaaacataaaagttttaaatgtctttcttagttttccaatacatcttgaataagctcatttagagtttgtatttaaaagttatgcgcacttgactgaaagaggtcagagtagtaaaatacttggataacaagcaatccgtgagcacgagccttttacatgcaagtgcgggtctatacgagttgggcttttctaattgtgcattttagagttaatttgggttttggaattatattttcagcatagtaaggagaggaattaacataagaacaaaaaaaaaatcaagaaaggatggagatgaaggatgtaacgtccccgcttca

SEQ ID NO: 244113 - DNA, 2357 bp, Cannabis indica
tctctgttattcttatcgtaatatggtatcagagcagagaagcaagcttctccactgatcttcttcgcttccgcctcttcataccatctcgtgtcttcttctccgacaatggtagcgtactgatctatcatcttttttttcttctttcacagattttttcctgtgaaatcttttcctttctctcctggaattttctttccagtgttctttcctgatcaagaatgtctggtgacaatcaagaagatggagctgaaactggagttccaagttctgccatttctgcaaatcgaaacaatccagtcacgaatccaagaagtcctcttaaggatccttctgatccatattatctgcaccatggagacaacccgtgtaatattcttgtttctcagcctctaacagggcaagacaattacacatcttggagccgtgcgatgcagcttgccatttctgtcaaaaacaaattaggtttcttggatggttctatacctaaacctcatatttctgataacaatctttacaatgcctggattaaaaataataacattgttatatcttggattctcaattcggtttctaaagaaatttcttctagtttgctttacgatgaatctgcagctgctatctggacagatttaaagatcagatttcatcaacaaaacggaccgcatatattcaatctcagaaaaaatttgatgaatcttcgtcaagaaaatcagtccatcagcatatacaatacttggctaaaaacaatatgggaagagttgtcaaactacatgcccaattgtacctgcaatggatgcacttgcagtggtgtgaagaagctccaagaacaccaccacatggagtacatcatgtcgtttttaatggggctttcagaccatttttcccaaatacgcaggagtatacttttaatggatccattaccagaagccaatcgggttttccatcttgttactcagaagaaaatcaaaagggtaatttttcctctggaattgattctaatactaacatggcatttgctatccaatcagataaaaataccaacccgaaatctgacaatcaaggatcaaagaatcacccatcaaaaaggaacagacccttttgtagacattgcaacatacttggccataccattgagaaatgctacaagatccatggatatcctccaggattcaaaagtaacaaatcaaaggaggctgcagcaaatcaacttcaaaccagtagtgattcgaaagatcccaatgatgaaggtcacactgttctgccacaactgaatgccctccaggatcaacagcttttaaatctccttgcaaatcaacaaactggtatgccaactacagatcctggttcttcctcaggaacaacaggtatcatactatctcaccatcatgttgcacctggtaatgaatcatggataatagattcaggagctactcgacatatatgtaacaatataaaaatgtttcaatatgtctcccctattttaaaaaccaagttgcttctcccaaataatgatcatatttctgttcatcaaagtggatctatagctgtaaatgaatctttagttctttctaatgttcattttatcccaagtttcaaatataatattttatctgtcagctgcttgactaacagtggggctgcttcagttaaatttcatgctgacagtttttctatccaggacaagtctagctagaaggagattggcagaggtaaggccattgatggcctctatgtgatggatgcttcaactcagaatgctcatgtcttctctgtgactgttgatctttggcattcaagattgagacatccatctcaaaagagacttgcccttctaagtgacaaattgaattgtactgttagctctttacacaaagataaactatgctaatgcagattctatatctaagatatcagcgtcaagagcaatactccacctccgatagcatcaagaacaattcttctcttttggcagcactacgatcattactacacacatgcagcaaaattctcatcaaaaacctctcgttctttggctcaatggagcgacggcaaagccatggtgggccagcaacggagcacgcctcatcctctcctagagacagcggacgacttcaacttcggctatcttggcatagttttgtgtttttattttaatgtgaatgttttatattattggatatatattatttgcatttaatatattgtacaaatatatatattatttgtttaggtcgttttaggtcttccgacgaataacagatcagttagactcgagatcctcgacaaagaacgccacatcatcagtttcagcgtagtcggcggcgaacacacactcacgaactaccgatctgtta

SEQ ID NO: 244114 - DNA, 1326 bp, Cannabis indica
gaggtttaattaaattgaatgattgaatgatgatttccaaatctaattactaattggatttgatcaaattaagaaaaaaaaatataaatgttagattaaaggggatgtctaactactttttagtgaaaaaatataaaaataaaaataaataaaaaaatgcaattagtacaagcatctcgagttgaagaaacaaatcagaggaagaagaaaaaaaaacaaagtatgctaaaaagagaagaaatgcaggaaagtttgattacattattgaatgattaagtatttatacacacatgagaattaccttctgttagaattaacaacccaagaagctaacagtagctttaactaacactaacaaactctaactacctgacacatcaattagttggttatcatcctccctcaaatgaaaaggggaagatacaaccttgagtttgtctctcaagtattgaaatcggtcttttggcgatgatttggtgaggatgtcaccgaccagatcaacggagggcacatatctaaccaaaactttattgttgatgatttgatcacgaacaaaatgttgatcaatttcaatatgtttgtagcgagtgtgaaatacagggttagatgcaagagcagcaaccccttggttgtccacccatatggttggaacatcagctagcacaacctgtaactcggtaaagagagagtgaaaccatttaagttcttctgctgtgttcgcccagtcagcatcagagtgtgcttcaatagacaaacgagttgatggtgaaataaacagaccatgagataaagtgcctattaagtatcgaagcaatcttttataagcttcccaatgaacattagttggagcatgaataaattgggatagcttgttgataatgaatgccacatcctggtctggttaatgtcaaatattctggtagcctatgcttagtagccaaataggctttaggcttgtaaatacctctcatggatctagtaaccatagagtgagttctagggagtgtagcatcaacattcgaatcaaatgaaactatttgtgcagggtgttgcatagatatctatctaatgtgttcagcattgtttggtacagggaaacctgttgcaatgagtgtgaatttagtgtgtcttgattcaagagatcaacatgtgtaagagatggagctgaaacagatgaagcaatttgtattgctggaacttctgcaggagcaaagctgttgtgcaggtgctagtggcgtaggtgttgctaaaacatctgaaatagttggtgcaacatgagtatcaatagcaaactctggcagctgttgcaataggtgtgttatcaac

SEQ ID NO: 244115 - DNA, 4266 bp, Cannabis indica
ttattatttaatattatacaaattgccaaccctataatagtaggatatagtattttatcctaatgttgtattaaactagaaactaataatatagaatgaaagtatttcataataaaataacaaaagtatttcatctatttaaatacaaatgaacaaaataaaaatcaattaattttatgacaatttatgcaatacgtaaataaaaatttttttagtattaataataattatttttatttactattaaatagaaatgaataaaataaatttttttttttatatatatacgattaaaaatactaaccattcaaaataacttttaaaattaaaaatatagagtgatttatttatattagttagattgaaatttattagtgtgtttatagctctgataccactaaaataaaagttaaattataaaaatttaaaatttacatcttatatgttaaataaatcgattcgtggagttggacactacttacacaaagtcaaattaaagagtaatactcttaccatacacgtcttgtttacgttcgatctcaaaaaaagaataatgtttaaattttaatcatcaaaacttatctttttatgattcggtgtcctctttagtcacatatattacattcgcaattcaaagtctagagacgatagctgacatattgcttgtaattcaagtcggtacggtgttcagcaccgcctaatagtaatgttctaagattaatactgaaccttaatttataccctttctttgtttagctcttgagaaacttcaaaccaacaccaataataacatgcatatataaataggaaaatctatatacacataaaaacttcatttataacatatagttaaacaagaggggaagatgatgggagttcatgaggccttgtaaccgagtcaagttttccacccctttcacttctgctattctcagcaaatttaacacttgcttggtgaaaacccttctctttctcactcaaactccattcagataaataataatcctcttcagtactcactttatcattattctttgaagaagaaggaccacagaacataccaccccattgtggaaaatagattaatgttattggaagagtacagcataaaatcataacacccattagagttatacctgtttcttttgagtattttgatcctttaaagaatatcaattgtgtcaaaactgcaccaacatttccaccccctcctgtcataccagatataacccccaatgacctgaaaaaacaaacaaacaaaacaaaacatataaagattgaatcttttctaatctaatcattataaactgatttgggttattaataattattaccttcgagacacaaaaggaacaaccccaaaagtaagaccacaagcagcttggacaaagaaagagaataatatcataaccacaacagaggaacccaaagagcttaactgtccaagaatcacacacaaaactccacccaatgtttgcatactccacagagcccaaagccttcctctcataccaaatcttctcgacattgcgtcggagataatccctccggccggtctagccacgatattcgccaaaccgaaactcgccgcaatcatccccgccgtgtgaagattcagattaaatctgtcaaaaaaatactcagctatgatattatctatagtcagctccacaccaaagcagtatccatacgttagtgctaaaatccaccctctatagtttgtgacaccaaaaaacaaaacgcttgagaatttgtctttgggtttttcccctgatttcttcaggctatggaagtttccatctggggtgtcttggccgaagaaaaagatagcgaaagctgtcatcatctgaaacaaagcagggatgaagaaagctattctccaagctgtgaactttactgctcccaagtctcgtataagggaaaatactaaaggcataatgagttgggttgcgccgccacccaagtttccccaaccggcggcgactccgttggctccgccgacaaccggagcagagaacatagagctcatccagaactgggtggacacaaaagttgataaagaaaagcctgtgaagaatctgactaggaggaaggaggtggcggaatcggccatggcggtgaagtataccgccggagcagttaagaggatgagagaagcagaggctaaacggggtccgaagagatcgcaggctgttcccattgccacacgtgcgaagactgcacccgaaacagaggcgattccggcattgcctatgtctgaggctgtgaggttaaggttgtctctgatgattgggattaagggtggggctgcgaaagtggagacgaagcatgagaagaaggaaatccatgagaggtgaaaagctctcatatggggtttggctgctgagaataatctgaactcggtggctttgttctctgagtctacagggagagcgaactttgaattattataaggcttagaagaagagtccatcatcactgtggttgaggtttctccttccatgattaattttttgatgaacaaaaatgaagagtgtgtttgtaaaaatggtattatgtatatgtgtatatatatataatatattaagcggttaaagggatgagcttgacttgattctgggtatattctaatatatcttttagaatcttatatatacatcaaatttatatcttttacacaacttaaacggcatgtgacttgcaccaccatttatttttgtattttgctaaaaaaatattaatcgtgtctagtattatcttcggtgtcatattgttatagttgtaattatatatcacgtcttatataacttaaaaatataaactatggtttagaaagtaagattaagtgagtgtattattaagtgtaaggtgtatttagtttccacacatcctctcaagatggtggctatatttttacttacaaatcttacacggctcggtcacaagtggcgcttttagcccaaatcacaaatcacaagcggttcggtgagtatatgataaggtgtatgaggttttatctcaaaatcaattgacaataaaagacgtatacatcttatgtatagtattgaatttgtttctacacattataaatgttactagtactcaaaatattattattattatggctgtgagcctgtgacttggagaatggtggtagatacaagtggccttttgatgatgggaaaataatggtttttggagctcttttcctgttccaccgcggagtcttggcctttcaccatggtatgatttgatgatgatgaggacgttaactgtttatatatatattattaaggtaaaaataaatatgaaatattaaagatatatgagtttcttttttcttcttctttatgtatggtttcatttaacggttggtgaagaacactgccaaaattgaaaattttgcataggtacaatacatgaacaacttgattattattattattattagctttgactttatatgtaaaatgtatttagtttttggaatctccgtcctcaaaggtggagcattgttccaatacttgatgtttgaatagtctagtgattctccccttagagtgtggaaagaccaatctgacctttattcatatttgattttgatattaaatgtttgaagatacttaataatactccaaaagtaccactcatatattgttattataagtcaaatgttttgtccatgaattgtacttggaatctaattagttggcttaagttaataagacgggtctaacaaatctatgtgaggagggtgttgtggtaatttcacagtgagagtagaagcgagcaaagaatattcagcggattaagaatcattttcgatgaatctaagaatgtcatctcattatttaattaattttgatacttttgacgataacacactcactgttcactaggactactactagatagggccaacgtacgccaatgcaattattcattcatttatgtctccaacttgtgccacgtggatcattcatgagagttgatgactttgaagtcaacccttgtcttttattctactcctatcaataactttttggaatcgaattaaagtttgattttttttttaacacttaataattttggttggtagaaatatggaatggtttggttaataattgttaacaaacggttaattaataagcatgcagtaaataaagccattaaaaggctccacctaaataaattagcattgctattagacattagttgtgccaaccttacatattgctttgcaattgagtagcaatattttcttga

SEQ ID NO: 244116 - DNA, 1863 bp, Cannabis indica
atcaaccattgatattgacttagaaagatataacagtaagtttatgaacacggtagcttttgagtttatctaaacggagagttaatagggacctctcaactgtgggcaaacagcggcagggagttggcgcctttgaattttgatacaatcgaggacattgcagtcagtttgacttagctaaccattaagaagtgggctttaggaagtagcattgatcctgtactcctgaccaatgcttcgaggaaacatgctgttggggtatctcttatctcggcctcacttttccttttttacttagtgtgaacaatcactatttttcttgactttttccctttattttagattttgttgggcagctaaggaatggtctagctagaatgccattttgttcacttctttattaatgggtttccaaaaatctcggtaaatgttttagtactttcaccgagagatataaaataaataatagacagtaattcttatgtggttcagacattaataacccctagtccatgagtctgtagtattagccttgtaggcatgtgtttgaatattataagtgttcacaatttgaaccctagctctgtattcatgttgtttctctcttgaagaagaaagcttgtagcaaattttctagaggttttgtatgtctaaaattgttcaccctttgcacatgaaaaataagggtacttataggcacaaacatgagtaagggcataccctttacccaactagggtttcttactcaacacgccataggagctgaaactatagcatgatgatttgaccgttggttggtatgaggctttcccatcgtgtggtgtaaaattgttgtaagaaaattcttgggaataaggacacatgtcgctcaaaggtttcaccttgaaaaggttttgtctacacaaactgttagataaaaaagggctttaggggcatgcacacgcactaccaaggtctggcacaggggacaagatctattttgaggttagatgatatgtaattgcttccataagctttagataagatacgaccaaataagttctaagaccatccggtcatagccttctcggatcagacttgttgaattttttgccctaaataaaacctatatcaatataataagatttactaattaatataagatcttaaatcattttatgttgcatggttcacatgatttattccatgattatatttaaatgtattaattttattaagtccagaacatgtacatatatatatatttgttcatgattataatatcatcaacatagtggaatataatcatgattatatgttcaaaagtttaagtcccatgatttgtcagttcactggatttagactgacatgataatcgaggataaggtatacttaaaccttggataagtgttatgtcctttctagggtattggcaaagtttacaagtatcagatgtatggagtatacattggacttgacctatattgactttggataagtatcataaacttaccattatatctttcttagtcaatataactggttgatcttaagtctatggatcttaatcctgatataattaagctcagcttagttgtattatttatttttcaagttattcgttaaagtcgaccaattggatcttcttgtgacagtctaagggcatggtagttcaattgagtggtagcgctaatcatagatatggaatctatagcttctataaatatttagaagtgaaacgatgacttccttcgagcttaactgaatagagataagtgattgagatctcattttagtaattatattagtttactgaaatatcatttacaaggagctaagtattttaaggataaaatacattgaagggtagaacggtaaatttgt

SEQ ID NO: 244117 - DNA, 3711 bp, Cannabis indica
agtattaaacaagacaccaagattccttgagaaaatatttaaacctaaaatatgaatagaaggcctaattattcatataagcaatcaaaaatgtataaagtgagtcacgaaatgaatcattaaaagtatgtttaagtttgcttaaaacagattataactgttaatgtgaagaagaattaataaactgctcgccaatcaaaagcatagcagacaataactgctcgcgcacatagtagattactaactacttaaacaatatcaaatgaaaatacgagcattggaaaggcttaaagtactttaaatttgatcaaaatataattgtttaagttgtgaatgaatatgtaaaaaagtaaatatattaagttcaaatataaaagtgcgaggcattcaataaaagataaaataaaagcaaagttggtcatccaactttgcaaatttatctttacaaaagtgccacaaagggaaaactattgtctcgaccttatggccattttcctaaaaatacaaaataaaaaagtaaatagttaaaaaccaagcctacatagtaggagaattcgatggttctttttctataacttaccatgctacctcaacttcctcttctgcctttttatcttgctcgtagtaagcaaggacttcctccatggcctatcccaggaaactcaattccatttctggattcgccatctaggcttgattgatggagcgcatggcaatggcattgcatcgctccttggtgtcagcctcttttgcctcaagcgctacatttgctgcattgagttcctcttggagtttctagcataactcagacttgtccttcgcctcctttttgagcagtttcaatttcggctttattggccctcttcacctcctcgtcttccttttttaagcaagagatctttgtctgagcctcatcccattccctggatggcctcgtgttgactaataaccttctggatctcaatctccagttgcttcatcctatctagacctcggcgctgggtgacaaaggagatgaaagtttgctgaaaacaaataaataaaaaagcataagtatttttgaaggttgctaaaaagggaaataaaatgagaagagtacagaagtttaccgagaggccaaaggcaacactcctctcgagcatctcatccaggtggccattattgattaagtcccagtcattgggaaggaaggatcgaaaatgacgccaataagcaccagcgtattgcatagaatactctgagccaaccctcccagcctcgatgggcagagtctcaggcacttgactcgaagaggctgcaacctgattggctttggggatgggctcttcagtatgagcaagggccggagggtgagtctgaacctggttctcaggggcctcgaggtcaacggtctgggtggctcgcttcttattgggagttgtcaacctgggccttttgagaggctccacagtgacattagaggaagtcttcgaggtagttaaccttttatttcccttcttgctcgaggaatggagaaggtcttcaatatccatttctacgagacagaacaatgtgttaaaatttgtttaaaaacaagtaaaaggggaaattgggaaattatatcccacctaagggatttaccataatcataagaagatgaagagggaggactataatattcactaaaatccctacatcctgtgatcctgaatatgtcataggaattaattggttttaaatcccagctcgaatctaaatgtcctgacctatccagcatggtcccatactgcttggctaacccatagtaggagtcagtacaactaatttggacgtggaatttttgttaccaactatcgaacctatgtgcaatgcaatctatgaggaggggattctaggtgtagaaattataatggttatctcaaaaagacacttatgtagtacgctcgaccctaagcactgtgggtgaccaaccacattaattacatcgggatgttcctttttcagtttattgagggactgcgttctggaggtagtgcacccgagccgcataatcttgagttctctcgtcagttgggattggagcttactgccaagacgcatacttaggatattaataatcacaagtatactcgttctcaacgaggaggcccacgggcctcaagttgacctcgttcaagaggaactcagctaatcaaagaccatatcgaagacccaacaatagcctacgtcgctcagccatctcgggagtaggagttggtctttttgggaccgctgtcaaaataataggattgcaagtcagtgaggctaaaattaaagacatggaataatttaaaacaaagtctgaggtagatagtcacttacatattatacggaaggtgattgtgttgattggggagaggttggttgtccagaagaagtcctctttgtaaggggtcttgtttggcagcccaacaattatcttacgatagcctgtgtgagtcccaagataataaaagcctcctgttgcattcttcctcacagggactgccttcaccgagtagagatatactattttgcaggggagtggggcactcccataataaaattttgtacagaaccttcaaacttgcaaggattctgtatgaaataggaaccaactggaatggggcgattccaagatggttaaggaagtccttatagtaatctcgcaggggaataattactccaaccctgatatgttcaaggctccaagcgcctatccatgtcgagctacttgtactcgccaagccactggtaccctcgggtgctttgcgagtaagtcgttctgctgggtaacaactaaactcaccagcgactactgatctaacctgacattttcgcttttggtcaatgccataagtccttaagatgttacctacgtaaactttgatggcttgtaccctcaactcgataagttcagcctcgaaggtaatgttagggtcttggggagtcttcgatttacgtggcttggaagtcttgatttcaaaatctaggtcacttggtgaaaatgcaatcgtgactttggataaaaataaaagcctagccaaaggaatagatgataaactggaggtttaggccaagcagcatctcgcaagaaacgacgtttgccttctgtgatttcttgcaagaagggcctgtggcgactagcaatatcatctttgtgggttttactaagtggtccctaatttttacatcatttatctctaatttggatttgggttttgaaattttgggtttataggcgatggcaagttcactggggcactgtgtttctaaattttttgacaataaacttttgaaccagattaggacattgttacaaaaagaaagcaatcccaattcctggatgaaatttatcaaaccagaagcttataaatttgagaaacccagaaatctaccctctgcctaaaccctaaaatttgcgaaaaaaaaacttgaacctaaaatcgctaaaacctaataagatgacaaaggtgcaaatgataaaagtagtgatcaaacccagaaacgtaaaatgaaagggcaaataagaaagcatagagtaatgaatcaattactgtttgaagtcgggttttggcgcgatgaatagttctgcaatcaacgatgcagcgaacgatttggtgatctctttgaatgcttgaggtcgaaaagaaaatttgacgaaactcgcaagagtatgtcaaaagaaaaagatggcatgcaaagcttcaaaaa

SEQ ID NO: 244118 - DNA, 2194 bp, Cannabis indica
tatcaacaacaatattaacagttttggcacaaaaaattaagctcacaatataaaattttttacatgatgctttgatatctgaaaggatccaccccaaaaatgaatctaaattgaaagaattcttaattatcagccaaacctttgcaatcaaattcacgttgaatgttgtgaagccaaaaaaattgcattgattgacatcatgacgtaccgcaagagcttcttccatatctagttgaaattttcttctaattttcaaattgcgctatccaaaaataccccatgaaagtctcgagccaccatgcccaaaccacaaatgccattcgcgagatcaatagaagcattagtgttcactttaacaaatccctcacggagacactaccatcgacgctctttgatcagacaaatcaattagaggtggagtgaaactctgtagggataatggtattttcatgaatttacttattttgatagaactagatacgctaccaagtgattaggattaactcaatatcatagctaagaagaggttgaattatattacaaatgaaaccaaaaaatatcactaaccataccacttaagttttcaagcttaaacttgcaaagtttcctcattagatcgagattgcgacaatcccaaaggacatgataagtggtctccaagtcaatcaaacaaatatgacaaatgttttcattgagatgagcccatatttttgaagattgatctttagtagagattcaatttgaaaaaaacatcactatttattctactcatattatcatcaaattacttacacataaataagaaaacattgcagtcctttaaataagtcaacacataaataagaaaacattgcagtcctttaaataagtcaacacataaataagaaaacattgcagtcctttaaataagtcaacacataaataagaaaacattgcagtcctttaaataagtcaacactataattttttcaagtgtaccataaaatttttgtccatcttcactagacactataacatcgctactttgtattttgcggttatcatccctgtccttaactaaaaatttaatatcgttcactatgcacccagaataaaattaaattgttggatttgctgggttcacaatagtatacaactcatctgacactacaacatagttgttcaaccgtattttattaatctacaattcagaaaagataacagatattaaggaaaattcaagagttaaggtgaacaagatcatgaatatttagaggcaacaatgtttacttgagttttaaaccatccaagaaactcattctcttgcacattttcaatattacttacacccttcgtttgaagaagctccttgtgtgctcaatacatcataacgcacgtggtaagttaaggatttttgaggtgaagtcaaatattattactgacttttaatagaatgcatacttactaattgatatatgactcaatatctgtgcagttgttcaatatgtaccactctaccttatgctagtttatcatggtaatgtgtcaactatcctcatacccagtggtcggccaacatgctcgaatacaaaaaattgtcgatttggcatgtttgggatgatttcattgttccgttcaggacggttgaattgaggctctacttcttaaaattacatagaacaaaacgttaatgcctcattaaccacaaaagattcagcaatagagccttccagacgagaacgattcctgacatattgcttgtacacagacattgaccgcttgatgagatacatccacatgtactgcactggtccacctagtatgacttctttagggagatgcataactacatgaaccattatgtcaaagaaagctcgtgggaaaatagtttttaacttgcacaaaatagttagaatatttatttgcatattttctaaattaaaaacattaactatttttgaacataattgtttgaattacacatacaactcaaggattgtgtcccagatttcttttttcaagtacttacggatacctgccggcattaaatattgtaacaatacatgacaatcatgagatttgagcccgaaaatcttaccggtatccaagtttatatttttgtttaagtttgcaacaaaattgtctagaaatcgtatagactttataaaattcataaatttaattcgttcttgaaaattaagtgtgtaactagctg

SEQ ID NO: 244119 - DNA, 1284 bp, Cannabis indica
ttggctacttcctggatgatgcttctgctagtttacatgacttcatctggttctctaaaggtttgtatttgagtaacacttgaaaatatactaaaattcaaattgagatcaccttctttgggaatgcaaaggtcgtatcggtttcattagttttcttaattctctgctcttacatgctggcatgtacgacgtctaatcacaaatccaatttccaccttctgcatattcatccaccctttacctaattattgtaccattttacaactgactcgggatgcatctaatgtggtgtaggttgtacttctgtcattctctcgaccttatgtttccattgcagtacgttttctccttgcctccgagcagcaacactaacatagttgctttcctagttacaaattctggtcatatcctttgtttcatactctccttgaggttcgtcaaggtgtaagctactacatattaggcctaggaagctttcagtctctcttaggtccttgtgcgccgacaactcttgaatattatcatgcttgtaggatcaaccacaagttctgtattaagaaataagcattttctaaaagccagctctttgaaccaatagctttgatcttctaatcctccagttcagtcaagtcttctaaactcagtttgggatcgtatctaggtatctttaaaatccttccaaagattggagtatggaaaacataatcaacacttcgactacaaattcttccaccaaatttttgaacactcacaccaacctttaggcattgaataaattaagaccgaattcctaatgccccggtgtttgagtgttgcttcagatgtcacattcttttgcacttcttgttcttggtgtctagtttaagtattattcccgatttaagaattaacattactttattaaaaagtagattcctaagtacaggcgaactgacttccttgttaattttgtaaggagttattttggtcataagagaagaatttgattgaagaaaaataaatctttatttacttaaaagcatactaaatctctagttacatagtcactagattattagaataggaacaaaaatattttctttggataaaatttgacaagttaaaagagactattattcgtcctccacgcatgactcggcttcaaattcttcttcttctaggtgttcctcaaagtttatttccatttctacatctgctggaattggtgctggcatgtcctcgaattcagagtctgacctatcaatttctacttcaaaattaaaatcaggtatgtcatcttctagt

SEQ ID NO: 244120 - DNA, 907 bp, Cannabis indica
ctaggtgaatcactaaatagatatccagtgggaaaaatggattatacaacaaacgaatggtgaatctgtacttaaaaaaaaggaatgcatctagaaagagaagtgtaaattaaagagaatatcattgctatagtttttaattgatgttcattttgatgtcagcaaatgggtacagagtctatatatggtggtaacatagcgtgcccatggtcaattatgtcctactatgtggtgaattacactaatgtattgcttctaaattctaataataaaagctaggaaaggacttgagtcatcaccaaggtccttttccatgcttttttaatatttatcttggtttatcctcaaattttgacctacgtttcatgaagttgtccaaagccaaaaggccatgagtttgactcattctgcaaagcacttctgtacctgttcaagttttgaaatgttagaagctgcaccaaattttgtgacagcgccaacaatatatatatctatttttttgacaacgtcaacaaatttactggtgtttcaaccaataaaatcaactgatcaatgttttcacgggaacaattccaagggagaagggtttgtgtttgaaactgttcactcgtccagatcggatcaaatggtttaaggttttcaatgatttcgtaatttgacaatttagtgaaagatgcccaggacacttttgggaacgacatgtggcacccattaagctagaaagtaaagggaatggtctgagtgtgactttttagatgagtaaacatttcaataaaattttttatgaaattaaacgtttgaatgatactttacttcctttcaaaaagaaattagcatgaatattccaatttggagaaaatgataaaaacttattttttttctttttctaatgaaactcataggctag

SEQ ID NO: 244121 - DNA, 1194 bp, Cannabis indica
ggcctcaactgctttgcctctttctcaagaattattctttgtgggagcaaaagaagcagcggggacaacttgcacaacctccccgactgaaggctcagtctcctttgctgtaatgatctttctcttcgaacaggtcgccatggcagcaaggaaattcgtgttgtctacagaaaggaaaagacaaatggttagtataacagaataaatatgaaaaacaagataacatgtcatggctacaacaaatggatcatcagcaacttgttgactctcccactttctccagcccactactactggaattaacttttttcaagaaacaccaatattctccctaaacattctaggtcatttcgaatggaattctctcccttaaaggaattcacatcttctgacttcctctagacagaataacagtttcactttagttgttctcttcatcatcctagagaggcattgtccaagagtcatcaaaaaagcgagcatccaagtagactcactaacatgacattatcaaaaaaaccttttggatatttttagtggtacgcaaagtcctctcatatctctcccatgcttcaatgtcaataagcatggcatatgctctcctcttcatgtcaatcaacaaagcaggtctcttgaaagggccaaccttctgaaggtgatttgccttgaaggaaggactggggtataaaagtattcttgatggtagaggccacaattactcttggtcacattctcaatgtatggacttaattgatggaagggatagagtcctttctcttttcgagtaagacttctttttagatcacataagaagtttatctcatggggagtgggaacatgcaaagttcttagatgagataaaagatgaagaaggttgatagagttctatagccatttggtattatttggtagggatagactctaaaataatctgctatttggataaaccacgggtgtaaaggtaagttagaacatgcgttcatatggaactgaggccaagcactacaatatggattatgagaactattgcaacatccagtttgaggtttatggatgaaagtttcaagaacaaagtaatcatccatgatcaactcaacttgatgttcagagatagtgctgaagagaagaggtctcaatttgaaagctcgatctttcgaatcatcactcataatggcagccttaataagctcgatt

SEQ ID NO: 244122 - DNA, 1902 bp, Cannabis indica
gtgtgttctattacttttgtttttattttttattttttgatttatttaagtcgagtccaagtccgaatctggagatgaggccggagtccagattctaagatccaagttggaatcggagtctaaaatatagattaaagaaaaaaatatttaataaaattgtgagtgtaattttttttttttttcaaaaacttttaaaattttaattttcatttaaaaaattaaaaggtgaaaaacagttttatggaacacgttcttgaaaatatttttactttttaaattaaaaaaaaaaaaacagaaaatcaattgaaaaaatattatcaaaggcacctttagtttatccaaagagtcaggaacagttcctaacaaattattcttaccaagatctagtgtatctagttttgacaaatttccaaagctaagggtgtttttcctattaagttagagatcaagggcaatgagagattccttgttgtcaattgaatttgggataagtccatctatcttgttgctggaaagagaaaagaataccatgttatgtagggaatcacctatgttttttggaataggactaggaaatttattgttcgatagatcaagtaaatctatctcaacatctggaataggaatgaacccatcaaattggtttgagctcaaatcaacaatatatggagttacattgaatggattgggtagatggaacttgaaatgctagcatttgacaaatccaagaatttgtccttattttgtgatctaagccaagttagagatgaagaactaaatgacatgaacccaagtctatattcgatacttggaaaggaggtgtacaatttgaactaacagtaagtgtaaaagagttgtaaagaagagttaaaaaatttaacttatacaactttgaaaaatgtgttagaatgatattaccagccaattggttggaagaagttgcggacatagttagtatcgaaaaaacaacatatcttgctgaaggaaagaaataaatgggaatttcatgatttctttttctccaagaaccagattaaataaactacggctgattcataagtatctaataaataagtaaatgttagaaatagaatgatcacttattatctggtttatataatttagttgtggatatcaattaatcctgttttccacaaaagagccaagcactatgattgatgatagtgttcataataagaaccagacagagaattggtatgtatggtatagttcctccaaatgaaaagatttctaatagattgttctagtaatgtaaagttagttgtctctcggaagtatgttcccagatagctaacatgtctatcaggaagaagtctcgtgcaatgatagttgccatccgaatgactatcatgtctactctgggtgtagtcttcaagaaagttagtcctcctccggaagagagtgttggagggctagctgttcctcctgaatggagtttcggatagtcgactccagctgttgcctttcctacccaggaagtcccttcagcatgcacttcgatcattagtcccagtagtatatgtctcgtccagaagcactttgtcttgtgctggcgtggagattctgttacgaggggtttgttaagtttgttaagtcgcaactaacttaacaacctaacagttgcagccactaacttaggatctttatcctaagcctaaaaataccacaaacacttatcatttcaaggatgcaaagttgagatgagtttcaagaggagattgagagattgagagagaaagagagaaagattgggatgtagagagagagagaggtacagagaaaatagatagattgagtttgaattttgtatgaagaatcttctatagatgataaagatttttgggtaagagagtgagagttgaaacaatttgagtgaaccca

SEQ ID NO: 244123 - DNA, 732 bp, Cannabis indica
aggggaaacaccttctgcaatgtgtgaagtgcacttgacttcacatgatcgagaactgcagtagcctctgccccgatcctaactatcgctgctgctgcagctaaaggtgacccgttagttccatctagcctttctaaatatcgaaggactgtaggatcatcatagtaatctccaagcttgaactgtatatctttagtgtctctaaatctggggaacactacctccattagccatgtctctaacagcttacaaagcccagggagatcactgccatcatcatctttagaattctccaagacaaattctacaatagatggatttcggtatggtgaattattactgtctaaacccaaccaagagcgacattcatcaagctctcccaccagcagagagcacagacctctctctagagcgaaatctatctcgcggctttctttcggtgcataaacattcaaagagtttcctaaagttgttaccttagtctgttgtagttgttggaataggttattagcatcttggatgagatgaggttttttagcaacaaatgccctggcaacaagtgcaagtgccactccatagacttcaaaactttcagctgggatattacttggtgtggctgcaaatagatcaacctgtcaaccagaaaacaaaacccaacagttaggaggaattaatgataaaaaatctagagctgagctacaaaaataataataaaacctgctcatctgctgt

SEQ ID NO: 244124 - DNA, 3509 bp, Cannabis indica
tatagtatagaaaaaacaaaacagtaaaaatgttatatttccctcacaacagtaaaattgaaataaaataggaaaaaacagtatgtggtgtaaatttccctttctttttaaccgccagtttttgaattttaactcctttttttagtttcctttccttttctctcttctggatttttttctaactactttgttttctttattttctgggttctatgcatccttttccttcctttttttcattttcaatgaatatgaattctgcattaaactgtttgaattttaacgctctctctcactaaggaggagagctctgtttttgcacttccaaaaaatatcagtactaattctgtattatgctttgctcatgtgatctttgcccgtctcataaccaacaatgtcctgcagaaactgagttttcttaagaaattgtgtaaacattggagggtcgatttttggttacaattttgacttatgatgatgatatcttacacgttgcttttagatgtgcatgtgacaaatttcgagtgttacgcaaagaagagtcttggtattttcagaatgaccttattgtcttacactcaccatgtgttctgcaaaatgtctcaaaggatgatatggtatatacacatttttgagtccaaatttaccattacctttcttgagtaagacatctaaactagcagaggctcttggaaatattataggtgaatttgttgaagtttatgaggattcaactaatgaaggctggggaccttttctaagggttcgtgttaagatttgtattactaaacctcttgtccgtgggtgtataattaggttgccaaaaataagcgatgaattttcgatagacttttgatatgaacgcctacctaaatttttctttgagtgcggtcgactgggtcatccgtttgagaaatgtcactcttttatggaacaaatggacaacgaaaatgataatgatctaccttttggttcttggatgaaaggtgcaaagttaccaaataatggatatgatcgctaccgaatagatttctcgaaaggaaatgtctggcctttgctaacacgacttgctagaaacactatatcatcaacaattactggtttatcttcttctagtcagccacatccaagacacccttatgcgggggaatcatctacaacacctcaattacagcagcatccttttcataataatgcaccatctggatttataccacattagaataccccttcttcaaggcatttgcaccagcacaacaccatacttgatccccctataaacccgattcagcctaaccaaggaaaaaccaacaacaccatagccttaaacactaatcaatcaccaaatatccctgctgccaaaccagatatcagcgatcttttacatgtcttcataccttatttggggctaagaactataaacacttttgccacttacccccctttaataccatcactcaaagcagtctctcaatcccaccaaaacgttgatttaattgttggatcgacatccccacttttcacaacatctgccactataacttctcaggctttacttactaccaatacctcaactgctgggaaggagaatgtggtaccaaatttacactctaagagacaaaattatgctttgtctatgagaaaaatgctaaagcgttgtcgtggtttagctagtacaacctcttcacccttgtaagttgaagattgtttgaataagatgtttccgatgttcaacgggattcaattagttcttttgactcatcagcagaggttgttatcaccatgaaaattattagttggaatgtctgcggtttggggaacccgagtgcattcaggcatttacaattgcttgtgcagcaacaatcacccatgtcctctttcttactaaaacaaagctcccaaacaactcaattttacgaattcgtaaaaaattgaatttcaacaatggtcttgaggcaccaacgagttggtttaaaaggaggtattatgcttttatggaaagaagacattgatgttactttgttgcactatgctttttgattgttacatgtctactgtcaatgaaccatcttttcactttttttgggttctatggtgctcctgaaacttacaactgtataaactcttggctccttctaaaacgtctggcagatagtgctcctcatcttccttggcttgtcattggagacttcaatgagattttgtcaaacaataataaacatggtggatctctctgatgtgtctcaatggaagcttttcggtcagcgctagacatatgttctttgcatgagcttccctatgaggaattatgagtacacaaaagaaaggcttgattggtgctttgttaatcatctttgggagacaatttttaatgaacaataggtacaacatcttgattattataattcagaccacaaggctatttcttctactttctctttgcgatcagttgcagccaggacaaaagaaggagcatattttgctttgaaaaactctggcttagtgacctggaaagcaccaaaattatttcacacacctggaactctacacctgcatgtgatccgatcactttggtactctctaatattgcacaatgtgctaataacttgcaacaatggcacattgggaaatatggaaggatgaaaaaaatatcaatgaggctcaatcgaaggttgcaactttgaataatgtcacttctcggagtaacgatgttattgctgaaataaaacactctgaaactgtcattgatgagctcttagagcaggaagagatttattggcagcaaaggtcgcaggttgattggcatggagttggggatcgtaagacaaagttctttcatgaaaaggccacgactaggaaaccaaataataagataaattccttagcaatgctgctggtgtcaaagtcacttccaaaactgatatggttgctacaattcacgactattttgtgaatatttttcaagcttctactattgaccagccaacacttcaagccacgctcaactccatacctactatggtgacaagtgacatgaattgtgagcctctcaagccttttgttgctactgaagtagaatctgtcttgttttcaatggggcttgataaaagtcatagacttgatggaatgtctgtaatgttctaccacaataattggtaaatgtcgatgcccttattacaaaggtagttttgagtgtgctcaatgagggggctgatcctattgaactgcactatcattgcactaattctaaaaaccaaaaaaccacaacaaatgggagatttttaacccatgagcctttgcaatgtcatctcaaagttgatcactaaagtggtagttgctcggttcaagcatgtactccccgctgtttctgaaacacagagtgcatttctttcaaataggctcatccaagataacatccttgtggcttttgaacttatacatgctatcaaacacaaagactgttgggttttatgccctaaataaaactctttacaatctgattagttatc

SEQ ID NO: 244125 - DNA, 847 bp, Cannabis indica
tattacaatatatagatagaatatatttaattttctttaaaagaaaaaaattaaaaagtgaaaattaaataacgacaaaaaatataatgtataatacactaatgagtacgtatagtgacactaatgaaaaaaattagactaaataattttttagatatcaaaaaagataagcgtgcattagtgcatctatttcaatgggtgtattgtaaaaattttctactgatcaatttcactatacgtacgtatggacatatatgctttacattgaatctagccatatataatatatatacatatatggcatgcatgtgcatgtgtttcttctttctttctttttttttcttttatttggataaaatatataataatttataaatctaggtgaaaagggtactagatagaattaggagtagtaggtgtatatatatgtgtattattaaggtaatattattactctaatagtaattaaaagtgaatgagaaattaataattagagtaatatataattgatttttacaacaaaagaatgtctctattaattaatttttttaattaaaatgaaatatcaatttcattaaaatttagtattcagagtacataagggtttgtaaatcagccggaacattataatcaataatgcttcaactagaaagaaatcgagattgcctagcaatataatgggcaactcgatttgctgatcgttttacaaaacaaagacttacattttttaaagaggagagtaaaaactgacaatatttaacaataagaccaaagacaaatgacatagtgtgactatttccgattgcttgcacaataagcaagcagtcagtctcaacctcaacatctt

SEQ ID NO: 244126 - DNA, 984 bp, Cannabis indica
ctcctccaacgaaaacaacaacagtagcaacaacaacaacaattgcagcaaaaacaacaactacaccaacaacaaaacttcaacaacaacaacaacgacaacaccatagcaaatacaacaacagaaacaatgacaacaccacctacagtagccccacttgggatccattaccccattgaggggtaaaaaataaacttctagctagcaattgggtttggtcacttctatcccccaaatcccatctattggctttaagttccctctaaagcctactcactctgactatgccaccatgaagagaataggggagtttaaaggaatcttgaaaaggaggcataagaatgtgaagggaattatccaaaagacggcccaaagtctctcaactgggaagagtactgggatttttgaaggtcttcgtggtgtcaccctaataggatcaataatctacattgaggttatggagaagcagctagtatgcagtgttggaaggcaaatggctcccttgctgctgagctcttagatcaagtggctagcagtgcaattgagctttcctatgaaaagtgggcaacttgtagttgtggcgatgcatttgccttagcccatgctaccaagtaacaggtagtggggctaggtttcatcttttccatttttgtttctgttagtgcatattatttttctcatttgttttattgcgtcagatggttcagattgctgagaggaccatgaaagaggttggcagtttaactatagagcttgaggaggcccatccaaaaattgaatagatgtacactaaaaattgaggcttgctcactaagcttaaagaagaaaattaaagctgagaccaccattgcggtgaacaatgctaagtaggaagcagaggagaagttgacatatgtcttggctgactgtgaaatagagattaagcgtaaagatgatgcaacaagtgccaaatagtagatgttattttaagagcacaaggcttaa

SEQ ID NO: 244127 - DNA, 667 bp, Cannabis indica
tacaacaatggaggttgtataattaaaagaattattttttttaataattaataattaagttttttttttttggctttgttgcttacgatgatttacaagtgagcccttgtcatccacatcatataattttgatctggatcgatcgatgatatatgcagccaaggctgctcttttttttccatttataaatatttcgatctgaagaatatatataatattgttctatagctaataattaattatacaaaaatgattacaattagctagctagctttggtggtgatgacatcttaatcccatcatcatcaactatacagttttaattggatatttatctgtatagcagttatgtatctttatctgtattaattaatttattatatagattggtgtgcttaattattattattcaaattagatcatacaaaattgcattgattttagtgttagcgtcattctcaactcaatattaaaaacgctaatataggggcgtcacgtgcttcccccttaattaatttcacagagcaatagagaaaattggtggagtaggagatttacctgactgaatactataactataattgtgtacatatctgccctattcttcttttctgttttttttttttttcaggtaattttgtaaataacaacttttagtttctatttt

SEQ ID NO: 244128 - DNA, 1435 bp, Cannabis indica
tagaggccgaaggccaacttagggattttgcatgtatttccttttctgtcctttgtgttcaagttgtatttagacttaatatcagtgtaagtggaggtttatttttaacaatataatatatatacaatatgatgtaccaaacgaatccacgatgatttgatgatttaattaagcataaatgtaagagaattaataggaatatattcttgcctaaaaagaaaaacacagaattaatcaactttatataagaaatatatatctacaaatgataacatatatactataagatcatttatatatataaaactgataattacaagtttacttataagctagaaatttacaatatgtggttaataaccattatgatgatcatcatcatcatgataatctaaatttatatgatatgtagaagaaaagtaaaaagagacaagacaatatataaagtatgggccatgatcatatatatatggtcgataataataataataatactaaagtgataattaattaggaatatttaattaattaattaagtataataaagccataataatattaaagctatatatatataaatgaggcaggtggtgctagcatgaccataaagattctcccatattaggttgatgatgatggtgatgatctactacagccatgtccatggtaaaaaaggacttggtatgatgatgatgatgatgatggtgtttattagtattttcatgagtattaattagggaggtggtggtggtggtggatattggattattattattattattattattattattattataattattgttattatggtgatgattatgattggatgtgggagagaattgggtcattctcatgtggactacctcagcttgtgctatagccaattgggtttgaagagcatcaatctgttgttgtaaggatgatatggctccaacacatccatacacaggatctctcactcttgcatttgcttcatataccattgagctcactgcatcacttctctgctcctctggtagttcctgtaaaatcattattatttactatattatataactaaaattatcccaacaaaaatccttaattatattcaaagccctacttaaaaacagtaacttttaatctaatcatgtaagtttctgacgagaaacttcgtcagacatgtctgaagggaaactagaaaattgtacgctaatgctacaaccttacttcgactaagacaaagaaagaagaactagttggccaaggatcaaaggccgagtaaagttcgagtaaataggaatccacctaaaccggtgattttgttttttaaaaaaattaataattatgacggtatatccattgtcgtgacaataggtcttccgtaaatttttgaaacatttcaaaaaatttattgtgcccaaattagaaattcaaaataatcactctt

SEQ ID NO: 244129 - DNA, 1036 bp, Cannabis indica
aaaacaagcataattttattccaaaaataataataaagaaggaaaacaactataaaaagtgacccaaaacgtaagctaaaaatagcctaacaagaatgtggaatagcattacaagagaccaccaccaactgctaaataatgaaataatataaaaaaaatacactaaaacacaatattattgtggcgatgacaaacccatcccacaaccacaaacgaattatatttagatttagatactaaaaccaagccgagacgacatcacgagaccgaaacaaagtgctaatagctctgcaacattcacctgaaactcacccaccaaccccgctatccaatattaggacaaaacaattgttatatgttagttataggcttggttagttaattgatggtaaccaattgtctcttgttcttgttagctaagtggttaaatattgttagcttcctaaccgccattatgtatattgtaatgatcaattgcctaatcaatgatgcaagagattgttttctcttattctgtctttccttcactttctctctttttcttttccttctcttcttctttgttctctttcaatggaaaacaagttgaatatatctaacatggtatcagagccatttctaccatgaatggcgaacatggcttctaatggtcctggcaacactaccttttaatatgctcctcaaggcacttaatttccagctgctaaaaatcacaacatagatcaagcagacacaactgtgtacttgaatcatactatctcgatcaaacttaatgaccataccttccttttgcagaagcgaaaaatcgtagtagctattcacgacaatcaattactaaagttcattaaagatactacgccacctcctcaatttcttcgtgatgcaaatcaagctgcacgtaaactcaaccctgtgtttgttgactaagaagtccaagatcagcatctggtgtcttggtttctcttctcaatgacagagagctttcttcctcgtatggttggatgtaatactgttggcagattcgaaaggctcttga

SEQ ID NO: 244130 - DNA, 1831 bp, Cannabis indica
aggatcaaactctggtcccaggccattgagcaaatgaagaatgagatcaagatcaatgattgaatgaccaacaatagctaaagaatcacaaattgacttgatattatcaacatagtcagagatcctgaggttacctttgtgaatgttggataattatcctttgagctgaagtaaccgagctttcgcttgactggaaaacttttgctcaagggtcatccaaacagcatgggaggagttgtagttagagactgttccaagaatcactttagtcattgatgatctgagccaagaaagtaacaattgatctttctttcgtcattgaagatacatccgattgggatcaccattgataagattttgtggaggactgatactggtaaacaatatctcatcgaggtcatgaccaatgaccatgggaacaacttgagatttccaagcaagaaagttagctcgatcgagcttggttgtaagataagacgttaaggaattcgagaaaggatttcattgaggaggagcagcagcagggggtggcgcctgaggcctaggatcagtgatgccaagtggagacgaattgttgtcggaggaagccatggacgtgagaggtgctccgataccatgaaacaacagacacagagtgcaaggaaaggaaaacagagatagagtgtaagagaaaagcctcagaaccaagaatacttacttaaacattctgaggaggaaaacattttatttgtagtgtatgttaagacaaaatacaaactagaattctgttacaatagaattcgttagaaattgtgacacagaaaataaaaacttaaccaacaaaacttaattgattatcaggtctgaaggaagtactgttgaactgattgaaggataatcattaatcgtgatgtagtggttgaatctaatagcttggttattgtacaagccactagaagttctgttagaatgacttatgcatttggtatactattgaatgttaggttttgttgtcttttttacataatataaatttatgttttgttaagccatttgttaaatgagttgttcactatttggctgaagcttctccatttaacgcaaattgtaactttatggagtctactgctccttttactttgattgatgtaattgggaaagattttatagcgcgttaattaaattgtaagtggaattagaataatcaatgagagaaatgaattggtttaaaatagaaaataatcgcaaacaatattttattatgctgtttaatagactgttcggaaaaaaaaatcagatatattattttgtttacactactaggaaatgtaatcagaatgcttttatttgataaaattgccatcactacaacatgtaattattttctgtttatagatttttaaagggcatatttatcttcatcatttttaattaataaaattaaagttaaaataaactaagttaggaaacggaaagatattccttattttcttcctaatttgtgtgggttctattatttttttcgttttttaaaatttagtaaagagaatcaatatcaaactattaagtctcatcctctttaagtaaacataccattaattgatataaacaaagtatagatactaaggataaatagaaagatgtactctatgccatttgtacaagggcctcaataatatacaaatatacagaattgttataaaataatataaagtagatgagaggaaagaagaagaagatgaagagagaaagagaaagtgaatgagaatttttgagttgtttatttcaatggggtgaacccctatagatacaaatacaagagtgagatattaagaaactaagaaaaaaggaa

SEQ ID NO: 244131 - DNA, 788 bp, Cannabis indica
gtatcttcctcctttgtttaggtgagaagcttgtattaaattttgattgtgtgaaagtagaatattgaatttgttatgcattatcttgtatttaaatcgatgattagttgctaatacacatgattaaacaaacttacaaacagaaccttttgagatggaattggacgaaattactacttttagtaatattggatagtttagccgctaaatacaaattttgggtagttatgaaatttggttatgtgaaaggagaacattgaattagttatgcttatcttgtatttaaccaatgataagttacttatacacatgattagacaaacttacaaacggaacctgttgggacggaattggacgagattacagttagtaaaattggatagtttagccgctaaaaaataaatgggtagctgctagttacaaatccaaaatattgggtagttatgaattttggttatgtgaaaggagaatattgaattagttatgcattatgatcactaagctactaagctaaatgacatttcgggattgggttgatttctctctgtttgcagtgttgctcctatgatggaatggactgatcatcactatagaactcttgcccggcttgtatcgaaacacgcatggctctacacagagatgcttgctgctgaaaccattgtttatcagaaggataatctggtaagttagttggatgatggattatataaagttcatatggaatgatttagttctaatgacaaacttacatcgtttgaccgataaaaacttacatctgtgttcctttc

SEQ ID NO: 244132 - DNA, 895 bp, Cannabis indica
acatattttgttaactatgaacagctcagttagcattcctaagaaataagtaatattcttaaatgtcacacatataatatgtattattgaagtgttggtttggaaaatttattactttttttcaaactttcaataatatatattgacagataactttcaataatataagcattaagtattattaggtaagttattctataaatattgtgttatcatgtacacttttacaaataaataattattttggattatgaaagggaaacaatatgattttctttcaatattctgatgattctaattctatgtgtgatgatgttaattgtgattctttttgtgctgcatgcaaataatacatatatattatagaaattgtttaataataaaatatgaatagaaaacaaggaaggcaaagaaagatggttttgaagcaaatgtgggttggaaaagctcgtggtgtagtggtgagtgtcgtacacgaaatggtttagagtggaataataaacttatattaatgctacctaataattaaactctgccaatctgacatttgtatttgtacttacaagaaatgaaagattctcttttccctttctttcaccttgccattaacaatttttctttattgggcaatccaagtatataattatgacaacaatatgttatttttttcaaaaaaaatataattctatctaaaaaaatgagcgttgctatcaatcttattacaattttttagtcaaccttcacatccgaaaacacatgttggactatttttttttttcatgggggtattcgttatgcttacaactagggctgtacatcggttggttgagcggtttatcctatatattttctaacccaatctaaagttcgggttgctaaaatttaagtgcaaccc

SEQ ID NO: 244133 - DNA, 1706 bp, Cannabis indica
tatttgtgttgaattagactttcgatatatcttgatagttgttcgatgcgtgctcgacatgtacttatgtaaaaaataatataaaagtgttatctaaataagttaatacggaacctttcaaaatattgtgtcatcaggatacctttcaaaatattttatcatttaaaataagaaagatacatttcaaaatattgtatcatccaaaataagttaggtacctttcaaaatattgtatcatccaaaataagttagggtacattttaatttaatctaataaataagaattatgtacttcatcgcagaacaagtctacacaccaacaattattgaacaatgacatgttgacatctactactttattgaacagaattttaagcagtgcatgctcaacgtattccatcttatactttccacaatcaccactacaataattgtttcattaacactcctgagaaattcattagatcaactagagaaaatagtttaaaaggggattcattcaccctttctagtaacttgtacttcttaaattgttccttgattttttttttaaataattggtgcccttgtaagacaaacgtccaatgaaatgctcactcataaacaacaatcgaaccctatcgaataataatcaagcaaattgaaaataaacacaataagtttattaccaacaaataaccatcgaacaacaaccaaacaaactgggtacttaataaaataattacacgaataatcaaacacaatcaaacccaaatgaacactaatcgagctaattagaaacataaacaataatttgaacactaaacaacgtccattgaaccaagatcgaacaatattctagcaaatgaagaaattatcacaaacacaaaaatcgtgtacgatcaaaccattataatattttatactattgaacatatattgtgaaactatcgaacacatcatacaatttctctcaatcgagcaattgttgtgtgactagcaaacatcattgaaatttcattcctaacctttagaaataatttttatcgagcaattatcgaacatgtattgaacttatcgattttttttgcaaaaaaaatgagaaaatcgtagaaaatgcttatatatgacttttacactaacaaattaacaaaacacataactaaatgaacctaaaaattacaaaacaacactatacttgaagttgaacaaaattaacataaattcacatacccacaaaattaacataaattcacatacccatttctttttagccacaaacaaacataaaatttgaaaatttggaattctcctcctatctctacaacatacttgtgtaaggctcttgttttatagaaatttgttcatcttttactaaagatggttccaaaaaattgcttaaatgacaatatttttcagtatggtgaagagataaaatggtaggatttagaaagagggaaagataagagaaaaagaaaaaaagaatgtggataaaaatataaacattttttagaggagataaaaatatttgttttattttttttgttttttggtactcaaatttccctttataaattaatggaataattacataaggtaccattttttgtaaaatatttacatttttacgtttaaagaatgttttttttttctttacatttttacggtttttcaaaaataacataaaaacaatataaaatcaacaagaaaacaacataaaagtaaca

SEQ ID NO: 244134 - DNA, 2032 bp, Cannabis indica
caatttatataactcacggtttgaaagctttattcaaatgtacggtcaattgcagtcgcttggaggttcgtcttctcagagttatgtcactcctccacaacattaacaccaactttctttgtagcaacaattccagccttctccgcagcagcaattgtagcatttttcgcaacaacaacaccagctttatcttaaaaagcaacactagtctggtctacaatggggaaatcaattcttatatagaactccattagagtctccttcgctcgactcaaattttgttgattttggaatatttgggagttcatcgcatgagcaacaaattttttttttactcctatattcaattaagctcggctagggaacctaacatttagtttatcgtcagatcaatcacatgctccttctctgcgacagccgtcgggacctccgaatgataataatgcgtgtgtattaagactttgtaatccgagaccttaacgagattttatggaataattagtttatattttttaataatttaattttgaaatattttaatagcattaatgaattgaacattgttatttagtttaatttgagacattttaatagcattaatgaatattgttagtgttaaattatattttatttttatttaaattattatttatacatctatattatttattaatttatatcatttttttattttttaattataataggggcggagcattagtggcgggttctcgctgctaatatctgccgctactaatggtaattagtgcagaattaatttcgccgctaataaccattaatagcggtcatttattagcggcgggaatgcgggctattagcgacgaattggcaccactaatagccaatagcagcagtttaagccttgattggcggcaaacccctccgctactaatactttgttttgttgtagtgaacggtataagctatggcctattggacaataataatattctttagcaattttaaattatcatttatatagccctgtttgaagcgactatcaagtaactagtacgcattcatttttagggaaagtgacatataactagattttataattgttattgaaataaaatattaaccatacaaattattctaagtgaaaaatgaaaattactcaccctaatcacacaagacctaaaactatttagaaatttttacacaaaaaatacaaaatacacactttattacatatatatatatatatcttcacacggttaaaacaacatttatacacattaactttattttattacacttttaccacttacacacacaatcttgtgggtatgtctggaaattattcatggcggaagtagctgagctcgtggggaagaaagatttcatggtgtctgctatggagtcggaatccaacggctgatgttgatgaggaatgaatcccgacccgttatgatgatctgcgttcgagtgctcatggcccaactgtctatgcagctgaaaattatacccagaaaactccgacttctctaccgtgagacccatttcggtggaatccactgccaccgccgccgtcgcagcatgtgggtcgggatcctccgtagccagattttctgtggggtgccaaggtggcagctcagcgagcttgtcgatggagttcttggctttcttaatgagccaatcgacggctttgctaggccggtcgtagcccaagtgttcttctctccatttatgcagaaacacaaactctttccaatgctcttaatcggtgtgttgcagtgaagttttatttagctttaatcatgtcagagtgctaagtcttagtcaacaaaattaattttaagtggaaaaacagatcttctctttcaaatttgattcacaatattctattctttatatcaaattttcctaatactaggatctgttttattcctagagaccaaaataagatcgtgtactttttcacatatacattttagtgagctcacgtgattgattcacatgactagcacatggtattttttgtttttgtttttatatcattaatgggtaa

SEQ ID NO: 244135 - DNA, 2324 bp, Cannabis indica
attattattccgctaccatcaatgtaaggttttctaaactcttatgtgtttaatttaatcatattagagaattcatatttagggtgttaatgaaacatacatgttagtaaatctagatcttatcttaataaaataaattccaacaccgataacaatactcagttggatggagatttatttactgagttctgtgaaaggaataaaattattaaaagcttctcgtcagtgttaagatcacaggtcaatggataagtcgagactgttaataaaaccttaaaagacactataaaaaagaagttggatgcagctaaaggtagatgggttcacgagctaccataggtgctctaggcccatagaaagacaaaaaaatagcgacgggacatattgcattctcattaacatttagctcgaaagtaatgttgccagtggaagtgaacattgcaacacaagcatgaattctacgatcaaaacaaaaccaagaacttctcaatatgtccttggatctactcaagaaaaaaaagtgcactaagtcacaagtcacaaatactacttatcaacaatgcatatcacaagatattttaataaaagatttcaaaaatgactattcaaagttcgtgatttggtcttaagatgtgtgttttaaaatatacaagacccagtagcaggagtattcaacccgaactgggaaggcttgtatatcattgaacttgtcattggaacatgattttataagttagcgtggcttaatggcttgctaataaaaaactattagaacactgaacacctaaggccatattaccagtagtttattctgttgtattaagtttatctttgtaaaaaagttcattattttaataaagttgtatatttcaagtaatcataaagtcttagtttctttaaaattacttgaagggcatataaatatacaataactaggttttacctagaggtataggttaataaaactaggctttctatgacttagaaaataaataaataaaaaaaattacaaaagaaaggtgtttgattatgagctggtccggaacagcataaagtcgaatactttggaaactttcttaaagctaattgcgatctgataaatgtaatcaacataaagctaattgcgattggaacaaataacgactcgcataatatagcatgtactataaacgagatacccaaatgtatcttgataaatagtacacaagctaaagtgtgaatagaggactaactattcatatgagcagtcaaggaatgtttcaagcagttttaaatactgctcaaaatatttaaagtgtgctctttaattttgtttttttttttgatatggaaaaatactaactgctcgtgtataactaaagtaggagagtaataactgctcatatgtgagcaatcaaaaagtgttcaaaaatatttaattatgtaaggacatttaagttcgcaatacaccctaaattgagaaaagttttttgattacttgtgagcaaaaatacaatattcaaaacattcataactcaaacaaaataggttaaaatggcataaagaaatgtaattatacaaatattggccatccaacaaagtaaataaaaattaaattacataataaatgccacaagcagcaaacattatctcggccaaatggccattttcaaaagttaaaaaagtaataactaagtctacatggttggagactgtgagggaccttattcttctgcttctttgacctcaccttgtacaacttcgtcaatttcatccttcatggtctgctcaaagtaagctcgcatctcatcagctgcagcacctaagaagcttagatccttcttgggagttactatccgggccttgtagatagagtgcttggccattaagttaaccctttctttggcatccaacttaacctcttcaagcttcttgttggcttctgtaaggctctcctaggccagtcgagtagctttgcaaagctcctcattcttggtcttcaaggcttcattctcagcttttaatatcttcttggatttctctagggtctcgacattttcctttagccgagagatctccaattgggcgtcatttcattacttagctaagatctcgtgttggtcgttagacttacaaggctctgtgctaagttgactgatactttgaaagcccctttattgagccatgaaggataagaaggaagcttgtatagaaagaggtcaaaatagaagatcaaaaggtaagaaaaaatataaatatagtttcttatgatttttgaactaaccaactgcataagatctacactgctcgtcataaggctttggtaatcacctttgttgataaaa

SEQ ID NO: 244136 - DNA, 1409 bp, Cannabis indica
gaaaatatttccactttctcatctgataaagagatggaaatatggatttaaagagaaaaagaatgggccaaaaaattattaatgaaaacgaggccatttcacacgtgcctatggaagatgtcactttgtccaataacatgggggctgagatagatgttgggctgtcaaaaaatgtagagaaggtgggtcttggagtccaggcccacctatcattatgagtaccattagttggaattgctgtgggcttgggaacccacgggcccaacaattcctagaggacatttgtactcaaaagaaacccaagtttgtgttcctttgtgaaactttatgtgacaaaactgttgtgaatagagtgaaaaataaattgggctatgaagcctgctattctgtggatgctataggtagatcgggtgggcttgctattttttggaaaattactgatgaagcccaacttctaaattatacccaaaatcacataagccttgaaatccacttacctaatctctctccttggcgtctcactggtttctacggtgagcctaaccgtagctttcgaagccgcacctggactctcattcgcactctctactctgaatcccaactgccttggtgtgtaataggcgacttaaacaatatttccagcaatgatgataaaagaggaggccggccgtatccttcttctctcattcaaggttcccaagatgtcctccatgactgccatcttcatgacttggagcttcgcggctatcagtatacatgggaaagaggaagacaagctggaaatttagttgaaattcggttggacagatccttggtttctcagagttggctcgatttcttccctgaggtaattctctctaatcttgcaatcacctcttcagaccactctcctatttttttggatctaactcctgcttgttcccgtggccctgtttatcgatttcgttttgagaatgtatggtcccatgagccaatgtgtgcagaaatagttcgtgactgctggaacaccaatggcactcttagtttatctgaaaaaatcaaactttgtagtgttaacttgtccaatttgggtaaaactcttactggaaatttcacagcaagattgaatgctagcaaaaaaagatggcaaccttgaaaatggctgatgatgcaaactctgtatcttgctttgagaacgaaaaggttaactactttgaaattttggctcaaaaggaagtctactggaagcaacgttccaaacaacactggctgaattcaggagatacaaacagtaagtactttcatagtattgctagttctcggaaaaggaacaatcagattcggcaattaaaagatagtgatggttattggcaaacctgggattcgggattggaaagagtagtagccgactatttcactactctgtacga

SEQ ID NO: 244137 - DNA, 1840 bp, Cannabis indica
tgtatgtagttgcaagagaaaaaattattcttattgtgcagggcttgattactggactaaaggtctcaaagtaatcaaggccaggggtttgttggaatcctttggcaacaagcctggatttatacctaatcacagtgttgtcaggattgtattttatcttatgaactcatttattatcaaggactgtcataccaggttgaaatggaacaagactccatgtcttattcttgacaagggcagtaatttcactctacattacaccaaaccagatggggtcttgaagagctgcattaagtgtcttgggttcaatgctgatattagaggaggttgtgagagctttgggcttatgaataccagctttggcccttgtgaccatgggatggttgttgacaggttgagacacaatggatggttgagtttgtgttctgtcaacaagttggataggtggtttgggttcatggtcatttgatgtttgagaagtggtgctgacaggtggggatgttggtactgtgggaatggttgttggtggaatgggaaatggttattggtgtagtggtggtggggaagtaggaggagaatgaagtggggtagtaggtgggtttgtagcatgtggaggtacaacaggtgatggtttcaggggaattgggaagatattttgttggtttggtggtaaagtaggtcagatagtagcatgtttgggaaagagagtgtggtagggaaaattattttcattgaacttgccaattcttgctatgtaaattctacctgagggatgcatacacttgtaccctttatggctatagttggattttaatgcatgaaattgtattcaaaactctctgaataattgttaaaaacctatttgatggtttgtgagttttggttaagttttaggttgatattgattgagtttggggttgaaattcgtgatgatcttgctagttttttgggtttggaacccaagtgtcgcggcatggcttttgcatgccgcggctcacctccttttgagacctgggaattggtcccaggtgccgcagcacggcttttgcatgttgcggcccgccctcgtgtttctgggcagatttgagtgttaactttgaaaattcataactttgtctttcgaactctgttttgggagttctatatattgttagaaagctcgtttcgagctctatgtattttgcttttgcatgctgtggcccgccctcgtgtttctgggcagattatttgtattttgaatgccatgtgtatattttataaatgtgaaatcaggggttaaccctatttgtgtaatcctggaattgtgactagaattaccggcacttggtcaggagcacccggggatatgaaatctctactattgcgggacatcaggtaagacagtagttagcacttagagttatgcgcggtggcgcttatactggaaatgatatatgtgagtaattagtaaccgggattagggttattaccctaacatgagcggtttaatagcctagggttattaccctagtgatatgtgttgtgtaaatgcaatgccatattaaatagatgagtatattgagattcagggttatgtgttcaaggcataaccgagttggactcggtaactagaaccgagatgaaccgttctaaggccttattgtatttagacgtgtgagcgcaacacgtaggtctatgttacatagacataaataggcatgtgagcgtaacatacaggcttgtgtcatacaggcatatgagaatgggattaatgtttatatactgtgataaatatgtttatagatattttatactgtcttactaggcttggctcacgggtgctctactgtgcaggaaaggg

SEQ ID NO: 244138 - DNA, 858 bp, Cannabis indica
cttgctagcttatggccacgcacaaaagatgagacttgaacatgaaagtagccaaaaatgagcttttttctgcattggtacacaatttgctaaacctttctatgataccatcttgatagttaattagaaatggagtatttaagaacactgagacacgtctcacatagacctatggctgatataatatatggagtttaaatctgcagaaccataaaataacataatggagagtctacatttgaacattaaaccttttgacatcctttatcgattgtcttaaatgatgatctggtatgagtaacgggctcagtcaagttatacatatccacgtactctctatggtgcaggaatagttttttatggtaccgacttttgtaggatttagatgcaatataagctagaactagctgctgcccacttcctaaaaataagtgttgttgtgtgctttatttgcaaactttaaagtaaatgattacatcttaagtaaatgccattggctctgctgaatgtcttgaactgaattggcatgaaattataattataattacaatatctttgctgtcgaaatacagaagtaaaggcagctgggaatagttttggaactcattttcgtgttacaacttatggagaatctcatggcggaggtgttggttgcgtagttgatggagtgcctcctagacgccctctctcagaagctgatttgcaaggggacctagatagaaggtgtttgaacttgtgacttacataatattttcaatttctctttcacagtttctgtttattggtaattactaattgcacttataatatgactagtgcattgcatttctcactagcgtacatcacttctgcttttat

SEQ ID NO: 244139 - DNA, 926 bp, Cannabis indica
agttttcctttgattcgtatccctctgttttccatacttttcagctaaatgacattaacacatggcacttaaaacttgggcatccatcacccaatattatgtcacggatcctaccctttgttcctcatacaggcaccattaaccaattgcaattttgcaatgcatgtcaactaggcaaaaaccacaagcagccctttcctatatcccttagcagagcctcccaaccccttgaaatcattcacactgatctttggggtccctcccatatatcagccaaggatggttatagatattatgtgcatttcctagatgactacagcagatatacatggatttttccattagttcaaaagaatcaggcctttgatacctttattagatttaaaagtatggtggagaagcaatttaatttgcccataaagaatgttcaggccgactggggtggagagtatagaacttttgctagatttttgagggatcaaggaattcttttcactcactcttgtcctcatacacatgaacagaatggccgtgctgagaggaagcatcggcatatcacagaaactggtctaacaattttggctcaatcgggtttggactttacttactggtggtttgcttttcagtgtgcagtttataccattaacaggttacctacaccagttcttggacatatttctcctttagaatgtctttttggcaacaaacctgattacacaatcttgaagccttttgggtgtgcatgttttccatttttgagaccatacaatcatcacaaaatggagtacaagtctcaacaatgcatcttcttgggttattctaatcaccataaaggctatctctgtgagaataaagatgggcgactgtttattgctcgacatgtggtattcaatgagtcttgcctccctgctcattacacttcagca

SEQ ID NO: 244140 - DNA, 1041 bp, Cannabis indica
cgagcatgtacctgttatacacagggtctcgacacgacacgaacacgacccgcgaacacgaattgtcacccctagcctgagaaaggttgtgcacttttgagaggctcccttggaaggaccatatgcttcccgaagtgaggcagtactacactcaactctcctcttgagagattttaaagagacacaagttagactccaaacaaatgaccgagaatttgagtccaaaattcccagctcatgtggggggtatggtatgtccgatggctgatggctataacatcttacatccattttccaaatttgatcaacccaagtgtatacatgcaaccaaaaaggggaaacattttcaactaaaatctccccgagagaaatgcacttgaattctttcctcaaaggctaaactcaagaatgaacctggagataagaagcgtagtcggccaaaattcttgaaaaagaaaagacatgcctgaatcccctcttacaaatcttcgcggacttcatataagcttagcccatcgagttgcataacaggctagaatgtaaggctgacaaggacatgagtaagaaaaatgtctaagtttaagacagtcgcaaacatcacccccgaaactcgaccttgtgaaagaaccagaccccgaaggagatgtgcaaagttgcgaaagatctcgtttcgcggaaagaggccatctcctggttaacttcaaacatgtaacctttcaagtggcgagttaaaaagcatcacaaccccgggtgagaaagagtcaaatagaaaagtagttccagaattgatcgagagataattaggactaacaggaaaaggttgaaacactggccgttggaaccaagtgcttcaataacacaatcagtccccaaaagtctaccacaccaaatctccaagtaaggagcaacacaaaatgaccccattttactattacagcccccgcggccagggcaaaattttaattgactttgtggctagagagagaatatatatataaaaaaggaaaaagaaggcacaacaacataatctggaggtctgcc

SEQ ID NO: 244141 - DNA, 963 bp, Cannabis indica
tatatataaatatatataacttaagataataataacttttaaaaaatatcattcagcgtcacctttgtaggtggtacaaagcactattaatataatgctcaaataaatacatatataaaagcactttaacaaatggtatgtacataagtctatatttttattaactgggtcaaaattatatttgttgtgattttatattgtaattggatccagagagttaagtagttatgatccattttttcttcgatatatatatatatagtagctagagttaaagtgatgattaaacaataaataaatgtacattaattagaatagctagcatattgtttgactatatttttgacttaataaaaaaaaaaatccagctcatgaacagagaactatcaattttaacttttcatccatccacaggataaatatatatttatgtataaacacatatgtataatttagagaagtaaattaactaattaaactaacacatgttataagggaagaaaaagtaaacacactaatacggcctcaactaataatatttttatttttttagattatcatgaactcgagatgactagctaactaattaataagtgagatcattcatatataaaatttatatattcaataaaatataaatagattacttaagttaagctaaaactttgttatgattggcctagtccattaatttatatatttttcttgccgccactataggggctaattaaaattaaatgaaattataagtcatggctttggagatagacagtattgtatatataatttgtatagaatatataaaagttttttttttgggttaaatcctctcaattattctctacttgtatttaatattttaagcttaaatttgacgataaaatccactaaattattgaattggtagcaaatttaagatgtcatctattttccataattaactgacaatataaactgtttatg

SEQ ID NO: 244142 - DNA, 1059 bp, Cannabis indica
gactatagctagacacaccacccatatcccttaccatagatccttcaaagccatcgaagtcgatgggtttttaagcaaatttcgacgaactactaggacgtgcccaagattttcaggcaaggctcagacgtctcgatcgaatccccctgactatagttttcataagtaagtgtttcttacttcaaacttatatttaaatttatgtcgaagtcgctgcgtctagagaggaaattgtagatgtatagccatgatgtttagggtttgagtgggtttttattgcaaactttgttgtgtaggacaattcttaggatatgtgttttgcttgtaaagcttttaagttaattaaggcaaatttgctcagtattttgctctgtagtggtggtatatatgctttataaacactgcattttcttttgtctaggtctcttttggtgttagacagaccattttgtgatcttttgctttgtattcttgtgttcctgatcttattatcctggagtaatgttccttggagaacttgcttccggatgttgggtctagcaggaacctctccaaatagttatagggactatatttgttttttcttatcaaaaggactatatttgttagtgtatggtattaacgacttggtttcgccttttttttcttttttcagtttttgcgatggccgaagcaaataatttcgcaaaataaatgatcatagaccacaaagtggagctggcttgagaaaccattagcgtggagtagaaagtaacagccaatccatcttagtgggagatggatcaatataaaaataaaattctgataaaataactctaatttttagagttatcaaagacaaaacaaaaggttataatagagttgtcttaaataaaaggttttgttgactcaaaaattaggactgaacttctaagccacacccgctcgctaaattgatgagataaaaaagtgtaaaataattataagagagacacaacaaatttatagtagttcactctctatatcgcgacagtaatgaagctacaactactttgagttatttttcatgagatggtatta

SEQ ID NO: 244143 - DNA, 1145 bp, Cannabis indica
taaaaaatccgagacatcccatctattttcggtgcttttagagcattaatttgggacagcgccacctgtatatcatttgctgtgaactcggcaaacagaatttcattttgatgtcggctaagtcgtagaggaacaaagctttgaatgtttgctattgtattttcttcatgattcaatgctgaaaataattcttggaaatggtcacatatagttcgctcaatgttctccttagtattcatccattgcaggtttttatcaaagaggccttttattcggttcttctttcgcctagaagttgctttttggtggaagtatttagtatttcgatctccatgggataaccaaatggctctacttctttgtttccaaaaaagttcctccttctcaagatgtccattgaggtccctttccctttctttaagcttggcaaattcgtggctggtatgatctcgagaccacttttccacctcttttttcagctcttttattttagcttggttggttttcctttgaattgtattccattgatccaataaagtaccacaaatatttattctgtcattaaggtctgctggcgaacctatatgagtagcctctttccaagtgtctttcacaatttggtaacattcttccttatccgcccaagccttttcataatgaaatctgtgtccccaccgttgttgagtcttcgcatcacatggcatggtgttaaaggttactagtaatggactatgatctgaacaccatctgctaaggtgtttgactttagctattgcatagatctgccaccagctgttgtttaccattactcggtctaatctttcaaaaaccatgttggttgcccttccattgcaccaagtaaacttgttgccttcatattctatttcccgcagtgcacatctatcaattgcattattaaagttcttcatgagataaccgggttttccaccaccaccaagcttctcatgaatcgctctaatttcattaaagtcgcccccgcaaagccatggaccattatattttcagcaagccgtctaagtagttgccaagagtgtttcctttgagaatgatcgggatctctatagaaacccgtaaaacgccaagtaagatcctcatccgtattaatccaagcatcaatgtggtaa

SEQ ID NO: 244144 - DNA, 1398 bp, Cannabis indica
caaaatacccttacataagagaatcacatggagagtatcttgaattgacaggggcaaaattggtacaatgtttaaaaaaagagataaaaatgatagattttaaaagaaaagataacaataaaagaggacaatataaaaatggtatagagtgtaatttcctctctgacaacacaacttaagaggttgggtggcccatatcaacacacatatgcgtaagcccaaacccaaacgcgtctgatccctaaaaagcccaaagctgccatatattgccacgtgtagaagttgactttgcagcgtgtggcgtacgtgaccattgactctgtgagagaaagactcttgacatgtggaccaggtcctggggtcgtgggggtcccacatggcctttggtccatgttcttcaagctctatcaattctctatccctttttatattatttgtttataccataatctttttttatttcacttgtttataccatataatcattagtgaaatctcaatcttataattgtggaccttttctattttggtattattattaataataataatatattaagtagggaattaatgtcctggtctagtccatggtgtttaagttgtgacctaagaaatctaagcaaagaaaatattcttattatgtgtgtgcaagcttatactaactagagaatttcaaactcaaagatccatgacctctttcaaatttcgtgtgcttaattatatttaattaattagtgattatatctttccccaaacttttacttgactcttttttttttcaatgcgcttgagccattttaaaaacatggatttgttttcttatgtctatacacaataagtgtaattggtaggtagtataattaatatggtagtaattaatgtgtatagaaataattttgtaattaatggttagggtaattataattatattattttaaaataaagaaatactaaaagatattattggtgtctaacacacctctaggtgtcatattattattagtgtaattaaggatcgagtcctatataatttaatataataacttttagaaaatatcgttaactaatcgtaaccatcacatcaaaaacgtattgaacactactattatttaatatgaatattctttaaaatacaatgtgtgtttaaatataatttcatagtttaataatattaatgacttaaaaattattggctacttgaaaattgtaattacacaccattttcattaggagctaccagaagaaaagtgtaaataaaatccctcaattatatccatttacatggttgttgtgtaattatttggttaaataattacgctaaactttataattattttaaattacactcaattttaattatataatgacttttttaaatatagctcctaattaatttac

SEQ ID NO: 244145 - DNA, 1478 bp, Cannabis indica
gtaaaataattccaacactctcacagaatattcaagctcagaatgaaaaatcggcaaaattggtaagcaaactattttcactttatttatagagtaaaaatggtgatttgcgtgctcctaaattgatggatcaaattacattcaagaaaacactaactgtatctaacagtttgaaaagcagaaaggttatcattaaatgactcttacaaaattgaggtaattcaaatgatgatattgtcctcgagactctcattgacataatcatttatcgtttcgcaaatccacgttacatgcgctctttcaatgaatgtaatcttcataaaccacaaagataatgtcatgtgtcattttatttcaaaaagcaagaagttgtcaaccataacttgtttacttagaattaaaaagggttttcaccttttaagcatccacatgtcctcatgccatccggaaggaagattgtaagtctctggaaccccagagtttcaaaagcttggggggctaatactatttgtgtttcaagaaggaataactccaagacattaattcgtcttatacaggcccaaatgtaggcccaatcaagataatggatcaaacccattatctaagtcaagacatccggatgctagactaacacctcgtctaggagagataaagacccaacaaagcaggcttctggatagcacaaagaagtgttcctagaatggaaattaatgagccttcagatgtcaagcttgcgatctcgctcatttattattaaatcccacaatattaggactttatttttgaaatcatatctgagaattaattattctaaataaggaaataagataatttctaatcaagtatttatgcgtctttattatccatgaaggtaggacacattttgataactatcaacatgatgtggcatccacattagtagaagatcaatgcctcatgagctgggtttcactagatggacccaaagtcaatatgttgttttaagttaccccatcagtgaaaaatgtttacatacgagaaccctaagaatataaatataacaacaatccttcatgcaaagggtttaggattcatttcttacaagctaaggcaagaaatatgattctcaaacttggcaaacacttttgtaattataatatctggagattagtaaaatagattagtaactctaattaaaagaattagctataacatgatatatatatgaaattatgaattaagtatgtgatataaaatgataaaactacccttggtagttatttatgtggtttataagccctaggggaaaaatggtcttttgaccaactttactaaaatgtattaagccatttgttgactgagatagaaaatgaaaaccaatttcttggtctgaattctctcaaccgacctcctctctctttctatattccaaaatttgtgattttgttgatcttttgaagaatattgaagtcttttgaggggaaattgtttagtgttgc

SEQ ID NO: 244146 - DNA, 1213 bp, Cannabis indica
agccttgaattcttgagtcattgtaccattccatgtgggcatttgaagagcagcctttactgttctgggagtgcaggaagcaaaaaatgcttttggctttcgaattcctacctttaaccgagtgagcattgggtgagaatttgttgctggtgcaggatttgtaggccgactgtgatctgcattggaaacattagtaatgacaggcaaagtagtgacaggaacaggtgaagttgtagtgagaggaggtaaatgggaagaggtttgaacagcaacatcaacaagttgattgttactgaggggagcagtgagattggggctgggagatgttgtgggagtactatctgtggatgtagcaggtgagagaggcagtggtggttcaggtggcatattttgagtgtgaagtagagatgggagaggtggtatgcctgatgtggaaacagtaaaatgagtgtcaatggattgtttttgagagttggcataaggaaattgaaactcattaaagattacatctcgagagatgtaaatccgtttatctttggacatacacttataacctttatgagacatgctatacccaagaaacacacaaggagtggacctatattgcatcttgtttttattgtatggtctaaggttcggatagcataggcagccaaagattttgaggagagagtaatcgggtggggagtgaaacagtttttgtaaaggagttaagttttgaatgacagcagtaggcattcggttaatgagaaaagtggcagtgcgaaaggcttcatcccaaaatgttaagggtagagatgcatgagcaagtagtgttaaacccgtttccactgcatgtcgatgttttctctcaactaccccgttttgttcatgagtatgaggacaagcaagcctatgaacaatgccacattgctcaagaagattggtgaatgatctgaattcacctccccaatcagactgtaaagtcttgattttgtgaccaagttgtaattcaaattgagttttgaatttggtaaaggttggtagggcctcatctcttgttcttagcatgtaaatccatgtgtatcgagaataggcatctacaaaactaatatagtatcgatagccatttgaagagttgataggggcagggccccataaatcagagtgtaagagttgcagaggagcatgataaactgtggtagagaaattaaagggcattttgtgatgttta

SEQ ID NO: 244147 - DNA, 1385 bp, Cannabis indica
aaaaaaaaaaataaattgatttaaaaaaaaaaaataaaataaaaaaagaaacaaaaccaaaaatatgtttgactaaataggctgcgaggccccaaccagcaccatacaagatctgtaattacggacacagatctccccaagattttgtttccagtaccatgcatgaaagtcattgtttttatgcaaatcccaattggatgcatatataatataattaaggttaaagtgataccttttattatcatagctagtaatctcatgatcatggaaaccatatgttattcaccttttatgggacaataactatacatagaaatatgatcacactaccagaactaccaaattaaacccttccatgtataatctcgaaaacataggcactgaggttaatatccagacagtttgtgggtatggaagattcaagaagggcataggtagacagaaatgattactggattgtcaagtagtggagaatattttagatgagcattattgttggaaaaataagtgtataacactattttaatgggattttaatatacaatctttagtgggacccagtactaagatttgtaactaattcaaaattaaatttacttgtctaaaatagtcatccgatgaatttaatattgatctcaaaaaagcctcagctgcatctattgaggcttgaggtagaattgaacatttttcgagtttgggtatcggatttcgggtgtaacccaaacccacccattagttactggagtatcattgactagttatgcatgaccgtatttttatttctttcaaaaatgtcattttttttctttatcatttataactacaatttacaaataaaaaataaaaattagcaaataacatagcaattaattagcaacgcagaaattaaattatattatataattaggggaattttcaaaaaataccttttttttttttatattttatttacaattttacaacttaaaattttttattacaaacaggttttaaaattataacatacacttttcttaagaaaaagtaagaaaaaaaaaactagaaatcgacattacaacaactataaatcaacgataaaataacaaaaaataatctcatgacaactataatagaactataaataaactataaaacaataaaaaaaaaaaaactaatggtttattgtttttactataatagtatttttataaaaaaaaatgcaaagcgcattttctaaagtttattttttaaattttggttgattatataaatttttcatataattatatattattgtagtgtgttaaaaattaatcctccacttacactgatatgaagtccaagtacaacatgaacacaaaggacagaaaaggaaatacatgcaaatccctaagttgaccttcggt

SEQ ID NO: 244148 - DNA, 1409 bp, Cannabis indica
ttaagaattctatttttggtacgataaactattcgaaatttttcaaaaatttacaggaaggacattgtaactataataaatattaccgtgaaaaaaaaattgaaaaaaatattctgacatgtgatttcgagcgtgaaaattaactaaaaaattgtaataagaaattataattagcactcttcatatatcaactaaaaggaggataattttaaaataatatataacaattttttttctattaaaataataataagaaacataataaatgcaaatctcattaatgcaattttcacaacctaaattattttttatttttaaaggaatcctagcttgaattccatccacacacaccaaaaaaagattcattaaaaaaattattgttttattaataataaaatagatttgatcaaacaaacatattgatcaagtcttgttattattatcattgtcagcaagtgcatcatgggatacatatatatataataatatgaaaatgattatgaaaagtaggtataacctattgaagaggtttttctttaatttatttatttttttctcctccttttctattttttattcaaagaaaaacaaaaatattattgaaaaattctacactctctaaaatagttcaccaatgtatttttttttatctatttcggtattagaaagaattttttagtctaattttttttcatgatcttttacgttataattatttaagatattttatgaaattttaaaaaatttataaaaatttaacacaccgaaaataaaattcatatttcacacatgtataaaataaaaaaattttacgtacaacaaactatttaaactttatttttaacgtgttaaattttttcaaatctctccaaaatttgatagaatatgataaacattgcatatatatttgtggaaaagagaatttatttgagaaggtgcgtgtgatccgtgctaattaggggcactatacataataagacaaagagggaaaagtacatgggtctacttgtaatgcctttatcttcatcaacaactttcactatcttaatttaggataaaaataattaaataaatatatttattatattaagatatgtacaaacctttacacctaattttgatttctaaagattcaaaagaatattaataatataaatgagtgtgtgtttatgtttgaaaattttatagtgggatgtaatttttgccaatattgttattaatattatatttttttatttttagtattataataaattataactttttttaatgtatattgtaattgtagtagtttgttagaaaattaataaataatatataaattgtatataatttagaatataaagattagatatatatacttgattaattaattatatcaattatcgtaattttgatagtgtaatact

SEQ ID NO: 244149 - DNA, 1246 bp, Cannabis indica
cttggtaaaataatttccaacagtcaccccacgtggccttgcctttttcactcttatacttctcgtacttggcatctaatcatcgtcgaaggtctgtagtggaccagctgtcctccgaatgttccacaattgtccttttgtcctgattgacagaattgctagggtggttcctccgccctttgggcttaggtactcttttatttttcccccttgccacggttttgcctctaggatcagaagggcatccaagctcgaaagcatcagtggccttctgcatcctcgagggctggctagccgaattcgtatctttttgaggaggttgaggagcaaatttttgtgggggctcacccccttgcctttacctttatccttgtgaggattcaaggtttcgatttccttttgtttgtgagcacgctctttggccattacctccaccgaaggttcgttttcggacttcaccaagttgtcaaacttattttgaagacatccatcattcttttcatttttacagtgagcttcctctattctgctaactccgtctgagtagcttctaactctttggtcacttgtagcaggttagggtcatggtcataataataaccatctttgtagtacccatctctcacatagtcattgccatgtcctcttcttccccactctcaggggctggttgtcatctaggccattgaacacattctcggcatcctccctgtgattctcggcattggtcgtaccttcttctcttatcttacatttttgagggccaaaggcgagggagtctgcttcctccataacagtgtccaatggaattttcttgcttatattcttttaggtatttaccatggttggagtgatgcaacgactagtaaactttcctcagctctcaatgaaagcaccaaaatgtttatcaagattttcgaaaactaattaattagagcataagtattatacccgaaattcggctggtacttcagaaggtgacacatgttaatctcagagaatatgaaccagcaaatataatggcaatcatattaataaatattgaatggaataactcattgaatgcagagtcaatagggtatatttataactcgcagattgcacagtctttagggagacaaggatgtacgaaccattgaatcacgtattaacgagaaacaatttcgtgccagaggacgtaatcgcaaggaagacatcgataatacatagcgaggcatctacctcgcaatatgtaaggaggtgttga

SEQ ID NO: 244150 - DNA, 619 bp, Cannabis indica
aatcattatatatggtggtatatactaataaatgtttattaattctcattaaacagaaaacaaattgaaaaaggttaataaagaaggtgggcataatagtatattaaccatgcgtcaacaattattatatgatctattctctcatatacccctcctttttatttttttcatttagtgttgcctcaaaccagccagaacacctaaaatataagttaatatagaagataaatcataacatcatgatcttgcctcttggattaatatgttaacaatatacatctacatatatatatgatcataaagttaactatatttgttctcttctccattctcttatctcgtgagattctaagtaaatatagcatacataaaaattataataagtcattaggctggtgaggttggtaaatgggagagatccaaagttggaattaatttaaaatctctctagatggtgaattttttaggcgtttaatcaagggaaaaaacaaaaaatacaaaaaggaaaaaaattacaaaatactttgggccggcccattaaacatttatacagtccacatacaaatatttacaaaataccacatgcactaagccttcagctgtacagagcgaaccatga

SEQ ID NO: 244151 - DNA, 2224 bp, Cannabis indica
ctctctctctctctctcttcgccaccactgtcactcatctctttctctctcgtccagagatagtcatgcgaccacgagccaccacaagcaccaccgtgactctgtccctctcctccacgagcaccatgagttcatatttgttcatttctttttatttctatatttttgtttattaattttcttattttggtattttgtttagttttgttctagatttgagattatttttgcattttatctttgttttgtggatcatcaggatctaagatgatttagttatgattgcttttatggttaatttgaatctaataaatgcaatggcagtagtggtattataatggtgtgcttgcggtggtagtgggtggtggtgtttacatggtggtgattgacggtggtggtggtggtatgcagtggtagtgttggtggtggtgactgcttaaaacagttgcatatactataagtgatggttttaaacaggttcctatagtataggcgactgttttaaacagtcggttatactgctcagtatccccgatggttttgcacgtctaggaaaaagttttcctgaaagttttctacttttgcctattctacccagttttcttgatggtcgaataggcgtcattcttaccgatgggaataatttactcgactgcttaaaaaagtcaagaaaacatagttttgtagtagtgtcacttactttcttttctttctgtttacatgtattacaagcacacaaatgactctctactctttctctttagctgatgaagtctgtctcaggtatcttgtgggtttaaaatttaggaatttataggcttctgtaaacctgagctcaatctaggctggcagttggttgcaactgcttttttgttcttgtaatcttgagtgacatggccagaaaaactcacaagcgagggagttttaatttattgtaattgagaattagttaaggtctttagttgatgacttatatgggaatttacttaataatgtacacataaattttcatatgagttgttctacgtggtgatagctttagttttctaagggtcttagcttaaaattctcccttcttaacttttaaatcaaaagttcttaatcctaacatggttaggtacgatcttcagagtgttatttatattcttaaaattgttcattaaagcctaccaattggttcgagtaacacatacatcttaggaatattatagtacaattgagtgggagcactaaccatagatatggaatctataacttctatctggacgtaaaagtaaaatgataattttctttgagtttggcttaatagagataaatggaagagctctaatttcagtaattatattagtttactgaaatatcatttataggaagctaagtgtttttaggataaaatatattgaggggtggaacagtaaatttacccctacttgatgtaaatcatttatagaggatctttgattatttagattagaacgatggataattcatagtgtatctatatcatggaacatatagagcgttctatataattaagagtgcaattctgaatctataatggcgcaaggaggaattaataagttaggaaatttacttggtaaattctaaatctgcttattggaagcttggttatataggctcatggtccctacactagttgagataatactgcttgtaagactcagttaattggttttaattaatcaattataattctaaaattagactatgtcttatttatgaatttttaataagcaagggcttaattgtgaagataagagattttagggtttatttgttaattaagagactttattaagtttaattaataaataaattaaatgataaatttatttgataattaattttaattattaaataaatatttttgacatttaaaagattgaaatagaaaatatggcatttgtgaaagaaagaataaattattgaataaaatggcaaaattctaatttagtggggcccatcttatggccgaccacttaaggtaaatttagctatttttttatcattttttaatgccatataattttaatctaaccctaggagaaatcttataaaatgaataatattatggttctcattttatccaacttaagtttacctagttttcattctgtgtcaaacaactagaaacttgagaacctccttctatagaattcgaatctccctctcttcttctttatattttcgaaccctatagtga

SEQ ID NO: 244152 - DNA, 900 bp, Cannabis indica
ttatggaataatttgtttatgttttttaataatttagtttaattttgagatattgtaatagaattgacgttaaaatagtttattttgagacatttttaaattattaataaatattattagagttaaattataatatttgtaatttgattaattatatttaaattactatttataaataattatttacataattattaatttttaatatattatatatatcattaatatagtattgtataattatttatataatattatttataaaataattatttttttatttttaaatgatgttagcggcagagcattagcggtggggtcctgccgctaatgccctttgccagttgtgaagtttgaaattggcagatggcattagcggtgggatcccgccgctaataattattagcagcgaacaccaatttcgccgctaataatagtattagcggctaattattagtggcgaacttttaacagggaattcgcctattgtggacgaatctggggttattagcggcagagtggtccaccgctatatatgttgtagtgtatgccactatatgtgaatgtgacttcataaacaagtaactagctaagagtagatagctccaagggggaccagagttacaaatattattaatccaaggcatgtttatgatatatatatatggacagtggttgacttagaatttaaattgaaggtgcaaaaagtaaactaaatattaaaaataaaaatatttgttagagatataattagtataatggaagaaaatcaagacattacaactctattgtaatataatgtaagaatcaacaaagatataaataaatattacaatacataatatacaatatatgtacactatatataagaaaggtagaagaagatatataaatatatat

SEQ ID NO: 244153 - DNA, 3815 bp, Cannabis indica
tcctaaaacaaacaatttctaattaagggcttttgagtttagagctttgaaaaacgtactaaaaacactaataataatgtgtttatataggctaataaagttccctataagatactaaaagatttagaatttatactttaaaagataaaaaaaacaggctcaggagccgcaactccaccgccagtcaatttgtcttttgctcacaatattttatcttttaacacgtcaaaaatggggttcaaacagtctcttacatgcgtaactattttattttatacgtgtgtaaaataaaatttttgaacacttctttttatatctgaattgctcgaaatttttcaagatgccttaaataactataacgtacacgatcatgaagaaaaaaactaaaaaaaattcctacatgccaaaatagttgggagttcacttatgcatccctttttggtgggtgcaccgtagaagctccctatactatatatgtgaattgtgaaacatgtagtgtacatatacataatggaagacgtacacctcaggaagttaattttgagaagaaacctatttatgataagagtagacgtctaaatttatcaagcttaattatgaagtcatcccaaatcaagaagtgattaattaagggaagtcatcaaaggacacaatagaccgtttgtacccaagctgggaccccgtcatcaccacgcgaccctagaaaggggtcacctcccctcaccttgcgcaccacctgaaggacctgctcatttctcttaccagccatcgaggccttaactcgttgcacctcccaacacctattgaccacgaaaggccttgcctcgctgcaccttccctcaccttgtgagcaacgctctcaagcaaacacctacatgaggccatgcctaggctcgttgcctacttcctcatcaagtgggccatacacttgcacccacaatccctcatgaggcatgcccctcactcccctctctcacacacgctaacactctcacttgctccactctctcactcaactagcaagcgtgccatttgcttgaccttgcaaagcgtatgatgatgagcccccctcttattgatgagggcctcttcgatgggagataatgactggaaaaattcataacgcaagtatacatctcgtttcaagtaataatagtgtgtatgcacaagtatcatcccacgaagactattaccaagtaccaattattgttttttctactttctatttggcaaacaaagattgagaaaatattattaaaactaacaaaagaatttaactataaaattaaagtaagtaaacaatgattataaatatcaataaatagaacttaggatattaatttcataaacttgtcaatctatttattttacaaattcgttctataattttttcttcctattttaatagtggattaactaaaacgaatcatattctttttcgagttataaaacttcaatctacacgtaaattttctacatatacgtgataaattttaacaaataaaagacattaagaatgaattccctatttgttacacaagtcatacgagtactctcctccaatatgtaacctatgactatattcaactcttatctctcaaatatcaaattaaaattacaaaaacatgcacataatgattaagtattcacaaacattaagcataaataatatacattaaaataaagaggaagaaatcaatagaacatcatagcaaaataaaatataaattaaagtgactccaacccctagataagaaaatttgtgagaaagtctctagaaaattcctagggcacatgaggaatagatttttatgaaagatatttttgtaaaaaagagggagaatataacctagcctccattacaccatttggagcggggaacacaattcttggcagccattattcaaagaaactcaagagaatgaagaaaagaaaatgaagaaatggagaagcctaacaatacaagtttgataaagtcctattgatccttggttaagtctttgtctacattagtggagaaggaagcattgagtcaacttatggagacaaaatgttaaactttagcattgaggtcgaggaaaaattgagtttgttttgggaagagctatgcattagctattaggagagacacttgcattataattttaacacttcattaacacttgagtaaattagtcgaatgcattagcaagaggcataatcatcatcatcatcatcttccatcctcattttaataaagttttgagagtatttatcattattaagttgcatgttaagtaaagatctcctctctttgtctcgtgtcttgtgtgttatttattttcttttgtgtgagttgtgttttgagtcaattttctttgtcgtctattttttatacctctttgagtcatcactcgaggacgagtaatgttttaagtttgggattgtgataactcttgaataaagagttatctgtcatgtttttttagcttaatttgtgtgtgtattttacttatatttagttcttttcctcccattttgtgagaatatatgttattttgtatttttatgttcttttgggtaatttggagttgttagtgagaattattaagttttatttgagttattggtaaagaaaaatgcttaatagagaaagtgcaaggttttactgaagttttgcaggaactttgctgcagcaaaagtagcagggctgattgttgaaactaatgtagaaaaaaatgacgtggcaattcactgatgtggcaaaaaatagctaaggtggcacgaatacatgtggattgtggctaatttgtgaggaagtctttagaaaattcctagggcacatgaggaatagattttatgaaatatatttttgtgaaaaagagggggaatataacctagcctccattacaccatttggaggggagaacacaattcttggcagccattattcaaagaaactcaagaggatgaagaaagaaaaggaagaatggaggagaagtacaagaaatgaaagagattgagattaggctaatagtttgctctctttaccttttactcttcttttattttattttctatttctaaattttgtaatagatgatagaattttgggtatttttgtatttttgagcatgaactaatttatcttagttagaacttttaatgaaccttgaattttaaattttattaatgttttataaatattttagtaagaaagtttttttttttcattcaaggatgcttaatgtttgtctacctacttttgctcgatcaccaattgtaggttgttagctaatcttgattttggaaaaaaaaaaaataagattagtgaaaatacttgaatgatgcaagattatcaccttggaaaagtgtgatttgtagatggtataagaatatactatttacgacccatgggaaattggtgcttaatttgtgttctctaagtctaaatttgcataggaatatgttaatttaatcttgagagcccataacatataagtttgaaaaaaatcatacattcatttatatttctagttgacaaaatttaattactgatgcattcctctatgacatttacattgaatttgcattctaagtggatttgattattctagctcatcactttgctcattttcctttctcgttttatttacttttttgcttagtttttagcctagctcaaatcatcatcacttcttgtttgtgttttacccaaattgtttagtattaaattttttgctataattaaattttaatcaatccctatgaaggcgatactcttttacttatcattatattacttgtttatggctacgtgcacttgcgtatatcta

SEQ ID NO: 244154 - DNA, 2584 bp, Cannabis indica
atattcagagatactgttgtaagagatataagaaaaggaacctttctccttgttcttaagttggctaaaaacgaggtcaataaatgtttaaataactgaataatgataaaaatgtaaaaaaaatgacaaaatgtggcaccaagtgtaaaaatccttttataattcttatttatataaattttatcgtgcttcccactgttcttgtaaaaattataatgatcaattaatcttatataaataaacaaatttgatagtttagaaatattttaacatgaatatcaatacaaaataattagaaaagtaatttatgataaaaacattttgatatatttattctattacatagaaaagtaattaaatacccctttcaaaaaaaaaaaaagaagtacttaatataatatctggcctttagaacaaatacataatatctaagtaaccaaataattgtgatatatatcaaaccactcttaaaacatttttataaataaagaaattagtataaaaatctacacaatgtagagaggatattagtggacaacaacaatattaaacacacttgcttatttggctttggtacttccatcattcactatcttcatcttcttcaatgattttaattagttttagaatgtggctacttcctttgattttcatcctcattttgtcatttataatgttagattatcaccatacctcctactcttgtcatccacaactaagcattctcggtggtaagcactctaacccaagtaactcaagttaaaaagataaacctacatcctttactctgacacaccactgtcaagagcttttgttgacccacggaaaaaaataggttcatggaattgacccagagaaaacaaagagggggatgcaaaggagagagataaagcagggaaaccaaataaaaatgaagactctgtcaattactattgggagattaaatagaaaatgaagactgaattttgaacgtacgtttggaatcaattgaataaatattaattagttctcccaattaatagtatacattgtaaaaaacttccaatttatagcatacgttaactataaattttcttaactatataataactacttataaacaataacgtttatttggctatttagattgtcaaaagaaaagctaactcactccctatacagctcactaactaaccaaataacacacaactaactcactagaattgtcctattttgatacttatagaagatcccgaggagcacaatatcaaatttgtttcttctagcctattaacatgaggctctgcaacaagcagtgcactaaagtagatgataagaagaatttattatagtattttacatataaaattaatagagttcttctgacaaaatccaatctggaaaaggaagctcttaccccagaaaaaatggcaaaggaagctagtgcatgaagataagccacgtagtagaaaacatgtataatgcaatataaggtggtggagccttttcccatttcatttgaggacccaaaagggcttggctttttaaaatattacacgttcttctcatcttttggcttttacacttttgagctcatctttcctattgaaaagtgaaaatgtgaacttgactccaacagtcatgatctccaagcaaagtgagctttttttctccaatcttttgcctttccaagttgtacaaccttacgtgtgaacactttgcattttagaacatttgttcttttctctcttctctatttctaactttggcttttgtttcgtcactattgggtcttgacaaaggtatagaaagcatacttattaattaattctatgcaagaaaggggtatattattaatctaataggaaaaggtaatcccaaaatctttgtgcttgtttacaacaatgaacttggtatttttttgttttttgaataattgagtgataaggaaggaattactagattcccctctggtgggttttgtctaaagttttgaatgttcttctcattctttgttgggttttggttttcctccgtttttcctttttcctttttcttttcgcagaacatggcttccatatttttggcataattggtatgtttgagggatgcatttcccatggaactggctttcagcaaatgggcattcacatttctgctgctctttggcctcttcttctatggaggatgctcaggtaatttatattgctgtaatttcttgttaattgtttgtttttttgggaagtttttcttttatagcaaattgttcattgagaatgttttgtttttactacttggtttatgatctgttgcatgtttaagtggagggattacatggggattctaaagttagagcagtaaacttgggagggtggcttgtaattgaaggttggataaagccttcattgtttgatggaatttctaatggagacatgcttgtaagcttcattttccttcttagaatagtttggaggtttgtgggtttgctttaccttttggaattgacccatctgtattctgtggatatggttttcaggacggaacagaggtccaaatcaagtcactaacacgacagaagtacttgtctgctgagaatggtggaggc

SEQ ID NO: 244155 - DNA, 1475 bp, Cannabis indica
actatgcagctcagattaaaaaccagagatagacttctcagatttggttttcaagtggaagaatcttttcctttatgtaataaacaaaaagaaacatcacagaacctattctgtgattgccaattttctatcaattgtctgtaggagataaagaattggctttagtggagagcaagtgctacttctttgcctaatcttattagatggataggcaggtctaaggctaataaattcaagaaataagtcttagcagccgctttggctagcctagtttacaacatttgaagagcctgaaatgctaaaatttggagaggagagctgaaggatcctatcaagcttataagggatattaaagaaagtatgattcaaacaatttttatgatttgtcctaagaaagttggagaagtagacatagcatggtttcatggtttgtaaaataaaataaaaaaggaagaagaaaatagaagaaaattttaattgaagagatgtatagatggcatagttgattattttaggccctaatttgggtgctattagtttgtaaaaatagttagagcaatacaacttcttaatttattaaaaaaaatatatctaaataaccgattgagggaatctctttaccacttgagagaatatatcaaccacctagaaagaatctctcaactactttggaagaatatctcaaccgccataatatttgtaaccactttttctattaaaatttaaataaatatttatcgtttgaattatttaattaatctaaaaataaattcagtaggactcatcttatctcatagatacctatcactgtatcattacacaataactggcaccaccattatcttaactagacaatggtggtgtctttgactatacaacactttttttttctccaatttatttaaataataaatttaaaacaaataattattaaaaaataaatacttactattttccaattgaaaataaattttttcgaacatcattatataactttattcatccccttgacaatgttgcaaggtgccaatagaagaccgtgaacctatagtactaaactctaataaattagattatttattgaatctcatcaaccaaataattttatttattaatttcatgattactccactataaatatagaattaaaatcttagtaattatagaattatatttactacgtttattgcagtgtctatcaatagaatctattgtagtggttagccctccttattttggtttgtaattagttttggtcaaattatcattttgtccttctaattacttctttattcactaatactgttaattcactagtgaaagtataatttagagtcaatctaaatttgtgcacaacttttcaattctagaattaactcttaaagagaacgaacattcgatctattagtaaagtcaagattccataattgtaaatcaagttcccagtcatccacattatgatttccaaaatagaa

SEQ ID NO: 244156 - DNA, 1359 bp, Cannabis indica
catcagcaccctacatctcgcttccaatccagttctccatgctcgcactaagcatgttgaattgactatcactttgttcgcgaacgagtcaaaaacagtcttctacaacttcgctacactccctccgatgaacaagttgctaattgctcaccaaaccgctcgttgcctctgtttcaagacctccgcaccaactcacggtgcttcccaatcccgtgagtttgaggggggatgttaaactatgaaattatcccttcgtacttaattgtattactttcttgcttttattatatggtgacatgtgtccttcaatgggtctcttctattataaatacaatgatagtgtgtactcttttctttgaggaacagtaatacaattttcccattctttctgacaggcaagatcaaatctgcccaattatgatgccaaatctacccaattatgatgccaggaactacaatttcaatctttatatcattaacatcattaagatcagattttttttttcagcgggataaaaatgtatattcaaattcacatgataaacaaaacatctactaattataatgaccacaaaaatagccaaacaacaagtatagcatataaaattatatgtaagaatcacatatagtcgattattgtctattgtatatattgaaaaatagaaatctcaagcttaaaaggtcattcatctaagaagcatattacaactttctctatacaattaattattttataagcaatacatttacttatattaaatattaattcagtgccttcctcataaaaattaaatatatattaaatattaattataatatagtgattcaatgtatacaaatatactgaccattgacaatcgtcattttttttttttgacattttgtctctattacttatgaagcgaaaaagactaacgatatattatgattatatagtgtaattaattactttaatatcgaactatttgtggtattttattgatctattatctatcttaaaagatttttttttttcacaatgcaagtcaactaattatttaaaaatagagaaattagagacaaattgtaaaaagagaatcttttttgctattccacaaaacaatgttcacaaaatacaattttgcataaacaaactagaaataaatagtgtaaaatttaaaaacttagacacaagagatggtacgtggtatcagtattctttcaaaaactactagtctacgggacaacgcccagagaatgaaatcaattagtaaagtatcaaagtttacaaaagcaattcatttaaacaaatttagactccctctagtgatttgtcgcaaccttttgtaattcaccttgctaatctgatctctgaaacac

SEQ ID NO: 244157 - DNA, 991 bp, Cannabis indica
aatacaaacaagtaacacacaataatttaaaacgattacaattaaaaaaataaaggggaaatcagttcctaaaagactaaaacataaattaaaaacaaaactagttctacaataaaaaaaacctcttaacacataatacctcataaaatcgattataattttttttttaaaaaggtgaggatcaatttgaaaaaatacggaggcataaatatgaaaagaatcaactccataacaaaataaataacacaaataataacacacaataactaaaaatataatatatatataaaaaaaaccgattatatttatcaactagttaaataaccggttatattttattcttagttagatttctggttcagttatttccattctaaataaaacactaaagacttcataaatatgacaaacataaattacttcttttggatgtgaaaggttgcacaatatggtacatttacaacttctagaattgaataaccaatgaaatacacgtaaaagaaaaggctagatataaaactaagtaatggatcaatcgtaaactttacctgaaaagacagcatctccacaaattgttcccttctcaagtgtttctctagttcctccatctgtagtatacatggcaacactcgaattaggaaaaagttctaataatcaaggtgtttatctcaagccaaaactttgttggatcaagtatgattaacatatttatcaaataatggagaattctcttacaaaattacatcatctccaatgtgatattttgccatctgattaggtgatgaagataagccttgtcatttctatatgaaccatattcattttcaatctgtcaacataaattacttttggtaaaatttaccacccttgggttcaattcagtttattaaaaatctaaaagctcttcactattatttgcttactttctttatatgtcaaagacacagaagatagaacaaataagatttgcaaatccacttacctggaccat

SEQ ID NO: 244158 - DNA, 1035 bp, Cannabis indica
aaaataatttccaacaggagttacctcctgggaagtcctctcgaaaaatagggccatctagtacatctagaataaaaaaatttagtatgataaaaactacaaaaggaaaagaaaaaaatttaatgtgagagacttaccgctatagcttgttgtttggaggcatgtttcaacatgacaaggtccatgatgctacaaactacccattctttattattaactttcatatgatgttagtagtcagatctattatgtttgcgacaaagggcaccaaaaccttgggagccaaagatctagacatggctgggcaatccatgatgggactagggctcatcccttggtcactatcggctatctctgccttcctttggcatgtaagatgcttgctttcttttggctggttgccacctcccggtcatgatgtctcttgaggtagagattagcctctgctactttcttaatgatctcagcctcgattacctaagggtgcgaaggccagttgagagaaaaggaagggatggccagaagggtagtgggaagttatttcggaggtactggctattgatgggtctgttgtttttgttattgttggagttgttgttggtgttgttattgttactgtttttgtttttgctgtggttggataggagttatggacagttggggccttgcttggacctctctagtaggggttccaacccacctcaaatctcccttgccttcgggagtcttctgccttccaccgccaacttagcctttttggcctctctcacagagttagatagggggtcaggacgcttaagtgactgagcagctttcctagtgaagacatagccttccccactttcatccaaaaggatgatggcctcgattctaccttgggaaggtttggcgacagagctcctaggaaaaaccctattaggtgctagtggaagttgatggaggggctgaacttcttcaatgaatggaccctttggtccatataagtcttctcaacacccacagatatcttttcaacacccatagatgttttctcaa

SEQ ID NO: 244159 - DNA, 979 bp, Cannabis indica
attaatataaaaatataatttttaattaatatatgtattgactgaaaaacattcgtcaacgaggaaacacttgctatgaatatgatttgttcatgcatttgatcgatcgttgttatggacgatgctttaaaataataatataaagaagaaaacaatgattatttccaaagacattgacagaaggggcgagtgtcttcagagtcagccagaaattcatgtccttgatttatatatatatatggtacagtacaagaaagcaaaacaataatactaaaccatctcactcgctatatcccttgtacacatataagtcaccatgttagacagaaggaattcaaggcatatggatatatttaaatattttacttcttagttcaagatatacaaatggaaagcttagatctatacacaaattatatatgttaagcatatacttaccccagaagtcctataacacctctgtgatcattctgtacaataaatcaattattagacaaatcttaccaatggggttattttagaggcataattataaaaataagactgcacaaaaaagaagaatcaagctaagattccttacagtaagagagcactcgtgggatttgcataataatggttacaataaacaaactttggcttgctaaagctgctgctttcgaaaagggtccccagaggatagttggaggtgcagtttgatgcatcttcctcacattaacatgtttatccaaaatcatcaactctaatcattttctacagctctgcaagagattcagaattcgcattagcttggatcatagatgaagtcacagtcatacaaccaaaaaaaaccctcaatttggacataagatcatgaatctgtccttggcaattctaattgaacttttggaattaaaattaaatgcaaaatctttctaagtaaataagtgatctaattgtggagcaaataaatgattttgcaacaatatatatatatatacat

SEQ ID NO: 244160 - DNA, 5162 bp, Cannabis indica
aaatcttcatctcactttcttacagctctttattataatcatatcttaatagttgacgaaaatctcggtcaacatgaagcaaaacatctcaaaaatgccaaaaaaaaaagtggctgcacttaacaatgaaactactagatcacaggttgctatgatagaacttcaaaattctgagaatattctagatgaacttctcgaataggaagaaacgtatcagaaacaaagatcaagagttgattggcttcaatgtggtgacaaacacacaaagttttttcatgcccatgcttcgtctcgcaaaacgaataacacgatcaaatccttaattaatgttgcgggtgttattgaaggattgaaggatggtatggctgcaatcattttaacttattttgaagatttgtgtacttcttctcctataaatgttactgctctttctcatgccatttctaccatcccaacaatggttactgctgaaataaatacgactctcattgaaccttttacaagtgttgaagtttatttagctctatagtaattgagtctacacaaaagctcaaaaagcaatgttatgttggccatgttctatcaatattattgggatatttttggttctacaatcagttacacaagtggtcttaagagtccttaataatggtcatgacatggaaagtcttaacaagtctattatcactcttattccaaaaattaaaaacccaagtgaaatggatgattttagaccaattagtttgtgtaatgttagttacaaactaatctccaaagttctggttatccgcttcaatgaagttcttccttttgtcatctcagaaattcaaagcgcttgtctcacaaacagactcattatggacaacattctaattgcttttaagttggctcatcatctcaaacacaagacccaagagaaaaaatatttttctactctaaaattggatatgagtaaagcttttgatagagtagagtgggtacatattgcatctataatgagaaaagggggcttttctggttgatggatcgacttaattgtaaagttcttacgaaccactagtttttctttctcccttaatggtgaggtagttgaggatgttacaccaaagcgaggactacgttaaggtgacccgttatctccatatttatttttaatttgttcagagggtctctctaggttgttgcaacacaaggaagcaattggcaatcttgaaggattgcgcctctcacgtcatgcaccattagtgagtcatcttttatttgcggatgataaccttttattttgtcatgcaaccaataattcaacattagttatttaaatggttcttgagatctaccaccaacctttgggtcaattccttaatacctaaaaatcaatcatgtctttctctccaaatacaatgtcaactgtacaaaaaaaaaaaatcatcaaactttgggtatgccaataagtgagcactatgaacgatattttggactttcttcttattctcgtagggacaaaaaagaactattcagaaatatcaaagagcgtatttggaaactgcttaatgcttagaacgaaaagcttttctcagttggaggtgaagaagttctcttaaaagtaatggtacaatcaattcctacatatgcaatgagttttcggcttccaaagtatcagtgtagccaattagaggcgatgatggaaaacttttggtgggaatcaaaccaaaatggctcgaaaatacattggaaaaattagaaactcttatgttgatcaaaatttgaagggggtgtgggctttcgttcttttatgcattattaactaaataatcttggcgaatcattaaagcgtctgattcactactaagccgattattaaaaaacatttacttttctaacaacactttttggaagcaagtatttgtcactctccctcacttacatggcagagcatttgttggagaagagaactactacccaaaggactcagattcaaagttgatatggcgaccaaattgtcattggtaaagatccatggatcctgggccatagtgaattccatcctctgtcatatacaggacccccatcacttacattgaggcactttattaatgataatagagaatggaatatcacgctcttaaacgattatttcaattcaattgatgttgatcgtatccttactatccctttgagtttcttcccaacccctggtaggcttatatagaatttcaccacaactcacatctatacagtaaagtcagggttccacttggccaccaccttggaagaatttgctaaagaagcgacctcaaattctcatagcaattggtggaaatttttctaggatttaaaattaccttccaaaatcaaaatctttgtgtggaaagctatccaaggagcccttctagtggctacaaacttacacaagaaattgttttttttattgattcggctacttacttcagatgtgcccatgcttgagaatcaattgggcatgctttgttcaattgtcggcatgccaagttggtgtggaaacactttcatttccatattaattttggaaaagctcgacaaatggttaacggtgattatttatttttttcactccattgttcataatcagacagagatggaattaataatctacatcatgtgggtaatttggactgagcgaaacaaggtactcaatgatagttctggtagagatgagtcatacctagctacttttgtgatcaactatttagataagtacatcaaagccaagaatcactctcaacctcaaggcgcacaaaactcaactccaatctacatttttaggccgaaggatggtatcccgtggaaaccacctaatctccatggccttaaacttaatacgatgttgttgttgacatggtcacgaaggtttcgggagttagtacaattgttagagatcatgaaggtcaagtgattgttgctttctctaagtcagtacaaggatgttttagatattcagataaaatagaggctaaggccctctttcattgcctcaattgggatgcccaactaaatctgccaatcactcaagttgaaactgatgcattgagagtctcatcagcctttgataacattagttaaaattagttagttaaatctgtcagtaattagttaatattttgttttgtaacaaaccctctgtattctctctgtattgttttgttccagcctgtactttccttatataaataaaggtcttgatctcttgtaaggtcaagtattaatttgctcaaattctcagtgttgctctcatagaattctctgcttttatctctgtaagtttacatggtatcagagccactgaccaatgtcaatggactcatcatcatcagatcctcagatcgaaactccggtaggagctcctgcacctccggcaactaatcaaaaccagtcctggaacccgttttccaattctctcacatcttctatcacaattaaactcgatcggttaaatttcttggcgtggaaattgcaagtcgttccaaccgtgattggacatgacttggatgaaattatgttcagcaatactcatccacagaagcttctaatcaatggtgaacctaacccagcgtactctcaatggaaaagaaaagatcaactcttgtcgtcttggcttcggtcctctatgtctgaatggcgtgcccttgagcaaaaatttgccggacgatcaaaggctcgactgcttcaattaaagagtcagcttgcgaatattcagaaaggtaacctgtcgatcttggattatgtggataaagtcaaattgatatgtgacagtcttgctatagccggttgcaccattagcgatcaagatttggagttgcaatcgctaaatggcttagggccagaatacgactcagtcgtatcaagtataacttcaagtcttgaatccaagagtcttgaagaaattcaagcattgttaatggctcatgaatgtagattggagagacatcattctgctgcttaaatctcgaacagaatggttgctaatctcactattgggggaccaagatttggatttaatccaaattcaaagactccacatacaccagcaagaagtaatttcaatgatggctggcgcaattataacaggaattctttcaaatattcatcccctactacatcaaaacccatctgccaagtctgtttcaaaattggccatacagcagccatatgccattacaggttcgataaagcgtttgttccacctacaaagaacccatctggaaatggtgctccacctaaagccttctttgctgaacaagactcaccagatcacattgatcttcaagtgtactcttccaatacagtacctgattttggagaagattcatattggtatgctgacacgggagcaaacaatcatgtcgcattcggcatggaacacttggacaatgtaacccctatactggtaaagaaacacttgttataggagatggtaagagattacttatttctcatataggcaattccactatcccatctaatcaaaatacccctattcatctaaaatctattttaaatgttccttcaattaccaaaaatcttattagtgtttctaaactaacccatgacaatgatgtatttcttgaatttcacaaacattgttgttttgttaaggacaaggaatcggggaaagtattactcaaagggacagttaagaatggcctctatgttcttggcgaatcaacttcctcctcctccacctttcaatgtcatctaaccaccatttccaagtctgccaatactcaacaatgcagttgcactaatgattccattcaaaagtgttgttgcattcatgatttcaattctagcatatattaatgtaatcaaagcaataagatgcagtcctacttgtaattccactatcagtaataaagatgatttgtctactatttctactcctcaagccttttattctactattgatactgacatcaatctctggcatataaaacttggacatccatcaccacaaacacttaagcaaattctctcctctttatctattccatgttctttaaaaaatctaaaattttgtgatgcttgtcaaaaaggaaagagtcataatgtaatatcccgataagttaaatggtaaataattagggtttatattgatattatgaattaatcaggtaataagtgggatt

SEQ ID NO: 244161 - DNA, 870 bp, Cannabis indica
gtaccatctatgcttcattacatttttactcagaattgacatctcatacctctaaaagaaaaaaaaaattgacatttcatacttaaatatatgagtttgtatctatattggatacgcatttaaatatatttatacattttctttttgataaattaagttttttttaatggaaaaattaactaagaaaatatgtggatcacctattaactttaaacatttttatcaatattttgatcaaaataaaattgagatgattattttagactaatttataaaataggtagttacaaagatatgaaaattttaggatcaaaagtggatgtatagatacattttgttcatatttttttacatctagataattataatatatataaatatatatatatgacgaaataaattataaacatttaggatattttataaaattttaaaaaatgttaaaatattacaaaaataaaaatttaaataatatgttgtttattttattggattattagaactttattttatagtgtaagttactttaaatttttaaaaaatttataatatatcttaaataactacattatatgatgtaaaaaaaattataaagagattgcatgacacacaaatttttttaagaatttagaataatttggggcataaatacttaagtttaactcatagttgcaaataaatacctaagtttattttttggcagtaataatgcctaagttatacttttagaactccgtaggtacttggccgttaaatgtcaagtgattatccacgtatcattttcttattggtatttaaaatatatttttttaaaaaaataaaaatttaattacctatattaattaaaaattatcacgtggtaatttattt

SEQ ID NO: 244162 - DNA, 2301 bp, Cannabis indica
aaaaaaaatataattagtaataattaagtaagaacctatgcacctaagctgaagtcacaggcaaatagaattatgattttcaaaaaagaattaactactttttcctatatttatatgtgttaattaacctatatgagctgttaattattcttatgatatattggcattaaaaaaaatcatattagatagtggatgtgacattaacattgacaaacaagataataaattatatatgtcgatcgaattattaattatgagtcatcctactcgagttcaagttgaaaaaaaaaatgtaccatcgatcgatctttcacaaagaaatatttggtaaatatattgtcgtagataactatatattgagtgatattttagatgtaatacaagtattaatattaaggtaatatctctaaattttgatattcttatgattttgatcttgacttaaactaaatatacatggactctctatctgttttgctatattacattaataactccatatttaataaaatgaattcaaatagtatcttgaactagctcgatcaaaatatgtgttgtgttgcatatatttgaaattattttgtttaaatttcagattagggctatttttttttatctattttataaaatatatatttgatctaaaattaatgtaatttaacaaagtatatggtccaaaaaataatcatgcaatatacactgaggtcataatgatatataataatcacatgcatgtacaacttagctagccaaaagcctagaatgtataagtgccatttctaataaaacatatggggatttatacgtatatagtatagacagattcccaaatacgtacttggtaacaaaataaattaaaatatgtaaaattgattcttgtgagagaattctatgtatcaataacattttgcaatatatagtaaaagaaaaacatattaatttgtaatgattcgtctaattttgtctcccttcaactttcagaaatgcatactcaactaagtatataaagacaattactacattgttgtgattaattgtcgtattaattatgtattataagaaggagaaatgctaaagggcaccagtaatgcctagtatccttttatgtgtcgatatcgatattcaattaagtatcgggtcccacatagtttaatataatagcttttaaagagtatcgctagtcaatcgcaacatgacatgtcgagaaggtactaggcaccactagtatctaatagcaatactctataaagaagagtagtgctaattcaagttttttaacttttaaaaatgtaaatagccataccattaattatttgcattcatcaaagtcaggaagataattaattaaatatgtatatatttttttaaagaaagaccatataattatatttacaataaatgaattaaatatatatcatatttgaaaacaattaaggattatgacatgtggaaatgagtaagaaaattagtgtaaattcttgagaaagaagaaaccgagtctaaaacaatattatttgtttcactcaaatatggttgttatgtttatctagtgattgtaattagttgtgaaacttttcaaagtaatcatgatttttggagaaaattagctaaagagctataaaggaaaactaatcaattaatctatgggaagcatctcatacaaaagttagtcaataaaagatatatagtacaaatgtagtatacaatatttcacataaaaaatactttctccgttaaaaacaagagaaatatgtatataaatatatgtgtggcttaatgtgattatccttaaatttaatgcaggggggaccaatttatgcaaacacacatttactagttagagacattcctttactccatgaaaaattaattaccctttcaccaaatcccatggttgattttggattaggaatcttgaggcagaatttggatagggaatttgggtttttcttaaaattgaatacagaagataataatcacctccccaagttgtcattttccataaattgaaaattcacactgtggacttataatggttcattttcattactcacacacaaacacccttatataccaacaacttcagatgagatcaactctgaagtccatgatgcatgaatttcactatcactcaaaatatccttgtaataaaaagcttaggtcaagaaaaagaaagaaagaagaaaaagctgataataacattaaattctataaatatatatatatatatatattgtatcatcagcattgcttcggaggtgtttgatgaaattcctccaaccttgaagagacacctatgca

SEQ ID NO: 244163 - DNA, 987 bp, Cannabis indica
ttaagtaaaatagaagcatcaatgattcccgcaggtcctgattatgaccaagaaacgatcaccgatgaggaacgagttatgtttcgcagggttggtttaagaatgaaagcttacttgcctctcggtatgtatagttcagaggtttttttcttaatgaagatcgattctgttgtctcggatactaatgatggtttgtgtatggtaatgtgtcaggaatacgcggtgtgtttgatggtgtcattgagaacatgcacttgcattggaagcacagagaacttgtgaaactaatatcgaagcagaaaacccttgcttttgtagaagatacagctagattgttggaattcgagagtgggggaatattagtggcaatagaaagagttccaaagggatatgctcttatttattaccgaggaaagaattatcggcgtcccatcagcattcggccaagaaatctcttgacaaaggcaaaagcattaaagcgttctgtggccatgcagcgacacgaggttttttgtcctcatcctttttcttagcctcccactctttcaagctaagtttaaatgtcattttccgatactaatttgtttcttatgttgattaatggcatcatgtaggctctcagtcagcacatatctgatttggagggcgccatcgagcaaatgaaaaatcaaattgtaagcgaaatatctccttccggtctttttttgcccgttaagaaatcattaaactaggctaagtatatctagtgtgtgagtccaaacattaaaatgcaaaatatttgttttgactttgggattgttacttcttatgatttcttctctattacatttgtgtgtgtgtgctttggagaaacttttaccggtacaaatttattaatagaaaattctctattcgcgagttatctgcaggatgcttctcatgatggaaagaatgacaatatggttcgccagaatgaagaatacatcgacgtgagattctcattccttc

SEQ ID NO: 244164 - DNA, 1370 bp, Cannabis indica
ttgtgccaaatttagtacaaaatatagcataggctgaattttatatcacaatagatatcatttttttcgtttacttttgtatcactcattagtatatttcaatcattaatataattcataacttttcatatttttatttatgtatttaagggtttgtttggtacaccgtattacaccgtactgtattgtataatattatattgaattgtattttatgcaatatttttatttaaaactatatgttgtattaatttttatagacacctaaatatataatgttttagtataaattaaagtttaacatagtgttatataaaaatatgatatataatataatataataaaatacgacctaatacgacatttcaaacgagcccagttattatatactttttataaaacattaatatttatatttttctattaaagtaaagtttattttatacattagaacacaattataaaatttaagctaaatataatatttaacatattttttgagcctaatataatataaaatttacaccatcagatggatttaaaatattattgtacattgggaacaatagcaaatatagcattggttcatattttagaccaaatttaatacaaattatacaccatatattagagatcatcttatcctttttaatttttttaataataagaacaataacaataataataataataataaactatgaaaagcccaaaaactaatgcccaaaaataataatttaaaacagttactgttcacattacaattgctccgatgagtaatgataaggagacaaatggaagaagaaaatttaatggatcttcattcttctttcatcatttcgattcttgtgtcttgccctttgccttttgggacactctttcttttctcacggaaggaattcatagtgacatgctttgtaacctgaaaataataataaatattaattaatatggccacattttattctaaattttaaatatgtactattttaattataacaaaagatactaaattataattagataaaacacaaatactaaaaagttatttaccaattttaaaatattagtaattacataaaatatgactttctattatcatattactcacttacaagattgtaggtaactgtttttgtagtgaagtattatgtacattattattgtattacttagttaattgttcttaattttagaaattacataattttatttattattttttttatatatttgtttgattttagtagctttaacctatttatatttattcgagttcaaaataaatttgcattaaatatttttattcttaattattttagtagtttttgttcttataaataatgcggataatggaggatttttttttt

SEQ ID NO: 244165 - DNA, 1642 bp, Cannabis indica
aagaaattgaactcttcgaacaaaaattaatggaaaaaatatatatattaataaatataaaaacactataaatacccacttgatgatgcttataatagcacaaccaaatccaaaaagaaaaaagaagcataagaactgttttcagctatattattgaattgaaaatcccttaattgttgaattatggaggttagtattatctcgagtgagattgtgaaaccatcctcccttcagtttaacgatttaaagccctacaaactgtgcctctttgatcaaatcactcccatgacatacgcctcaatcatggttttcttccgcaactgtatcgatccaaattcccatgctaatattcaccaaaccttattatcccaactaaaaacctccctatctgaaaccctcaccttctattacccattttcaggaaggacaaagaacaacttctacgtcgatgatttcgacgcaggagtcacctatgttgaggccaaggtcaactgtagcttgatcgagtttttcaagctcaaacagaacgagttgctgaacaagttcgttccattccttccttggcgtgatgaaactgaagcccgacaagaggagttgcctcaaatgggttttcaagtcaatattttcacatgtggtggaatagctttgtctacttcgttgggccataaaatagccgatggaggaacattagcccttttcctcatgtcatgggcagcctctttccgaggcctccctcaaaataaaatcctacgtcccaatctctctgatgcatcaatagccttcccaccaagagatttgcctcccagctacagaaatctaaaggataagttgtggtttggggcgaaaggaaactttgtaacgaagcgattcgtgttcgatgccaaagctctcacaaagcttagggaaatcgctagcagccaacgtgtccctcagccatcacgtaatgaggttctcacatgttttgtgtggaagcatgcatcgatggcagctgcagtagttaataataataacaataataacggatttcctaataaggattctgttatggcccatgcagtgaacatgaggcctcgaatgaaatctaatgcgttgagcacctccgttggaaacctcttttggtgggccaaaacaacacccaaagatattcgctcattggagttgtctgaaatggtggaaatggtaagggaatctctagtgaatttcagcaatgagtatttggagagcatagaagttgacgtgggttctgctgtatcagagttttatgattcaattgaacacattattaacccgatatctaacaaggatgatgataatgcaactgagatttatgcattcacaaacttgaaaggcttcttcaatgaggtagattttggatggggaaagccgatatgggtcggggcccatggaaatgtaggacccgagtttaggaacatgattgcgtttgtagacggacaaggtgggaaaggaattgaggcatttgtaacccttgaagagaagcatatggctgttctggaaaaagatccccagtttcttctctttgttaatcccaatcctgaaggccttccggtcaccttgatttgaaccagtcacaacgtacgtacgtagtagctttaaagtataaatataagattataaataagtg

SEQ ID NO: 244166 - DNA, 993 bp, Cannabis indica
ttcctcctccttatcattcatctccatctccatagtctctttccactttattataaattccttggtttccttatatgacgcgattgagttacgcgaccgagttggaacggctcttcaattacaggttctagcaattgcttctctcttcttgctctacggcatcatgggtcttatggtaaatttctcttcttcgctcgtcagtttaatcggtcttttcgctttcgtcgaagaatttctattgttttacctccaaagaaaagacccaagtggaattgaaaatcgttactttgatcttttgttagttcccataaccgtatgtctattctccacagttcttgatttgaaatcacccaaatcgatttttcccaaattcgctcgtgggattggcttaattttacagggaatgtggtttttacaaatgggtttttcgttttacaccaatttaatcactcatggttgtacattgcacgaaaagagcagaggaaattacacgatcaagtgtaagggacaccctgattatcacagagctagggctattgctacacttcaattcaattgtcaccttgctcttgtagtgatcatagtttcgattttttactcaattgtgtctcggagaaatggtagtgctgattttatgcagtataagccactcgttgctgaaatggctacatttgagaatcagagccagttcactttggattctgatgaagaagaagaagaagaggacaaagtggctaaccaaaaggcagctgaagttgtggaatttggtgttaatggtcatgtatcacatcagtgagtatacaaattcaaaattttattcaacattattagattttgatactgctaaatttgtttttccttttcaattttgtataaatgatcttgatttgggaccttcaatctatgcaatgcacatgttgagtcataacttttgtttcttgtacttaaaaagtgtggaatgaagtccacactctcataatgaatattagttta

SEQ ID NO: 244167 - DNA, 1168 bp, Cannabis indica
ctctctctctctctctctagggtctcacacgcctacaccaattaaggtgcgtgtgagattcaacaaccatatcgcattgcagtatcttatgagttgaatacacactgtaatatttaaattaattcatccaaataaaatctaataacccactttattcttgagtgttgaggttggcttaaaagatcaaagtgtgaatttttcaacgaatttttttggattagatgattgttagttgtactaaaagatagcaagtataccctgatataggtttcaagaggtattgtctttctttcattagtctaaatttaatctatatacattatgttgagatccttgaacttatggttcatattagataaaaattatttttatcaaatttcgctttcactttctcttttataactctgataaccgtttattgtgtattagtgacttaaagattgaagtgatgacaatgtattaggattttgtattaatattaggtagggcttggactcattatgtgacttaatcattatgtgacttttcttaatatcatgttagtgtcagtctaatatctaacatgtgttataaaccgatactaatgagtatcttacaatgtcgaacattttaatcgacgataattttttttttctagtaatatttataagtatttatatatattaggtggtgatcgaggtatgctatagttgagttttatcgaccagactcaaaattggataatataattaagagcattactattgggtattagtagtgcacaacattttttataagtggcgtcttacgattggtctaaaaattattttcttaagttatatggaacccgatacttaattacactaataacagagggtgtcaaacgctaattccaatgatgcttttttaacatttctctatcaatgaagtgctatttattatagttgatttatctcataataagtatcacaaaccaaacaaatggaatggtttaagagaataaaaaaaaaaaaaaatcaaaatacaaaataagaatgaaatcaactactgatctgatctgattttgataaagatgaattttaaccttccattttactctagaaaaataaaatctaagcttacatacatttgatataaaatccttgataagtattctgccattaatcacaattagaattgaattaagatt

SEQ ID NO: 244168 - DNA, 1429 bp, Cannabis indica
tcagtcaattgacacgatgctatatgtacctattgagtttttaggcacgacaaaaagagcacgacttgacatgcctacatattcattgacactaaaactgagtttgttagcactataatttaatcgtacctacattatttttttcttatagtaattgtatttattcacaaaaaatttatgttataattaaaaaattatcattaaaaagtatttattttttataatatttatcgataatcaaaaattaaatttaagtatttctactataaattactcaaacaaaaaatattatatatgtaacgtaaatttgctaagaatccgcaatttttgtctttaataaagagggtgtcttttctctcattcatgcttatctcgggtccctttctttctttcttctttaccgttataataaacgatcatataaaatcgacggtcaagattaagccatttggtacccaaacacccaaagccatggcggttttacttatgcactgtcctcaacacgtgtcactctcatttcgagtacatttgatctctgtaatttttcattacatgcaaatacttagatctctatatatataacctctcttatacaatatctcaatatatagatatagatataattaataatggcaggtggttattcagtggatccattagtggtgggtagagtgatcggagatgtggtggatatgtttgtgccggcggtgagtgtatcagtctactttgggtcaaaacatgtcactaatggatgtgatattaaaccctccatttccattactcctcctaaactcaccatttctggtcactcccaagatctctacactctggtccaattctctctctttctctctctctctatatatatatatcatttgcatgcaattatacacaatgcaccttatttttctgactttttttttttttattgttgtggagattatttatctcttagctgttgttggtggtagtttttgttgtaccatttcgcgtgttgcgaatggtgtggttcacgcactagtaaagtctattactagttttacaggggttgatttgtggacagatgcttgttctaaatttattagtggtctgacaacagctgatttgatttaatgtgatacattccttaaaaaaaaaagtcttttgatattttacgaaaattgatataaaaattaataactcatcaacttaaattgtaactaaaatttacataataattaccaaaacaacccaaatcgtaaaaaaaacaaaattattttgtatttaatttttgtaagaaaatgattaaaatattcagaattttataattcaatattaattagttattaataatgtttatatatacatgcatgtaggtaatgactgatcctgatgcgcccagtccaagtgagcccaccatgcgagaatgggtgcactggtatatatatat

SEQ ID NO: 244169 - DNA, 939 bp, Cannabis indica
caaagcttagcttagctaacaaattacatcatcaatagtcggttgtttagcattccaaacgagctagtttcggtgatgccatatcgaccaacaaatcatagctgcttcaatagcttcacttgttgtccactgtcttaatccttcatcaaaccagctcgagaacaccatagcaacagcaccaagtcctccaacccgagaaccactccaactattttgagcaaagggacatctaacaaggatgtgaaaaatagtttcaggagcacatttgcaaacaggacaagtagggtcaatattcacttgtcttcctaataacggaaaacatgttagaagattgttagaacaagctctccaaagaaagtttagatcttttggaggtactttcaactgccataaatgactccaaaagcctacattctcactgccactccaattccctctccatttttgcagcatattatatgttgatttaacagagaacaggtcggttctttccttagaccaaaaccacgatccttggccattttcactaatcagtacatgccaaatcaactccctatctcggtcagagagaacatctgttaacgcaaattttctttaacactcagagtaacgatttcacaaagaaaaaataaaagctataaaaataaaagtatgaacacacaaggctttttacgtggatttccagttaaaattctgcatagtccacgagtcaatcttattcagatttttgattgtttttcagggcctcctttgtatgagtttttttgtcccccttttcatcttgcttgccacgatttataataatatagtgagcagataatcacaaagtttactgtaacctttacagcaattattccctcaaatcatgggatttgattacatatcacgtagtgtaaatgcgcttataatttgaaaatcatatagctgtgagtttcccgc

SEQ ID NO: 244170 - DNA, 1645 bp, Cannabis indica
tctatcacttttacctctttttttaaacattgtaccaattttgcccttgtcacttcaagatactctccatgcgagtctcttatgtcagtgtattttggatacaatacatataaaaaaagatatgttttaattaaatataaaactagatgtaaatttgattaattgattaattaaagtggtatttttcaatttatctcatatatctacatgtgaaaaatttgatgtatatatttgagtgagagcttaagcctacatataagcttacgtccctccgtccctgaagtcaaactattattaaattttaatttgacaaaaattaaacagaggttttattttgtactatttttaaaaatacagggtctgaattatcatttaataaaacagatggtctaatctgcaatttgtgtaaaacaaaaggtctaaaatagtatttactcataaatttttttttactctttaaactttgacactaatataatttagtgatcttaattattatttttttatatataaaaatgtccctcaaagtttagaaatagttatatattttttttatttggttgtattgtgctcatttttacaagcaattttctgatgtaagactggtccatggttaatatactgtattggatactacggtgacgataaaatttgagatagatttgtaatttttgagttaatatttgaatatttaaggtcattattattggttctagctagcttaagttagttaaatagactcttgtatacgggtagttttgtggccacaccaataaactgattcaaaaaatgaataaaatataaccgaaagaacaaattacaaaggaacattttttttttttgaaaaaaaatgtattcgatggaaaagaatcatataagtatgaaaattcaagggtaaaaattatatttattcatcaaaatattcttattaattagaatattaaggcatcaaatataattatttataattttttatctatctttgttgtgcatgacaatacttagattattatttattgaattatatgtatgaaatatatgaatggcaaagggaaaaataaaaaagaaaacttaaaatataattataattaaatgttaattttaaaaatattaatttttaaaaatgagattttaatctaataacagataataaagaaaaataaagtttaagtgcttaattttactatgtaaataaaaaaaatctctctctcttcttttacaagataaaaaatatgtttatatttagcattacttttatccctctctataacccaaacttaatactttttttatttttctcttaacccaatagaacaacttcagctatataatgcaaaaataaagaatttcttttaactaaatagcaaaattaagcataaaaactcaaattttcttaataatacctattaattattaatacacattaataatacactcaaatatatatatatatatatatatatggaatacttcttaaagggtatgacacattaatgggtaataaacaaatttaacaataaatattaattttaaaaatattaaaccattagattttggtccgatagcaaataataaaagagaaatttgaatttctatgtctaatttagctacttaattaaaaaaaaaatcaaaaaatacctctttt

SEQ ID NO: 244171 - DNA, 731 bp, Cannabis indica
taaataaaaaaattattttagtttttttttactttttaaaaatacacattaagcacttttgttgtcatgccacatcataagataaaaagccacatcatccttcagttacaaaaatgaaatgttttggacgaaagtaccattatacaacacagaaaaagtttaaggactattttaaacgggttgaaaagtttagggggcacaatcatgcatgtcttatagtttagggggcaaaacctgaccataaaactgttttttgacgtctaaaatacataaaaccaattccaaaataatctaaatgaagagattaagagatccatattaattttaagcattgaaaatatatgaaaattggactttaattttaaggaaaaatttcgaatccaaaaaaacatattcttaagaaaatttcgatgttttaatgtttattcaaatcatattcatgaacgaaatcactgtataacatgatatgaatatgatagaggaaaaatgattcaaaataaataccaaaaatgaaaacaaaaataaattataatttcaatatgcacacactaattaatccaaaaaaaacatctaatttaattacagaagattaaattatttaatttcaatcactaatggcaaaatgaaaaaaaatgtaaaactactttatttatagcttagaaatacaacccatattattatttataaaccacacttctgctaaaaaaatgaaatgttcataatgtaactaa

SEQ ID NO: 244172 - DNA, 2876 bp, Cannabis indica
aaaattataaataaataattaaacgtaaggtaaatgaatcataaaatattattcataaaattttaagttagtgatgctttttgagtttctttttttttcttaaatatatttataatgttaaaaattagaaggtaaacatggatcctcattccatgaacaatctagataggttatcattaaaatatgttgttggtatcaatgaatttatagatattgcaaagcaattccttgatactaaagggatggtgctatgtccttgttgtcgatgtgtgaataagcaattacaatctatgtgggtgatcaagctgcacttgattactcatgattttttaagtacttacactgctaaatggtaccacgatggtgagcaagtagaggaagtacaaaacaaagagttatttgatagtgaggaagttgatgaaaatgacaatttggctagaggtctacatgatgctattggtggtgagtactttgacattggtccaactagtaatttcactaatgttaaattccaacataatgcaggtgacaagtatgatacattattcgagtctcttcagaagtctttatatgaaaattgtaaaaaaacaaaattgtctttagtgttgttgtaaagttgatgaatgtgaaggtacttaaaaaattgacagataaagcatttgatgaccttcaaaagtgtttaaaagatatagtacctgatgacaatcattatctgaatgactattactagacaaggaaccttctatatgaagtaggattagggtatgagcaaattgatgtttgccaatatgattgtgcattgttctatggtgagcatgcaaatgccttcttctgtcctatatgcaattttaatcgataagtacaaaacaaaatttcacataaacgattaagatggtttccaataaaggatagacttaagcgattgtttagttctaagcatacttttaaggatatgtgttggcataaagaggtttgtaaagaagatggagtactgcgtcatcctactgatggtttggcttggaagcattttaatgaagtataccctaaatttatagcagattcaaggagtgtacgaatgggtttggcatctgatggatttaaccctttttcgaacatgaaatcaacctatagtttgtggccagcaatattaatttcatataacatgctctcttgggctagcacaaatagaacaaactatctcatgtgtttattaataccaggtctaaaatcacctgggaaagattatgatgtgttcttaaagtcgttcattgaagagcttaaagaactgtgggagggtgtcaaggcgtatgattcttatgagaaatgttcatttagacttcgagctgcactcttgtggacaattagtgactttctagtttacgcgtatttgtcgaggtggagcactactggtaaattagtatgctctgtgtgtttaggagatacacaatatagaagaataactgacaaacaatgtttcatgggacatcgttgttatttgaatataaaccattcttggcgaaagagtaaaggatatgatggatctattgaattatgtgtccccctagagattttacaggtgatgacaatttacggcagctagatgaggttcctatttgtacaactagtaaggcaccaagtaattcttctagaaaatataagcatggagagaatgagctaaatgtgtaaaaggattgtattgtttgagttgccatattggtcaaaactcttattgtgtcacaatcttgatgtgatgcacacagagaaaaatatttacgataacattattggtacacttttagatattgaaggtaaatctaaaggtaatttgaaagctcgtaaagacttagaaatcttgaagattcgtgaagagctttggctaaagaagtcatcttctaacaagtttgaaaaacctcatgctagctatactttgatgaaagaaaaatgtaaggaattttgtcaattcattcaaactgttagattgccaaatggatatgcctcaaatataagtcaatgtgtaacagataataacaaattagatagaatgaaaaatcatgtttttcatattgtacttcataagataattctagtttcattacttatttttctaacgaagactattcgtggcactttgattgaactatgtcaattctttcaaaaaaattatgcaagaactatataaacttgtgacattgaaaaattgagaggaggaattgttataatcttatgtaagttaaagaagatatttcctccatcgttttttactataatggttcatctctgtgtcaacttgccaaatcaagtgttattaaatggtctggttgctttgagatggatgtttggaaccaaatgccacatgggtttgtataagcgatatgtgaaaaatatgccacgacctaataatttagttgttgaagcctttgttgtagatgaagttgtaacttttgtgtctagatatgtatcaaacatagagacaagactcacaaggtcggagcgtaattagaatttaccttctacaaatcatactttggatgttttcaattccaatgttcacccatcaggtgcatcatctgtcgagttattacaaaattagagaaaagttattcaatggaatatattgaaagaatttgatgaataaatttagaaagaattagtttctataagaaataattcttaaggaaaaagtagaaattttgtgaaaactattatcttgaataattatcaattatgaattatataattaaagtagtatttaattatttagttttatttgttaaagttatattaattagttaaatgtaatagtatttttaaataatattaaactgagaaatatattattttaatcctaataaaataagagattaatgaaaattaat

SEQ ID NO: 244173 - DNA, 1801 bp, Cannabis indica
gagttttcactgttgtcggacctaaaatattttatttcaaaatgtattttacccacatagtacaataaaatttctgtaattaataaattacgtctaattttctcatttcataaaataagtctaattcttcatattagcttaagaagattataatctgactcaattattctcctaacactcatattgttttatatttcatttaatatattttaattaatttttgagatattacaagagcaatcttatttatcccttgtacattgtttagaagacaagataggcttatctggtattttttagacaattgtttttattcggtgaagagaggttattggagcactatttcgagcatgggttagagacatgtttcgatctcctctgggacttctcgttggtggaggcttctttagagtcttaacctccggcaaaagattaaaaactttgtttagatggtaaacttaaatttcttaccatcctatgccaatttgactcgtcatggtatgaaagtgtctaagatttgtcctatttactattattcatgcactatagctttgcccttcacttaagtcaattcagtttgaatggattctaaaaggtcttgatactttaaaggatgcctcttgtttttattaggattgagcatgaaatttaaaaaaccgaaaaaatcattcaaaccgacctaccgaataccgctagaaccaaaatcgacaaaatcaaaaactaaaataactactaacgactaaaactaccattaaacgatcagttttttttaataataaatttaccgaaaaaatcgaaatcgaccgttatacgtatatatttattaatttttttactttatgtattataattattgataatatataataatttattattactttattaatattaaagttaaaagaataagataattaatttttgaataattaatttgtatagttgtagaatgtagaatgatgtgtttatagaataaattggatcatattttaaagaaaaaaaaaattcgatttgggtggtttaaaccgaccaaatcaagattcaaaacgatcaattttaagatatgttctagattgatcggtcgatttttagattgcaccacttgaaatcaaaaattgaatttttatatagaaaaaaaccaactgatactcagccttaatttattatgagatgttgttaggctggatacatattttgagtaacaaagaattgttagagttcattgttctttgctagcacatttggtatagacacaataatacctttattcatgaccacaaacttttattggatgctaatgtttggagttatgaagatgctaatgttgcttaataatatttctcatgtttagaacttctttcatagtatattcttatatcattgcaaaaagtctaataattttattgctcaatctttagtagaacgaactcttggtatagacaaattcgtttggtagccaaatcttcttataaatttaggtgttgtttgcctgtttggtaacacttttgttttctaattttttaattacaaaatgaaagtaaaatttttgtttttaaaaaataaaatgcgttctgcaactacttttgtttttcaattttaaaaaaatagaaaatagaagtgtgttttgtaaagttcattttttatttttattttttgattttatttaagtcgggtctaggtccggggtcggattcggattcggattcgggttcgagtcagagaccgggttcaacaccagggttgtggggaggatttggatccgggtctgatctgaatctaaaatattgattacgaaaaaaaa

SEQ ID NO: 244174 - DNA, 2345 bp, Cannabis indica
tttatttggggcacaaagcccaacagggagatggaaacattgaaggctcaataagtagccaacgatgaccgaacaagacagaccgctgtagtgatacggaaatcctatcaaggttctaatcagcaaccaggtgctacaccagtatcccattgggcagcatagaagaaattcatggtgggcataccgcccaaactcataacagtcagtcgctcagtcccggatcataggttacacctatgggccaggtggtatacggccagaccttatttgacaattctttaggtggagttatacctaataactctatctaaactaacagttctggccaatagaccggccaaacacaccaatcactgagacagcctggtgtttcagtattcaacagtctgggtacagtccatgatcttagggatgagttgaatagaacgaggggtgtagacgaacaatatgttcaaccgaccactcagccccgtatcctcattaaggacccaactctaagaaatcctaatgtgacacaggtcggccaacaagctgaacgagttcacccatctgtgcaagcacatctggatgaattataagatatgtcccaaggcctggccggccaaaaactcaccgatctagagtttgaccgggcacgcggatcacctttcactcccgagatcaatgtcccagaactacccctcaagttcaaaatgccgacctggaagatgtataaagggaaggaggatcgcttatcacatcttaaatattttgaaatttaaatggatctacaaggggtacgaggcgatgtgctgtgtacagtattccctactacactttcagaagccgcacaatagtggtattttatgttaccactaggaaggtttaattcatgaaaagccttctccttagaattttatgcacagttctcttcttctcaccaattcccgttacatttagaagacctggtcaaagtggaacaaagaccaagagagcctctcagagcctatataagcagattcatgatagaagctacaaaagtagcaaggttaattgaagaagggaggcttactgctatactgtggggcattgaataagtactgggagaactgtggaaagacattaagaaaagtggccctgtaggctctatggcagagtttctagaccaagcagatgggtttatcaagcttgaagaggccattcaacaggaagatgttgagtctaggcttggacaaccacaggccccctcagcaggagcatctcctcacccccagtatcctagaagttcaactctgagtgacaaatgatctaataacaatggccgacaaggcaatggaaagaaggaaaagttcgcaggcaaacctgaacaaacccctagagaaaaagctttcaatttcactgccttctctatcctaactgatgacttagagacaatctacatggcaacccagtctgttgtcccgtacaaaaaacatgctcccatgaaaaaggacagaagcaaaagggacatgtccgaattttgctgttttcatggagactatagccatgacactaatgagtgcaataacctgatgcgagaaattgaattcctgataaggaaaaataacatacacgtgtagaagtatgtcaaggtcaaccagatcaatggacctgttcccatgaaaaaggacataagcaaaagggacatgtcaaaattttgccgtttcatggagactatggccatgacactaatgtgtgcaataacctaatgcaagaaattgaattcctgataaggaaaaataacatgcacgtgcaaaagtacgttaagtcgaccaaaatcaacgggttgcccaagcagacaactaccaagacttagtaatgcctccactagtggacgtgcatttacaattcatcatcggggcccacatattgctggagatttagacaaagctcgggagaggtatgcccgaactttacaacacaaacaaaaggaagtagttttggccgtagaagaaaggaagtcaaagatgccataggtaggagaacccactataaccttcactaaagaagatgctatccatgttctcttcccgcacaagaatccattagtcatggaagtgtagatagacaaaaaaacagtggcccagaccatgatagacaatggagcctctacaaacattctgtttaaaacaccatatgaaaagatgggacttgtaacaccctaagtagcataggcgtattacgtgatttttaaacatactgtgcagctcgttgctaatcaacgaggtttatggaaaacgcgattaattaaaatttttgcattttaattaaacttgtaacatatttatacaaaatactcgggatcccgattacaaaaccatttacaa

SEQ ID NO: 244175 - DNA, 494 bp, Cannabis indica
aagaggaagttggagatctgatgatgaagaaactggtttacttggatcgtgaatattttttttatcttgatcttgatcagatgatgatgatgatcttgaactgaaagcagagtttcccaaggccatgcaaaaccctagctcggactggctattattattattattagttatcttctgggtggctttgtggagaaatgaaaacggcgtcggatttgtctcgcctaagctaagggctaactccattttcttgactgtaataataataataataataataatattaagtagaaagaacaaagggaagaaaccagagaggggttttcttcttctttcttctttttttcaaaaggttttggtggatatagctaagttggttgacgatgactaaatgtttatggaagaaaaaagaaggaaaatgaggactataaaaagaaggtgaagcaccctatgatcagctcagattctttttgacgtaggaaaaagaaaaaataaat

SEQ ID NO: 244176 - DNA, 503 bp, Cannabis indica
catccatgagataggttgtttctttcgcgccaaatgctctcaaaaatgatagctgccccgcccaagaacagatgctgatggatattttgtggcctatgggactcagccgagaaccattcaagccaactctcccatgaatcaataggggtcacggttgttcggacttgccatcggcatccaaaccacaaggctcgtgcgaagttacacttccaaaagaggtgaagtgatgttccatctcaccattacataatgaacaattaggatctatggagggaagcatatagcacagccgatccttggtgagaagaccattggaaatggttttccaccagaacatcttaagcctctcatgaatcttagcaccccaaattgtcctccatttcttgtcgtcatgagccatgttttgtagattcttcacaatcttgtaggccgatttgactgagaaagttccattgttctcggggagccagagccacgaatcctcacaaggtgtgttggggagg

SEQ ID NO: 244177 - DNA, 1071 bp, Cannabis indica
ttcaaatgcattattgtatctattttgacttgttgaaaacaaagtcatcgtctaatcaatcacttagatgcacactcatatatgaggtttcaatttcaactgctagattcttgttaatgtactgaatcttaccccacttggatgcatcataggaaggcacttgatgtctttgtttttccccttaagaaacaaaacctcctatcaatgaaattcaaacagtgatttaataagtagttttgacaaatcttttccactccattctattgtatccaaacctaagtaaatgaattcatcatacaaattattatttgtaaaaacatctgctcttttttgcaggagtctgccctcaaattttgtgagattggatcaagatattctctcacctttagctgggaagaaacaactatttacatatgaaaccaaggacttctgggaacaaatcaaaactccagggtaagactagcctcaaccctgctttattaataaatcctttgcggccttttattctggacaagaataccaaagtttcaagttgatactttcagaatgtcattgagatgctcttctctgtaccttgcactattccggctcacctccccggatcttttggctagtggcgacggcataaagagtgcgaaaattgttggtgatgtttatgttcatccatcagcaaaaatacacccaactgcaaaggtacttcttttatttcttttccaatcccttttgcttactgaatcaaaacgtggtgaaatgtatgaaacatttctataataaacgtgtgacaaaaaccattatcaatttcttattgacaaagtgtaaatttctaaataatctattacttttaacacacgtctgtgttaccacacaacagataggacccaatgtctcaatatctgcaaatgctcgcataggtgctggtgcaaggctcatcagttgtatcatccttgatgatgtagaaattaaggtacggaccaatcaagattaactcaaaatgtagtgaaaaggtttattgagattgttgctgcattgtatggttgtatttcaggagaatgcagttgttattcatgctat

SEQ ID NO: 244178 - DNA, 942 bp, Cannabis indica
ttaattgataataataatagcaataaacactctttgatttgattttccagaactttgcctctagacaactagtagtactatattagtacctgcactcgtattgaacactgcagctatggtggctctcgttcataagatcaccaagttctttcagtatgtcttcttcactgaaacaacaatttccatagaaatgttaatagaaaaaatggtaactaaaaattcatacactacttctcaatggctagtatatatgttacattaatagtatttgctaatagaaaatagtatgatataccttaaatttgaatataccgtgtccttgaaagcatgcactcgtttggcttcagtatacacatgagatgctctctaataaagaagttccttggagttagtttatttgaacttggaagagaatgaaaagacataccaataactggttacaaagatgtcatagggaacatatatatgttaaaaataacaaatttatttcattcacctgatgtaacttaaagtgtgttgccgcatttagcacatctaaagaagatggagaatctttaaaaaattgacgaaaaatttttctcagtaatttcttcaatttcttcagctgtataaggaacctctttcaaacattaccttaaaatgaagaacaaaaaaattagataaggaaatcaaacaatatgagctcaatagtaccgcattgaacaaattagaaactacatatatcaccaataaatgacaaattcataataatggaagagcctatattcaatagtaccttgactgccaggacaggatctgatgaaccatgattaccagcaaacgccacacataatccttcaacatcagaaagggttttgacattttgagattgcctcttgtggtttcatccccagctttatcccaagcacaatctggaaagaagtgtacaaaaaaaaaaaaaaa

SEQ ID NO: 244179 - DNA, 2125 bp, Cannabis indica
ttaaaaatatacataatttttaaataaagtgccttgttacacaaattgtaaataattatgcaagtatacgtaattgcagttttaaactcagacaagtaaagttaatccacatggaattgttattgagtaccacttaattagatttatatttctatttaataaaatcgataaaaatattgaataattgaataattgaaaattgaaaattgaaaagcaaaaaaataacaataaaaagtataattaattatgaatgaatgattagaaatatgaatcatgttagtttagttttccaattgttaatattaattattaattctctcattttctggtgatgacagattatcaaatttactccaactcttctcagattattaaagtcctaagtcatatattatctatttgtatctctgaagtaaattaacatataacttccattaaaaatcacataagttatgtaaataatctcgtttcacatcaaaacttatgtttgttctattagagcattcctaatattaacttttcagatttcatattaggatcatgaatcatattaaagataaccagtctaaaatatctaattaaaacaaataagaacaaatcacacaatatatggacgaaaatttaataatcacattaactaaattaaagaaacatcactaacattcatcatattcctaattaagctctttaagctttgtaattaaatctattaatgggcacttattaaaaaaagccaaatcattaacaagaacaaagatctctctctctcaacatagtacaaccaccacaacaactcacgtttagcttcctctatctccacaccgagctcattcgagtttctgatcctgtttatcaccttcaaattaaaactcacaaagattgttcttcttttttcgtgaaatttcatcaatattgtaaacaatctcgggtgataataacatgcatttagttgacaaacacaaagttaatcctacttccttcaacttcctaatcatcttctcttcattttttgccttttcaaaattagcaaatccatacatattcatcataaccttaatcagagtccactcgcgacaaccatcatcattcttttcaacttttttttttcatatcaacaattctcaaagccttttccaatttcgttatcttcccatcacgaatttcagcctgtgtaattcagcaactcttaatttttcacatcacaagtaagaactcgcactacaagaaatgtcacttttgtcagcatatttttgtgctggcaaatgtttggtattgtgttggtaaaatgaaatttacttctaatgtgttggcaaatcaaagttggtattagaacttttgccagcacaaaatgaaaagcactggtaaaaataacttttcccaaatttagattttggccactacaaatgtgcgctagtaaaactttgacctttttgccagcgcagtagcaaactgtgttggtaaaattgatatttcttgtagtgttgtcattagttttcaccttccttagagggaggagattgcgaagttggtgttggaagagtttcgagttcgtgtagtaataatcttcatgagaatcttgtggatcaagtaacctagcgaagatcattatgtaatttaggtcatagaattcttgatttataatcttaatttttttattattatggttattattagggatattggtggctaaaccacctgaactttacggtttgtaacacttaaccacaaaaatcaaatttttagcggctaaactacttaaattctggttccgttttgcactgcacacctccgtccaaaaatcacagttaagtgccacggtggactgttcatgtgtacaaacttgtacacgtggcaaatttttagtggtccacgtaatattagttttaaaaaataattatgaatatttaaaaaattaaaaaatcagaataaaaaattctaatttgtctagaaggagaaagttcgttttgaagatagaaaagaaaaagtcatttgttggatacccgcatttttgtcgggttagttctttgttcattttcctagtcttgaacgcttattgtttcatttccagatctggcattttcttgtttatgattttattgatttgtgtgtgttttgtttggatatt

SEQ ID NO: 244180 - DNA, 2679 bp, Cannabis indica
cattgtctatcataagggcatgcatagtcaattcatgtgccacaacattaccattgtgcctaatataagagagagatgtccccgaaaaactaaacaataagactttaatacctgaaaagatacctccatctcaatctggtacactatggatgactctaaagccaacacaaagaacgtcgaaactaagaagatttcaacgataggtagtccaacatcttgggtccataatccttacttggaagactgttagtaaacttgtaatacaaaatcacccattataagcagtcatcaatcatgcatcctttcaataaaattcatgatatagtaattttaagaaattgaattgtaataaaaacttctctcattgaaatctttggattccttgaataaccaagagagtgaattaaaataaacataaaagataaatatataaaatttagttaacacacttcttactgataatattaaattaaagtagagattttaatttcattgttagaaaaaaaaaatcaaattattactttcatgaagaaataacttatctttgatattcttagagttgagggtgtcattgctaccttacaccattcttaggatcagcccaagaaatggtttaaacaaaccactatataagacaaactaccatatatgctaccaatgtgctagtgcaggaaatcatccattcatttaagcacaaaaatggaaaagagggcttctttgttataaaaattgatctggttaaagcgtatgataagttaatctggaaatttataaatcacgtgcttcacagcttcaaagctccgaaaaagttctgtgggtgggtccgtcagtgcatttctacgacaacattcaatatttgccttaatggtggtaaggtgagtagacttaatctagagtgcagtattagggaaggggatcccctttccccgtacctttttatatgggccgctgaaattctctcgcaactcttagagaatgccctagacaagggtagcattaaagggatcaagttgagccggaatggccctcaaatttcccatttgttctatgccaatgatcttatttttgtgggtagggccacgatggagaaagctacgagattttgacagtgcctagagaaattttgtgtctggtcgagtcaacgtatcaataaagtgaaaacattcatcttttagcaaaaataccagtgatgggatgaagcatattattaaacaggctccggggctcaactcggtagtgaataacattaactacctgtctctcccgttactctgaagtcgtaagaaggatgcagacttaaaaatcataatggataacttggtctcaaagttgcatgggtggaagttaaaatccttatctgaagccgatcgtgctactttgattaaatcagtggtgtgtatatcatgcaaacgacgaagttgtccaagaaattggcggctaaaatagatggtattgttagagatttttggtgtagttgtaaaaaaggaaaccatggcatctatcttaaggcctaggataagttgtgcctctccaagtttagaggtggtcttgggttccaaaggacctcaaaaatgaatcagaattttctagctaaatgaggttgggccctccttaccaaggataattcgttgtgttgtaaagttttgagtgctaagtaccttaaaagtagacctttcttgaagtgtttgtataagaattcaaactcgtggttctggaagaatattgtcaagtccaaagaaataattaaggaaggagcatgtaagctcatttcagatggaaaagatacagatatctaggatgatccgtgggtaattcatggtcatgattttcatccccatcctaaaaagggtcgtcccgagagttaggagaaagttgcggacctacttactgataatggaattgggatgtctccaagctcaacttcctgtttaacccaaagaaaaccgacaatatcctcaaagggggtaggccaggggccaaggcagtgataaatgaatatggactaagcatgtcttgctcaggccttgacaagagcaccacctaccacggtggctcccgctcttttgaacaaactttggaattctagaatcttggaacgccataagcttttttggtggagtattctctcaaacgccttaacgatcaggtcagctctggatagaagaatacagattgaggatgtgtctttccccttttgcacttaggaagaggaaactatggaacatctcttcctttattgtaactttgcttttcacctctgaaggtcctccccctgggcgtgatgccagtgccagagtctgggacttgaatgtgagattgggtcaaattcttatggagcatgaaggaaaaaggagtggaggttaaagaagtgtttttgtatgcttcaattatagtggacactatttgaaaacccagaacgataaggttcatactaataattatatatgtaacattaagcactgtattgactatatttctacatgttatgcagatttttggcccttgttcgtttcttacgtccgatgcttatcacgcctcctacttggttcccctcaccggacgattgggtcaaaatcaactgtgacgttaaagttggtagcggctcaatgtgtgtggtggccttggcaagagatcagcaagagatcataaggagtcgattttgggggtggctagcaatat

SEQ ID NO: 244181 - DNA, 898 bp, Cannabis indica
tctaccaggaatgaaagcactttagttaactgacactacctcattcagcaagaacttcatgcggttagcaagaactttgatgatcactttcgacaatacattacaaagagaaatggctctaagctcactcaagcttttgggttttttcttcttcggaattaaaatcacattcgtcttattcagcccaacatccatcaccccagtataaaagaacttacgcactgaattgatgatatcccgacccacaataggccaaaacttttgatagaaagccgaattcataccgctaggccctgagatttatcaggatgcatttgaaacacgacagtccgaacttcctcctctgaaattggctttaacaactccatattatgactaatagatacaattttcaacactgatgaaataacttcactccaatccacagctggatctttaaaaatatcatgaaagtagtcaaaaatgacattttcaagcccattatcccacccaacagtgatacaatcagtattttttaattgaataatctgattgtttcgacgcctggcattagcacaagcatgaaaaaacttactatttttattgccaacttggagccaaaattgcttatatctttgtttctggtagatttctttttgatgtaaaaaatcaaacaatctctttttttttctcttctttaaacaatttcactccctcatcatcacgccttcctttcaatcttttaagagtcaagttacaactcttaattttctgggcgaaattgccagtaacatcttttccccactccgctagatctttgccacattcttgaattttgaactgaagggagcaaccttctaaattattccaacacctttgaacaacctcctcgcagcctgtctcacccaaccagtaattt

SEQ ID NO: 244182 - DNA, 1609 bp, Cannabis indica
ttgagcaatttcaccacaagcctaaagcctcatcgtttgaggttctatttggtttctttgactcttcttagtaaataggaagaacatataaaaacaccaagcttcacataaatgactctcagttttgacattgctataattggtaccaattttgtttttctttctagtgatgaaaatgtgattctagagtaagttggcagcagtgtagctactgctttagtcatgatttattaaagtcccacattggttagtgatatatatactcgatctacttaataaggtgagggcaatctttccctaacatgtcggttttgttagattgagttaagcccaataacttttctaatatggtttcagttcagttttgcaatgtcgggtgcccctaatatcgatttgttcacaattttttggcatggtccacgtgaagggcttattaaagtctcacattggttagtgatatatattctattgagtgcaattctcccctaacaagctagttttgttaggttgagtaagatgattggctatttggtacaacagattgtcaagccagcaaatgattgagggaattattcattttgtgtgtaatttctagaagccttaaaagtggggaaaaagaagaaaagagtaagagtgtggtctgttatggtgaggaaaaagctttgataaaatctctgtgtttgtttctttcaataaggttgtgattaaagtttcatcatataatttcggtaggaagctattttgtagcattttccatttgagtaaagtgtgtctattgattttgtatttataaaacttgtgcaataaccagctgctgtattaaaaatgagcaacccaagaaggttagggaagagaacttgcgaaatagatttcggtcactaacagcgaaaaggatgatgccaaggaggctgcttttgcagtttatggggttcagtcctctcatagccatagcacaacccgattttgcagcaacaggaccaatgccggaaatgaaggaacccgaagtcattcggtatgtgtttgtttggttggttggtgttctttccttaaaaattaaaacttttagtctaaaattggaatctagaaggtgattgttaagcttcttcttttgtttcgatactattttcaagttctcatttgggatcttttgtttcggtatttgaagtgtccaggacattaaagcttcccaatggagtgaggtttcaaggtactgcattcattcataacattctttaatatatttgctcatataaaaatggtgtgattgcttaaatatgtttgtttaagtgtgaagctgatgtagaactaattataagcacaaaatagggagtggattttgtctcgtgagggtacgcattgcgtgatttccataatcattggatcataattgacttgatctaaccattgttaattattggaagctaaagtacattaaaacaaagcttatagtatatacatatgtatataaatagatagagaactcttgtataaagaaacatgtttatagataggcaattggaaacaaaccaatatattgccttactatgtttggagagatttgaacaattcctcttgggaactaacagaattcatctaatcttaattataa

SEQ ID NO: 244183 - DNA, 733 bp, Cannabis indica
tatttatttatttatttttgttcaactttattcttatcagaattaatcagtatttctttctaatgttttctcctaattacaataaagaaaatgactttttttttcctctcttttattttatttataatgtctttttcaattttgttacgagtcttagtaataaataacaagaggtattgaaacataccatgcattatttttctggggccaccaatatatattatatcattcaattacattcatgccccacttttcataagcttgaaaatatagttcagtattaaaaatatatatagttcaactatatataacattcagaaaaaaacaataatcgtttaattttttattatattttgatacatgatcaacattcaacagtacacatatataataatgctataagatgattatataggaagaaaaatatgataaattaggggtgtttggtaatatttttatttttaaattttttaattattttttaaagtaaatttatgtttttaaaaaataaaaatatgttgtttttaattttaaaaatagaaaacaaaagtgttttatatttattttttgattttatttaagtcgggtctaggtccaagtctggggttgaggccgtggtccgagtctgggactagggtcggggccgaagtgcgggcttcaagattcaagttgaggtcggagtccaaaatattaattaagaaaaaaaaaactttttaaaaagtaaatttttttt

SEQ ID NO: 244184 - DNA, 1541 bp, Cannabis indica
gattcgatagattattagattgaattggttcaatgtcattaaattggttcagaatctgcctaccctagccaaaacccaacaattctctactattaattctacttaattttattcaaagtcaatatttagtctaattgacataatattttctatctgataaaaaatatcactaattttttttttttttgacattttaaaaaaagtcactaaatcattttgaaaatattaaaaaaaaaataaataaatattatagtgacattttgaagtgtcacaatttatatttaggtgtcattttaaaatgtcaataaaaattagtttagtgacacttcaatctttagtgacattagaatagcttacatttttaagaaataccactaaaatataaagtgtcactaaatattaataatagtgacatttagaagtgtcactaattaggaattttagtgtagtaattgtagaatttttcaaaaataattttgtagtctatttatattaaactaggcaatgaaaccgggctttacgttgtttttgtaataactaaaaaaatgaaaataaattgtgtacagtagaaaaaaaaaattattttaataaatgatatgactataaaatttataccacatatatagtagttttgtaaatatttttcaaaatataattaaaaattttattatattaaatataatttatatttcattttatatcattatgattgatattttttaaaagaattcatattatataataaaattttaattaaaataacattttatgtaattcatattcattcaattttttagttaagatatatctcatctatcactatctctattctacttttgttttcaaaatgttgtcgaatttaacaactttatttaacaactttttcgttgcaaattgcctttcttggtgtaagttaaaactaaataatatgtaaaataaactaagcttatgtatgtatgataaatgggaaaatagagactaaagctaattaaaaaaaaatagtgaaaaaaaatgaggtgagacaaaaaatactaattttattctctctgtcatttaactgtagtgagaacatatacatattacttttcttttaaaaaaattctcactattctaaattaatctcaccttcagctcgcaagtacttttaattgcttatgatgttctttttgaattattgcaaattaatctacttcgtttattaaatttataatctcaccttcatttatcaagcgttttcaatttcttgagagattttgaaagtgtcaaagtcctaattagagctccaatttattcgtagagtattctaatattctatataattttatgtccattttatattcatttttattactttaactattagagtaaatgagaaaaaacaaagagactaaagataattaaaaaaaaaacaaagagaaaagatagtgaatagaaaaaaatgagatggatcaaaaaaaaaactaataattccgttctctctgtcattcatcaactatagtaaaaacatatacacattacttttcttttaaaaaatttctttc

SEQ ID NO: 244185 - DNA, 564 bp, Cannabis indica
aaaaacatcagtaccaagaaacactatagatatacatttactgtgcgagagaacagatgtttaaatcaagtaacaagtattagtacatcgctagatacataataacttctatcactcttctatatgggcactaataattgtgctaatttttttgaataattatgaggtattgtagagatttaggagacagtgggattttcatcctaactttctcagttcttttgtgaatatggatatgtttgctatagccttcctataagttttattgagtttggtttattttatattgttcttttatgaatcatccacccaaatcgagatggtgatttgagtaaaagagaatgagttggccgagagcaaaatggatactccaaaatgagaattctcaaccatgttttccaaaactaagattgtaatttatgaagtaaattagttaaatagctgtttcaaagatgtgaattccaataaggttgcagcttcagctattagtgcaacttttctttttcttcttcttctttttttttttaaatttgggaaggaggatttgggggagattgccttact

SEQ ID NO: 244186 - DNA, 4536 bp, Cannabis indica
ttactctttctaaaatgatggaagttgaggtctttttggtcaaatttcttgagaaaaaccttaattcttttctcaaatggatcattagaatctaacaagacttgtttgttcttatgaaggaacataacaacaaagattatgagcgcaaataatgaagagactccggctattatgaataggccccaaaagctaccaagactgagtctgtttggtgagatttttgggttagagtctagacaactcttgtctgctggcttgaaccatttgttttcgatgttcttcatgtcatctctttcggtcacgttaagaatggctgttgaaatatcacctacaagtggagacccttttgggaaagccttaagagaaaatgatacacataattattcatttagtaattaattaggagggaataatataacaatacatatatatatatttattattgtaatttataaattatatcctatggtcaaaagaaaaaatatgacaatattactattaggtatgttataatcattcataaaaaccactagtttaattcgttttcaaatttcaaataacaaaattatataaaatgtaagagaaggttataactagcattacaaaggtgttatattgctattgatacaattaagtattggatcttaaataatttttataaaatttcgttaactatttttaaggtgtcacctcatagtagttgaggcaccactagtgcctaataacaatgctcaaaatataaatattgttctaaagcgaaaaaagaaagcgaaggttaataattaagatgagaaagtgagtatacttacaaaaccaaaaccagtggttttgaatataggcccaatcatggtatatttggagcaatattgagcaagaaaaaccttcatattaggagtttcatcaacaacagcagcaatgccaccttttgcattttttatggacaagagttggtcacaatgttcaatagaatcataagccacaatttgtgaatctggaaaacccgtttgtctcaacaatccatacacaaaggattctcttaaatacccaactctttctccactctttaacacttggtttatattagtaagtgttggttcaagttgttccacagttaaaagtgatgttaaacttgctgtgtaactttgtgtcaatactaacaccacaaatacccatatgatcaccacaaatctacccaagttactcactacattctcctctgtacacaataacgcaaattataattttaattaaaattaagtactaaaataaaagacgcttactgagagagacaaaagtaatgttcctactagctataaaatttttatatatgtataatcaatgacggtgattaatggaaatacatactatgtgcaaaaaccatggtggaaaaggagaaccaaaagcttgtgccgatttgatgagaaggtggtccgcgaaaatcttcgttaattctgtgttctagaacccaaacaacaaaaccagtgaagaggaagaagccaaggctggtaacccataaatcccaagtcaaaggttttaagaaaatccaaggacttttcctcttatgatctttcattggaaccaccattactacacctgaatctgtatatggcaatgtaaaatctacatattgcgaccgatttgctctaattgttgtgtctgccactactgcatcatagttctattaaatacaatagctttaattagtcagattaattatgcatatgattatatagtcttacatacatatgtagagtagagaagtgtttagttaagggcatcacttttgttcttattgtaaggacattttttttatttctggtacttacagaaattatactgtaattttgtttataagggattatattttatagttataacaaattatatttagtatgttttcaaaaaattatgcataatttagagtattgaaaataaagtttaaaatagttttttacacgcgtatatgaagaaaaaaatagagatacatgtatcttattgtttgaatctttatttcagcattgtaaattattcacaactactgagaaacagacatgatgtgcctactataactataatgtacgttgccatataagaaattaaattaaaatttctctttataccaaaaataaaaaatactcgctcctacgattaaagcaaaagtaataatgttcctacctaaatattttccaataaattagacaaagtcaaattaatcttttagtaaaatacttacaccgagaaatacttgatagaccaaatcatcatacgttccagcactcgtgccatcaggtttgacaaacgggaaaaaatcgtaaggaagagcatatggtaaaacattaagtgcagccataaacacatcaatggtgaagccaatagcatcagatttgtttgtacttgaatcaaagttcatcacttttacaaactcattaaaaccacttttaataggaattccaatccttaacctcttcccatttgttgggatctcccaaccttttggaggtaaaattgactctcctggccatatgataagaccgagattcgattttgaagttgaatatttgtcattattggattgcaataataactttcttagtaggccattttttcgtgtccagaaccctatttctcttcctccaccgttgacaatatttattattttaaacgtcgatgtttctaattgtccatcattatctaatatgaaatttccagcgatgcccttaaattttgtacttgatatagcttctaataagtttggaccaattggtgacatcctaaaactataaagatctattaagctaccactagtagtaacattactatttaatgtgattgtattactaattttctctattgctaaagctaatgcatagactgaatcataagcccacatgcccataatgttgagtttggcatcaagaaagaaggtcattattagtatctttgtagaacttggttctccatctagttttaatgctattaagttcttttgtttgtggcacaaaactcataattcccaaaaccccttccattgaattcaattccatggaatttaatgagcttaaaagattggtgaaatcttgtgttatgatccaaacatagtcttgttccaacattccaatcttcttggctatggtaaatagccttgaccctaggtcataccacatgtgcacaataaaaaccctagtttgcattgtctctagtttgtaaagctcaactttgatttgatcgtcggtggcaaatggagaaatgacacttcgatagggtatttcagcattaactgctcctaaggcatcacttaaataaggaaggattccttctccatattcgttgtcggtgtagatggggacaacttttcgccacccaaaagctttgactatggaactaatggccatgacctgagaagagtcactcgtcgctgtttggaaaaagtacgagctttgttgacttgacgtttgaagagaaggacttgttgctgaaaatgatattattggcacttgagctttctgacctaagtcgataatgaattttgcttgagttgaactttgtggccctaggattgcttgcacttggacattttttatgagatctaaagctgtttgtttgtgcatgttttaaattgtagaaaagaaaattaatcattaatatgtaacttataacaaatgtagattaatattgaaattaattgcatgtctctaagatacttttattaaatatttgttacttacaatggtaaacttttttagggtataatttaagaagttaaggctatctgtcttgtataaattagggtataattatctatagtaaattataatgttttggtatctttaattaattaattcattataatatatatatatataccaataggtttactctattttggcataaattataaccaaaatatatatatgtatatgtttacataatgttagcaaacatatatatattggaaaatactaaataatttatcgtatgaaaagatcaaggtttcaaatttacttatttattttacacgcatataaaataaaatattttttaataatgtaaaccttaagctttatgttgttaccctaaattattcaaaaaatttagaacattaaaagatgcttacattatacatcgtcatatacaaaaatttacttataataattgggtgccaaaaatagagaatacctaccaattgaagttaaagtaacacctactaaaatcatataaaaataacaccatctaatattaatatatatgagcatatttagtattgttttctgttttttattttcgaaaaagtgtttttagaaatgagaaaaaaaaaacaatttttgaagatttcaaaacacaaatagcatttggttagtgtacgttttctataaaaacaatattgaccaaattaaagtgaaatattttttaaaacaaaaaataacattttgttgttttcaaaattcttcttttctataactttgttttttgaaaactgttttcaaaaaataaggccaaacaagcctaattgttttcaaaaaataatttttattttta

SEQ ID NO: 244187 - DNA, 1467 bp, Cannabis indica
aattcataaaattttagactgttgattgtattaataaaattcaataaaaaaaattgaatttagggtactaaataggtatgattttaaaatacataatactaaataaacattattcaaaacacaaggtaccaaacatgtatttacataaaatacaaggtactaaatgtgtagacacccttctaaatatagatttttatttgaatgatgtcatattgtaatcttatatagcaaattataataaaatgtaaccattacattaaaaatgtaaccattcaaatctattcggtatataaatatagattgtgttcatcctaataagtaatgtacccatgtattgacacagtaaattcaatagtttaaaaaattattagataatatgatgcaacatttgctacttgaccaactaaactttcttgaaaagctctaaatttaccataaattaatttagaaggaaatctgtactcatttatatatgacagctagtaatttgtagtatttgtgattaaatataataaaatagagaaacattatttcctattttgctaacaagaaaaattaataaattaaatattagttggtaaattttcttataaatagtctaatacacaaacccatcttcaacaattgtcctagtaccaaaggagatttgagtaataaatcttagaagatggcaactaaggtttctcaaattcatttcgctcttctatttctctttgtgtcaacattcttgctttcaggtaagtactaatgttttatgaatcagtacatatattatttttcaggttatttagtgcatgataatcgtaataatggacccttttttttggcagtacacattgacatgtgtcaagggaggacatgcacagcaggtatcggacaatgcagccagaaatgcaatgaaaaatgttgtctattaaaatgtctcaacaaatttggaagctctactgaagcaatgtgttataatcctggtcaacttggcaatgtttgtctttgcacttatgtttgttagaatacacatctacacaacttgatgtggaataaaatttgagtgttcattatttaaataatcaaactgtaagaaatgcagcatgtctttatgtgagttggattgtgttagccatttctttatttatgttactagttagttgtccttgattatagtctatctatatcttatcattctgtggtaactttcctcaatttctccttcgaaatataaaaggtaaaaacgttcgtgcaaaccattagcaaagcagttttgtgtttttttctatgatacaacatggtggcccactctttaagggggcatttggttatatttttattttttaagtttttaatcataaaaataagagaaattatgattttaaaacaacaaaaaacgtgtcacatgatttttattttcagttttttaatttatttaagtcgggtataggttccaatctaggatcggggctgtggtccgag

SEQ ID NO: 244188 - DNA, 1319 bp, Cannabis indica
ttccattttaaatattaactactaaaaaatattatttcttatttaattacaaactattttgccaaataaaatactattaaaaattcatatgtaattaccatctcatattcaaacagacccttgtataattagtgtaattaaacagttacctgtaacgcatcctaagtatgaaataagacccgtatgaacaaagtagattcaccttcaaaactatgctagagtcttcaatgatactatcagcagctgattttgaattaccaagaagtgaaccgatctccttgctatacgccatcacatactcccacctaaatttatcgtaacgagtcaaaatcaaatcgtataaacagtaattgtccagagataccgaaaggctagctcaatcaaaacgcttaccactcgtattgataagacagtggactcatcgacattttcgacaagctcgacatggagctcctacgactctgtagaagagcaaacggcgagaccgaaccgtacgagatcctccgccactctgcatcgctaatctcagaatctccattactaagcctaacctccaaaactctcccgccggcttctccttcctcagaattctgatcagaagttggacggagaactgaaacgcggagtctgtttcctcgtgaccaggatattgagagacgagtgattggaggcttaacgccatgacggaggggatagaccaccggttgtcggacctcagatgataacgggactatagaaccgttagatgcatcggaaacgcctcgagcatcgccgccggagatggatgcgatggccggcatttcgccggagaagaagtagagcgcgcgtaagggtttagcttttagggcttttggaaggtttggagaagagaaaaagagggaaaagacaaaaggttctgtgttgtgtttggcaacggtatctgaagtatgctgagaagaaaacgacatgtcgtcttatagtgtacagattaaaagaaaaactacatgtcgtttatttaacaaaacgacaactgtttggggacccatatattattttaggattagaaaaatatatatatttttttactgaaaataatactaaaagttgattaaacatcatcatataagttgaaaattattttttttattacatattaactaaatataattttaaatgataaatattttttataattaaaatattcaatataatctcacataattgatcaaaattaaaatcccaacccacaaggatatacctataaaactacatattaaagaataataaaataaaaattaaaattaaaatagaatataaaaagtgaatatacaatataattt

SEQ ID NO: 244189 - DNA, 876 bp, Cannabis indica
tattgtgtgcttgaagaacagagcaggagtttgggttggttgggataatggtttaaaagaggtaatggcagattactaccgcgaattgttcacagcttctacctcgaattgggaaagggtcattgcttgtgttgacaatgttgtctcggaggatcaaaatgtggggttgacggctcttgtggatgcggcagaggtgcggaaagcagtgttccaaatgcatcctgacaagtcgccaggcccagatgggcttaatccggggttctgtcaaaaattctgggaggtggttgggacggacgtggttcggttagttcaacattttttttatgtttggtgagttccctgattttctcaaagatacgaatattgttttgatccctaagaagtctactcctgaaactatgagtgacttaaggccgatagctttgtgtaatgtcatttacaaaattgtttccaaagttatggctaataggttaaaaggggtgcttccaaatgttatttgagagacacaaagtgcttttctgcctggtcgcttaataactaataatatattaatctcttttgaggttatgcattatttgaagaggaaggggtcgataaaggatggctttatggcagtgaaaatggatatgagtaaggcatacgaccgtgttgaatggggttttctacaagccatgttgaggaagctggggtttagtgatcactagattatgttggtaatgaggtgtgtctcctcggtctcgtataatattattgcaagtggccaagacttcgatcccattatcccttcgagaggtttgagacaaggtgatcatttgtctccttacctttttattttgtgtgcgaaagactctcacttttgattaaagattatgagag

SEQ ID NO: 244190 - DNA, 888 bp, Cannabis indica
taattaattgaagaaacaaccatgttacttactggttgtaatattaaaagtggaaaattttaattgccggccaaaaatatatttacaggactatattaccaaatagtgtaaaacatagtaggccggacaaatatatatttaacacctcaaacatagaaataattttgatatgtcattaatttttgttctcctattgttaaaaagaaatattggatatgaatatatatacatatataaattaaatatatataaccatatataggaatgaaactcatccttataccatctatattagtaaagccagtttttcatggctggtgggtcataatacatatatttatcacagaacagttattctggtactgagattaatcggggagaaaaaaaacataatgataaaatgtatcaaataataataatagcactgaaactacgtacgatacataataatacttagcatatatatataaatactttacgtaccataatagagaaggcaaggtctttttttttctgacaaaaatagagaagggtcttgaaaaagcagaatccagaatggtttttgtgaagagaaaggaaagagtgagacgagtttttagattagatgaatgtaatttaatgttgtggactggtataggtataagtctatctttctaataattaagaatacggacagaataatatacatttaataaatatcttcaattttcatgtcacaaaaaaaaaaaatatcttcaattttagtcctacaaaagtaaaacctaataacattgacaaaaatttatcttgtgtcaaaaaaagaaaattataacgatcaatactaataatgaatagtactatgtatatgatatgtgagatataatatacatgttaacgaaattaggtggc

SEQ ID NO: 244191 - DNA, 1757 bp, Cannabis indica
cactgtaattgaaaaagcacggtagcgtgacttaggatttgggtgttacaagtgtattcttataattttatgatttatttttattttaaattaatttattataatttactttttcattttaaattaatttattatacttttttatttttaaatattaatttacgtggactaattaaattgtgtcatgtgtatattgtgtccatgtggacaatacaatgtgtacacatggtagttaaacatgccagttgacatgaaaaaataaatgaaaatactaaactgctaacagaatatgggttttgggagttttgccatcaaaatttgagttttgggggttaatcactaaaaaaagtgatagtataggggttatgccacaatttagacatcataaataacactatgttagataagcaatatattgtattaattattacatctaataattttaatataatataagttgtattatttaatacgtaacaaatgatctgtattagcttgtattataatatttacaaagatccggggtcaaccccaatctccgacctagatcaggaccgagacctgtaccgggaccgaaacctgaaactggaaccaacccaaacccagacccagaactagactcggaccctgaatcgggacctaggacctggacctcagacccctgacccgaacccggacccaaacctgggacctggacctaggactcaaacttggacccagaattgaacctcggacacggcatctgggacctaggattgggacccagacccaggccttgaccaaggctcaggacccagacctcgaaatctgcactcagaccagacacggacatgacctagagtcggtgttgggtcgagtttattagaaatatactataactttacacaacctattaatacaagtcaatatcaaacatactattgtattaaataacactaatacaatgtaatacgatccaacacaatataatacaatacgacataccaaacgagcctatattatcgagatttttgcaaaaaaaatatccaaaaaaaaaacaatatcggccatgaatataaaaaaataaacttattttgtttgcaaaataattttaaattgaaatgtccatagagtatcataggggtatccatagagaatcgagggttcatagcatatcaaggggtatcacgtttgcagtagattttttttaaaaataattattatgaaaaatagcatatataaaaagaaaagtactatatatttatatatattttgttaacatcttatatattaagcttatgtatgatacaatcagggccggccctggacctaggcggactaggcccatgcctagggcccactccaatccagggcccaaaaccagccagctatttaaccctttaaaaaaatagacccacaacacccatttcctccagcggcccagcctagcccaatcacccacttcctcagcccgtccaaattccaaccacatatttattgacgtgaaaaaaaaaaaaaaactgaaaagtcactctcatctctctctctcactctctctcaagtctcaatctcaatattccattctttcccaccaagctccaccaaccctccctctttctctaaaattctttctcttctcaagactctaattttccaatatctcaaaaaaaaaaatcacatttacaatttacaatttaccaactatcctaatcctcctcatcctcaattctcaatccacatcactcatcaactatcaatatacaatattataagaaaaa

SEQ ID NO: 244192 - DNA, 1680 bp, Cannabis indica
ggttggaggttgtgccgtcagactttattgcgtgtagcagtcccaacacgcttcctcccatgcggcatttaatgcgacttgattgctcaggagaaaactgacacctcgcggagatgccttaacgttactcgagcttccgggagcatatggagttccatatgccttctccgggagctacgtcctggacgctaccttatggcataaagacttagcaaatattgtaaattgcttgatccacgtgtccttatctggttggtccacgtatattgggcaaaatcaggggcaacaacctccaattacacacaaatccaattacattgtggctttccaaacgcgtcctaatgtttgtcaaaaattaatggagttttccatgtttatgatcatataaataaaatattttttaaaaaaaaataaaaaaataaaaatagaaataaaatcaagttgaacaaactagtttaaaccaatttataagcgtgaggtctaaaaaaatatttttctaagacaaaaagtccaaatcaaatatttagcaaaaaattatatgattcatatagtatttatagagaaaaaattattaggtcagtacaatgcgcacaactaatttaattttgaaattattcatgaaaataagtgtaattttttgggtaatttccttttttttccccttctttggtaaaacaatcatttcatatatggcaaatcaaaatacatatgaatgaaatgagttttgttgtccctcttttttcaaaagttctcatattattcttgatagtagtggagattttatggcataactaaattgtgataataatgtgacatttttttttcattagtgatagacatgacatacacaaataattatgaacagtatataagacatttttattagttaaagttttcattagaaggaaggaaataaatatataaagaaagtttgatgattgtaagagagtgttcgagtaaggcaaacaataaaataaaataaaatgaagttgaacttgaaagtaaacatttctaaacggcaaaaaaagttgtttggcaatgtgtctctctcagctagtggaaatggttgttgtaaacagttaccaaccgggttgtctcagctcataataataattataattgaatttaccacataacataacataaaccacacaactttaaaaaatgaatgaacttgttatgaaagtagaatatataaacttggtgaaagcctatcgcaatactgaatgctttttggctcaattaataacattatatcaccatagttactaatttttaaagcaagaaagacaaaacaaagaaacagttgtttttgttagtctgaataatcctttttcatgacatcagatcactttatactgtataatatatgaatatatttcgttggttttgaatttgaagtagtagatgctcgcaacaatatatgctagcaatttttgtttaagttaagctaaaagtttgtggcaaactagtaacacattttcttttttttttgtaagtttatttgcataatatttgttagcattattatgatattgttttattcattttatctgttattaagtattaatagtgttcgactacttataggaggttagcaaattttttataataattattaaattaaaaaatatatataatttaatacttaattatattaataataatcctatgtaacac

SEQ ID NO: 244193 - DNA, 1402 bp, Cannabis indica
tttttcttacttttaattttgtagccaagtgatgaattagcattggcataataaaatcgattacttatattaaactttcttttttttttaattttattgtgtttgcttctttcaattcatcaattatttataccaattatggtacaacactaattctcaatcttgagtcactaaacaatatgttgaaaacacctcagactgaaagagcgtataaacagcaaatgttatatatatagattcattatatgttgtccacatattaaaaaataataaagatccgtatgtcatacattgtaggaaattcaaatacccaaaaaccctacacaccctaaagccaaacaaaagaaactatgatcaattaagaccttttacaaactcttgtggaataaagttgcactcccaaaatgatcatatgccttcgatttaaccctagctcgatcttaagcttcaaaccctaaccccttgattatcctgcaaaacccggccagacacaaaaccaagaaatccagagctacaaacaacaacgatctagatcgatttttgttgtggttagaaaagaaagaaaaaaaaggaaaaaaaataatttttaaattatttatttattttattttttaaattaaaataataatttagaccaataatatttcgacacgtgacaattttaaaaaataaacagctcagttaaaattaggactaacggatatataaaaaatatcaccttgagtactattattaccgctatttttaaatgttagagacttatctatatcaaactgaactttatgatgatttttgccccaaattttccttattattattacaacaaattaatcaaacacaatcttataccaactattatttatgatcaccaataatatgagtaaatatcacattaattcccttggcctcgtaacagagggggacagcaatttcttgtgtccacaaattgaccatgcatatttattagatatttattatatttgaatttcttattgaaaatgaattaagttgtatggatgagtaaatttattacacattcaccatgcccatcaattgtggttccacatgaatgaatgtcaataatgatcccacaataatgcacattaatatggaagatcaaagggtttatactacaaaaaaattttacttttagtcacaattaaattcttcacgtatttatatttatgagttaacagaagtggtagtaacagatgtaagagaattgtaactataggtatttttcccttcaaaaataaaaataattaaaatatttaaatgtataaaatctaaaacaataaatatttatactgtaatttaccttatttttaacaccttaaaaagtagtggtactaaaatattgtaataccatattggaaatgacatttaattgattaaaaaatat

SEQ ID NO: 244194 - DNA, 891 bp, Cannabis indica
ttgtgaattactgtccttaacaaacatagactttcaatattgacacaaataatgttagttcaagaaaaatgaactctagttcaacttattatgacaagtagtttttcattctactttcttttttaattagtgtagtccaaagtctaataaatggggaaatccaaaggaaaatatatgcttaatactttctaaattacaagatgtaaattccaatgactgaatattggaatcgatcatgaccaaaatggtcatattatgataattgctctcatatgtcgtagggaaagggttcaaaatcaaattaagccaacacccacaaatgatttatatattaattaaaagaagaagaatgaatcaacaatttgactattatgagactatatatttcagtgcaaattatatagtaaaaataaaaaaataaaataaacattggttctttgggtcatctctatagcttcaaacttaagaaaaaactatataataccaacagggttcgacgggacgcaggtcttcttgtagaccaaaaagaaagaaaaaaagaattgttgaaaatactaagtggaccatgaccaagtcacaccctctctttctatagaaatacccaaacaaacagctagttaattaatccatgtatataacaagctgatcatccctattctattaagagtccttaattcaattaacttattatatatcaccccaactcaccatcacataattatatatggaggagcacaataagaatattgtttcgttggtcctccatggatgcaagttagccaaagaagtggaattgaatctcggcgatcatcagcggaacgagctagcgaatcactgcgacgagattgcaatgatcttcagccaagccaaggagtggctgcgccgaggtac

SEQ ID NO: 244195 - DNA, 2997 bp, Cannabis indica
ctacaaaatattcactaaactctcattattaatcaaaactcgttttactctcttatttgtgagtggaatggttatcactagttgatctgtatgaggaaataccttacgtgcatcacatcatcatcgtcagtgaaatttataggggattcatcagtcttagctcgttttttcatataggtgcaaaaactaacgattatttttctacttgatttatgtatctcttctatgtagtgttacttgttcgcgagagatggggtcctccagatataaccaagatgttctcaccctctgtaggtggttgttggacattttgattttgattcttgttttggggttgattctatacattccctttattcttcacgtattgtcaaaagtaacatctagaaataagactttcaatctcgtctttgagttgtcaacactcttcagtcatgtgaccaatgtccttatgaaagatgcaaatctcgtttattcctcgcattccttataggttctggtttgtaaaatacaaccctattctcattcgtaaggaatatattttcccatattttgttcagctccatatacacggtataaattaggatgtacttctcatatttttttctatttctttttgtctttggatgaattcttggactcatctttcctttcccatgtggtttgtggtttttgctcgtgtttgcaacatttgttgctacattgcttgagctaggttaattttccgagccatcttttaataattttaattcagaccaagcctcgtccttcctaacatagatgagtgccctataattaaattcatttattgatttgactaggtgcccttgtaaatcattccacaacttacttcctgcagtagacaagtcagtaattatcccagtctcgagtgttgttaactgaatatcgtcatttaagtttttcacctttactggtgtcatgctaaagcgaatcaaaaatacctttaaggatttcttaggctactgcttgatatttttcaaggaagatacctctggtcttctgtgcctcatagcttgaaattactgtttgaattctttagacaattgtttccacgaggtgatggaatgatgtaaacttatcaaaccaactacttgttgcctttgtcaggaatgtagggaacattatgcaacataagttattaaaaacattaattgctcaaaatatggtattaaaggtattcaaatgtgcaacaaggtttgtggctctgtcatattacgcaacatgagatttctcaaatccttttggaaacttcgagttcaaattatctaggtggaaaggttctgggtcatcgtctgaatcataccttagaagcttcctatattctctatcctgatatttcttaaatcgatcctccaactgaattatccatttctagatggagttatcgacatgttgagtaattttctcattttctcggtgagaatttctattcaatatctctctgagatctggtgcatttttgtttatccgctcgtgctgattagggcgccttcaatttatatggtctcacaaattgggttgatcacacatgttttggagtcgatcgaaactgctcaatggtcaacttgggaagatactttctaattagtatttttgaaagttacttatactttctttcttgcctcgatattcataccgaggtgttctctccctacacaatgggttatcccatgtatgtgacctcaaggatcgagtttgcccttgactccttaatctactttgagctgtattagcctatgattcttgtggtgagtcttaagcaggtcttcacctttcaaataagttagcgaatttacctatattcaagtatgtatacgtactatctctttcttatctcctacatccttgtggtggacgtggaggatgaccaaactagttaggcagttgatcgttcgaattttcattatttctttgagatgtctgttttcatcttactcatgttttctgtgaagttgtggcactctgattttggggacatcgtccatcaacaggaatgtcccttgtttcccgtagttgttgctcctggggtgagtgggattatttggatcttgttctttgatgttgggtccttatgcccttctaatttgtgaaccacagggccttcctcaaggtcatcgtacatgttactcttccttgactcgcgatgtttaatttagagttgctctggctacaaccatagcccgttccaactcctcattccttcagttggattctacgagccttcaacagagtttttgattttctaagtccacaatggggacgtatcttgtggggtcatatgcatctgactcccttctctcaagaatttcttcctcagagtcacttccttcagtgttcctctcagtaggaccccttccttggttggtctgagtttttacccctgactctttccctggttgacgtgttgtctcttcttccatgactgactcgtcatgctgagtattttccatgatgtaatgaaacaaatgggagatgtattttgagttttttttttttttacaaaggctctcaatgaaagtaccaaactattaactcagatttttgttaataataaatgaagccttgtaaataaagaattaacacttataattaataaatatatttatggaatacttgatcatttttatgtgggtttgtagttaaaatctacatactccacgagtcattattatctctgattatttcttgaaattatacttagaatacagaggaataactatgaaacttcactcaatcacacatggtcttttttcaatgatcgatccctttccccttaagttacgtccaatttataggggttcaatgaataacacttattctcctttgatcttatctaagtaattattcataaaatatggacaatccccacatttcatacttaaatgtggataaaataaagtaactgttgataactgccttttgttcttatctggaagcaatttgcctttactgagatgacacactccagctatggct

SEQ ID NO: 244196 - DNA, 2204 bp, Cannabis indica
caaagggtttgaatggaccagtgagtgggagcaagccttacaggctctcaagcatcatttggccaaaacctctagtccttttcaaaaaccaatagatggtgaagaattattcatctatttggcaatcaccgagcatgcggtcactgctactctagtgcattgagatgaaggaacaatttgttcgatgtattacttgagtaagcatctccttggggtcgagtctagatatcccccattaagaagctagcttactgcttaatactgagctctagattacttaggccatactttcaagctcgtccaatcaaagtgttaactgaccaaccacttaggcaggtcttgatgaagtcagaagcatcatggcgtctactcaaaggggcaatagaactccctcagtttgaaatctcctatcaactttgcctaataatcaaaggccaaacattagctgattttttcgttgagtgcattgacattgaagatgaactcatgggtagtgaagaccatagtcgcacatctgagactacaacttagaagcactctagaccctcttggaagctttatgtagatgggttcaatgcgcatgactctggcccaggactcatcctcgtaacccctaaaggatttcacacccactgtgctttacggtttgaactcaccacaacaaaaagcaaagtagagtatgaggcactcctagtgggactttgattggaactggccattaaagctgaatcactagggatcctacattgactcttaacttgtttttaatcaaatcctaggtgagtaccaagcccgagggctcaaaattatatcgtacttgagcaaagctaaagaccttttgcatagctaaaacaccactccattaataaagttccatgtgagaagaatgcaaatgtggagtccctagccaaactagctagtacaatagactctgacaccctaagcatggtttttgtcgaatatctcactcaacccagcatcaacgaagactcgaagcttattcttatgattgataattatccatcatggatgactcgatagccaataattagagcaaggtattcttgtagcagacaggaacaaagccaaaaagttgatgaggaaagctgctcactttatcaccatggatggagtgatgtacagaagaagccactcaatgtctcttctaaggtgtgtcgcacacaaagaagccaaggctcacatgatcgaagtacatgaaggcctttgtgacaaacgcgctggaaaaaagtctctaaaagaaagtattgagataatggtacttttggccaacaatgattgaagactcgataaactatgtcaaaatacgtagggctgtcccaaaagagctcaagagcatgcaaaatccatggccgtatgtggtgtaaaacttacacagtatttttgaataaaattccgtcccacagtgaaaaagtaaaagttaaaaatttcagtatgtggtgtaaaaatctcaagaaaaaatacaaagcaataaaccccacattagatacaatacgtacaactacccatttgttacctttgaaatttgatcactccccttatacttatattgttaaaatagtgattttgtcacatcatatgtttgcttatttattttgcaatgttatgatgttataatgtttctaacagttgttgcatgttaggaagcatttgcaagatgcgttgagctaatttattttcggttcatatatctcacatttacactgaactccactaaagttaactagtggtggaacaatatttctactgtcagactcatagatgttactttagatctcctaccaagccaatgtggaaggtttcggtgaagtccccattttttttttggaatttcaatggctaagccaatttcttggcagccaaacttaaactgtccaataaggctctgttggtttaactttgaaatagtttaagcacaacaagtaaaccaacgagctctatccatgtcacatctcttataagtaccaaaattggtactctcgcatctaacataagttaggtactcttgttcttgaaattttactttttgcgttctacatttgtttgagctatttatgttatagcttataggccaggattaaaaaagtaatgatgtgcttaactggtgttgtttctattcaagatgaactaagggcccgtttggttgatggtaatgggccagaaaagaatggaatggaatactaatg

SEQ ID NO: 244197 - DNA, 785 bp, Cannabis indica
acatcagaacgcgtctactagattagaaatattatactaggcttaaaaccatgataaggacacttgtaccacttcttcttcacattacgtattataaattattgtgtccaatatataattgcatctattgtttgttttttttttttatattcaaaaaaaaaaaaaataaaaaaaaatagccccaactaacaaaacaagacaattactacctactaccggcacaaaatgacatttgtctgtcccactaaaacagttaaacatgccttaagaatatatcacaattatggataattaaggcacatgaattcccacttttcagttgattctcataaactttgaaaaaagctttgttgttattaattaagcagtgccaatagctcctctataaagaacaaatatgcaaatggtactccttttaaaatgtaaattctatctctattttctcgaagcactattataatttaataatgtttaaattatatttttattaatatgtatatattaaaatataaagaattttatactcctcacttttattttgatttaattgttaaaaataattcaatcaaacataaataacatttttatttatttaggaatgactacaaaaaaaattgctacttttaaggataatttttctagtcacaacataatttttttgtaactaaatatgacttttattagtcacaacaaactgttacttgtaactaaaatatagtatttagttacaaattgtcactaatttagttttagtcacaataagtattgtgactaaaaatacattt

SEQ ID NO: 244198 - DNA, 1973 bp, Cannabis indica
aagattgatgatgtgatataaatttgcatacaatattgaaaaacaatgcacccttttaaaaggctctacctatactattttttttttttttggtatttaagatatttttttagtctaatttttttttttattattatatagttattaagatattttgtaaaattttaaaaaattttaaaaaatttaacacgccaaaagtagggttcaaacagtctattttacacgcatatataaaagagtttctcgtacaacaaactgttttaactttgttttcagtgtgttatatttttttttttaaatctctcaaaattttacagaatgtcttaaatcactataacatagacgataaataattaaactaaaatattctctcaaatgtcaaaataaatactaaatgcatggatgaatcttaagagtgcattgcataagtatctaaatattatatatatatatatatatatatatatatatataaagagaagaataaaaaaataggaaaaattgcttattgtttttgattccctttgatagtgatgtatcatcctataactatacaaaaaaaggttgttataacatcagtctcaagcattagaccccaccactacatctgatttctctatcacctttatgccataccaaagagttcttctaattttaatgtattgtttggtgcaatgtgattagttgtctattttaagtgggtcatacattttcacacaaattattttagtgtcaatatttcaaattatttttcttggttattataatttccccatttgagaaataaaacattctcattacattttactaaccatcttactcataaagttctccaataacttaataatattattatgatgtaaccttgatttaatttagagaaaacatgtaaaccaacttggtggtgggtgcttaatatgtaatgcataagtaaattttagcttaaactttattgaaaagtttattagactttttgcttttagtttatatttatttttattgtttttattaaaatatgaattgttagatagttttatattgcattagacaataagtgatcaatagctaatagacttaatgtttacgtgtattaagtttagttgaagtagaagtgtgaatttttttagtttattaaagtctttgatgagcaggctaagtctaattagtattatgtacgtagctaagtcgaacgatagttatttagagatctagaaagaaagacttaattgatagtatttcactatcaaattgtgataattatactatgaattaattagacacgtataacgaattattattatattttaaattatacacacattatatttgtatcggatttatttgataacatgttagctcaaacttacttgatagaaaagttggcttcaaatttatataatgtaagtgataattattataaattataaataaatgaaaaagtagtgggatctataacttttaagccatgtttatgacttttaatagggatatttgcggtaaaattcttttaatatttataattgttacatatatgaccctaataaaaaaaatagtagcaaaaatactttattttacaatttgttgtagttgtactattttttggctgttaagtatcaattaagctcattaagtgccagctcagaaacacgtgacgatatatttctttagcttatttagtacatagtctaataatatatcgtcatgtgtttttgagttgacacgtgatggctaaaaaaagatacgattgtaacaaaatcgtaagataagatatttttactgctactttttttttttattaaggttatatatgtaacaatcataaatgttaatagaatttcgcggcaaatatttttttaatattcatgagttgtttggttagatttttgcttttagcattttttagttttttttgacaaaattattatatttttttttttgacgcggtgatcaaaatcacacatgattaaacaaag

SEQ ID NO: 244199 - DNA, 643 bp, Cannabis indica
tatttataatctaatttattttcaaaaatacattaatattaaaaactaagcaaaattacattttgttttgcaaaattacttgggttgggcttctactcttcccttctgacgacaatcacgccttcctcaccctcagacgcagccccaatcgccgacggcttctacccaagacccagcgtcgaccactacaccgacctctcccccaattggtccgaccaccatactccgtcgcgagatcgctagaaaggacctccacagttaccggcctcgtttgcttctgctgatcgttcaagatgcttacttttggttggatttctttcctctaatggttactcccatatccaacggcaacaacatcggcatcatctctcttttcatcgcagtaggttttatctcattgttctcttttgtttatttgtttgatgaaaagaattgatctttttgtgttttgtagatttttttaccagagctaaacaagttcagaggattgaatttaatgatcaagaattcctgtttaagattttgactaccgacagaaattttgaaagatatgttcatacaagagatttccgcttctgtcattcaatgaagtcggacaccattttgcgagaatttgttgattcggattctgtgttcttggaca

SEQ ID NO: 244200 - DNA, 2364 bp, Cannabis indica
cataataagagaaggaccatcacttttcattactattattttttgttgttgataaattttaatttattatgataattctaattctatttttaatataaatgtttaatatacattaagaagacagtgtggattaatttgccaatatataccaaataatgtataaggaccacattgtattattagttctttttgttggaagtctttcaaaggatttttaacattaattcttaagaaaaagaaattcaaattgccaaaacaaatataatttgaggaggattactcgtagaaatattttgtatgcaaaatcaatataattaattaacacattatttcgagcaaaaatgaagatggcataacggtcatcatgcctaattagaaatgaagtaaagtatttaatgatattgtatattgaatctagttagtccccaaattcctcttattaagtttgtaatcagaattaaactaggattggacttagtctccaaattccactatatatataaatatatgtatgtatatataaagtaaagaaggatatgatattaatcatcattatccaacattatcgtaagagtcaacaatggtattgattaaaagtaataataatggtgctatttcaagtaaatggtgtatttttggggggttcaacattaacataatatattgataaaagaaacatgaggaaaataagtgtactattttttttttttacttaaattatatcaaacgtataaaaaatccattaatgttcagattataactttgtataatttcaaattttaattacctaaatattaggaaaacggtttttttttctttatttttttaattgaagaaaaatgttaactaaaaaaggtctctctttttttttttcttgaaacaactaaagaggtctctttactatttaataagtttatttttattttattatttggatgaaaaattagattaaatataagcagtcttggcaagacaattaaaaaaaaaaaaagtcaagcctattctatttgaccaatttttcattggaatataaaaattttatttattaaatatctttttgtagaaaaaaaatagatttattaaatagtaaagagatccttttacttttattctatttagttaaaacaaaaccattcaataataataataatattatttatttatgcaatgataattattgaattaatatttaataaaaataaataaataaatatcaataacgtgagcaataaatagacacatccaacccttgtgatcattgacaataatatacatgtatattaggagatgtcgtttttttttttaattttatttttttgtttaaaggagatgtcgttttcaaatagtttgtacatttctatcccaaatacactttaatgggtaaccaatttaaatgcatttgcaatgctatgaacaagtacatagtcaaatattgtatattgttctaatcaatctatcgattatgaaatgcaccatttgctatccccaatgaaaaagaataaaagggaaaaaatttccatccattaggtttaagttttttctctaaattcaagttaattaatattcgccaactaagccaatttctgtctatttcctaaattaccttttttatttttcaacacactcccacctctctcttcctctgctctctctctcgctctcttctctgaccaatggactaccactgatccaacccctaacatcaaatatcttgaactctctcaccaacccatgaccatcacgacatcttagactctctctccaacccacgaccaccgcagctagaccatcgcaatgtggaaggtaagattttacgccctctctttttcattttatttcattatatttttgaattaaaatgtaattgatttaagattaaaatgtatgatgaatctctgtgatttgtgagtttatgttagatttagggttgggtttggtcggatttgtgttttgggcagaaaaaaattggtttttacgccaggtccgatgtaagtctgattcaagcctgatgcctttctattgtagaactgagtaaaggtcgaagacgtaggtcgcaggtccagtccaatagtggcacgatgctaccttttttttttacttttttaatgttatagtatgttaatcctatttttggcatctttaatgtgacaaaaatattttataatttattatttaaattcgtctggggtgtttatattggtttctacattttgtgtatctgactattatattaatttatatttggaaggaaaggtataaagggtaagtttggtgactcatcgcttctctatctatctagctatgttaatctgatcttgtgtgagttgtctattatgtttgatcacaaaccgaagcaaaactttc

SEQ ID NO: 244201 - DNA, 1110 bp, Cannabis indica
tcatcattttgtagaaaaaagaaaaacaacaaccatttttaacagtgtactagattgcacttgtttatatctaattactctatttcagagcaatttgttgctatggaaacttttacttttcatttaaaactttctggaaattatttaaattaacatattcagtttatggtattccattagtggaaaagattttgctggtatcattaaatgtgcacacacacttgttggtcttctgtgagttgtatcaagtttcattttggttggaattctggcttattagctaaagcagttatgtttttgtctttgggtacgtcttgttaagttgttgaggattataatttcttcagtattttaacttgtactaataaaaagtttcagaccattgcatcttattcatctcatctcatgaatagttgaagataacttaggtgatattggcaatattggcattaaatattgttttacttgttatgacatgatcgatgaattttcatgtctttcacaatcttctctaactaagaattagtttattactcatggtttttagtagccgcatcaaaaattgtaccagaataacttagtgcaatgtcatacttaatcatcaaaaattgaactggattaacttagtgcaatgtcattcttaatcatacggttcgagcttgggcaatgaagttctcatttgctagatttgctattcttgtttgaaattgctattattaatgtttctttttcgcatgttgttaattacctgaactgaaactaagaagcattattatccatattcttacagggtgttagaagagaagtaggagttcatgcaaagacactgaacgaaatcctaaagcccaaatcgagaaagctcaactcatgccgagggcatagatggctttgattgtcaatcattgctcttgaactactcatccaaaaatgaattaaattcttcaacatcaaaaactagaaacgctcttttagtaccaaagtcagagagcaagactcagatgcagaatctttctagtttggcaaatgacactgggtcaggattagaaaaaatttctagctatatagatcaattggtcataccgaattaaggtcattgctggtgctttactt

SEQ ID NO: 244202 - DNA, 1374 bp, Cannabis indica
tcaagcttattaaagagaagatgggatttaggaatatttactctccatctagaaagggagtattaacctttgtcttgtagattagctaagagttagttagtgtgttgtctttgatgagtgttagttttgctagttgtaacagttatagtagttgaaactgtagactagtacatttcactctatataagctcagagctaaatggtcactctaaaagttcattaattttctccaattaatgaaatgcatttcaatccaattctctctctactccaaaactaaaagatgatattaataacttggataaatgatatgttttctattgattaagtcattatgtatgtgcatacttatttcttaaatatacattatgcattttctttcatacagaaaatacattccgacacatttgaccaaatcaattattatccatttgataaaaattgtcagtattattaaatggtgagatctataagagatccatatacctatgctagattttgatactaaaaccaaattgattggcttttatttcagtaatcaaacaatattagtatcttattttatatgtatactgtttttattgaaattcaatattttgccccgatgccaatcaacaatatcaattgaatatggtaaccaattatttggagatcaataatcgtccttataggacctcagatgttgatgacttcctcaatatttatggtggtgacgatagggtgacaaggttcactatatggaacagtttcacttccaataaagaagcacttttctacatcaacacctgtattccccacccttattgcaaatccatatgcatcaatgaatgttcaatcggattcatgatcatcatgccccgagatggcgatgacaagtttagggctgaagttggctatgtctgggctgctgagcactggtgccaaggtataacaactacagctctaaagagggctatttctaatggttttagagagtttccagatttgatctgaatgcaagctttggttgaaaatagagaacagagcttctcaaagggtcttggaaaagcttgggtttcaaaatgatgttgtccttagaaattatacaaggtcaagtaagagatacggtcctgtacaatcttttgtctagtgatctcatgtcttaatgaaatgtctatttatagctgtttgaaagttccattgtttttttatgctttgttgtactttatattagtcacataattagaaaaaaaaaccaaaatatctgcaatatttttttaaggaaaatattcactatatatagagcattgttatttgggtaactgtgtcttttaattatttattaaattaaaatagtgtagtacgagatattaatttttttattgtaaatggttg

SEQ ID NO: 244203 - DNA, 644 bp, Cannabis indica
tttctttctttcttcttcttcttgggtctattatggtgggtgggtctttgtctggggtggtaagtgagaggtatttatttcgtttcttacacttaatttttgtgtatcagaatgtctctactaccagaagacatctgccgctgtgtacgtacatacattaatgcaattttctatttttatatatataatatcaaaaacaaatctttaattaaatacaaatacacactctcatctttcttttcttttgaccctatttcactagttttcgacttttgctatagcctatacttttacttttattagttctgtttgaagttttgatatatacaagcctcagtgaaaattaatagtattactattaggtttgggattaacattttttccttttttttgaaacagagcattaatatattgtataataattattaaattattcggaaattacttcataattattttttaaaaatttacagtttgagctgttccaatttttatgtcaattgtagattttgattacaatttaagttgacattttattagttactaagtggtagctatatgaatttatatattactttaaagtgtaaaaataaaataaaaaataaaaaactcctaaattataagtaatgcttaattttattatt

SEQ ID NO: 244204 - DNA, 1348 bp, Cannabis indica
tatagtaatcttattttaaatctaaataaggtcaaattacttaaaatagaatattttttataaaaggaatttaatatctgaccttagatttaaaattaagataaaataatcaaaattttaaaaaaaataagaaaagaggtaagcaaaaattgatttttacctattttcaaaatcaaattacactaatatctaaaattaatttaaaaaaaaaattaatttatttctaataatatttttaggcgctactaatgcgcctgcaaagagtttttaactttccgtacgcgctccaactcccgttcgcacggatttttccagacgcgcaattgtggacgctggaggacgctcgaaaattcgtctgcaatacttttgcaggagctgtattggacttttgcagacgctaaattgcgcccgcgaaagtgctaatccttgtagtgaatgtaaggttttctcaaacccttaactgtttatttcattgttttagagaattaatatttaagatgttaattcaacatacttgttagtactaataaccaaactattgactattattctatagtacttagttttagtaatattgatgtgaaaatagttgattgcttagaatatattatttttattgtattttcttaagttatgaaaattatctaattttgataaattagattttcaaatattattgtgggatttgggcataattcatttcacaatttggtttaggtgaaaataagaatgttattattattacgagatagctatttattttataattggtcatgcacaaatatttaatgggggctctaaacctttattaagtagactagtgaataattgacacttatatgagaattaagttacgaataaatatgagatatgatatatagtaagaattaaacattttgtgtcagtggcaatataagattattttgatgcataggatggagtaatataatataatataaatgatacttaatgttaagagtaagcttggatgtattagatatgtaaaattatagagcgttatttgattcaaataaagagaagcaataaaggtactaggggtatacctattcatataagaagctaacatgaaaatagtgaagttagtggcttagttagtaatgtggaaaggtaaggcttggtatacgtgggagctatggagggttatgctcccattagtcaaaaacaaatactcaatccttatatcattgaggtttaataggaacctttcatacgtgtaggagtgcatggaactatctagaagcaagaaattcaaaattgtcaacaatcaacaaagtagagattaaatgatagaaatattggttcactttttaaggaaatcaattaatta

SEQ ID NO: 244205 - DNA, 738 bp, Cannabis indica
agtctaattgcaagcggctccgccacattaacagaaaagtcacctaaaacactagatgaccaaactagccaaactgcacctgcagcatcccgtatcactccaaccaacccgacaaagcccctcccaagaaccatttgagcatcagtcgtaagagcaaaggactcaggaagtggtggcatccaccgaatatgatcgctggaaaacatggtttgaattgcacagtcccaactaaagaccccgccgaacatgctctttgaattctaataggtgattatgggctaactctggaacaatatctaagcttgactgcatgttaccaaatagtagtgagtttcgatcatactaaaaccaccataaggtaaccaactcaaatgcctcacgagataacatttcatagaaaagagtagaatttccaacagtggtatggggcattatatttacagcccatcaaattataattgaagtctattattaaagtaatgccttgattaaaggaatgtgccctaattatattatgctaatccccgttaattgggatcaataagccaattgattaaaataaaataacttaattgaataaaatagcttgtaataataaaatttatctttaacttaaaaccgaagtaatataaatacatatccaagatcccgtaaaattttattttgcaaaatattacaagtaatttacatacaagccgacctaagcaataaaataagatttctatacaatcttcctat

SEQ ID NO: 244206 - DNA, 795 bp, Cannabis indica
caatccaccaaataattcaactaattgaaggtaaactaattcaagcacaattgtatatgaaagaagaacaaatagagttttcttcacacatgcataatggcttggcttagagtctatatgtaggagatctttaatttcctttatcttaatatgcatgtactagctaggctactagctagctctttctcttcttctttttctttctgtgtcagtataattttctctgcaacaattaataatatgtgaagttgtactattgattgattttattccttaattttatcatacacatccatgttatatgaaaataaattattatatatgtatatagcactcaaagcatgacgccatattgttaacgttcaatgtatatatatatatatccacatagaaaagaaggccgagaagttagatgcatttgattgtttatttccatatatgatcagtcatcacgattagctatatatctctattatttgtgtataaacacatacatttatatatatatatatatataatgaaataacaaaagaatgaggtaacatgggtaggtacgtaatccatttgtctactaattatatagtttaacaaatattaggactgactgtgatcacagtcactattaagccgtgaataaaaacatatatgtgtgaacttggatactattaagatttcagaaagaatatgtcatttattatacatgtaaaaaattctagctactcattatgttagtggtctaaacaaggccacattaatgttcgttaattaacctttgttttgttactactgctacaa

SEQ ID NO: 244207 - DNA, 906 bp, Cannabis indica
gaatagctaatgtcaaaaacgcctgtagcacttgatcacggtgtgacctggacgaccacataattgacaaataactctcgagttgtggttgagccacggccacgattggagttgtgttgtttcttccacggccacgattggaatttagaggatggaggaggcctgttattattgacagtagatcccgatttcttgaattgggcaagattggccatgggattgctaaaatcaagaacagaggtagtttgattgatttcaagacgcatttcgtgattctgcagcatatattgtacttcttgaagggtcaactgatctctggaggtgagattgacaaccactgattcatattcactgcccacaccagcaagaatgtagagaattaattgatcttcagagacagggtttccagctgcacgaaggctatcaacgaaacctttcatcttaagcatgtattcatcaatcgacatagaccctttcttggtgttttgtagcatcgacatcaggtgaatcatgcgagccttggatctagtgttgaagagttgttcgagggttgtccaaatcgcagcagaggtctcgcaattaacaacatgaccaatcatggattcagaaatagaggagagtagccaagaaatgaggaattgatctaaacgcatccaacgaatgaagtcagggttacgtaccagattggtggaaccctctgtttcagggattcgtggagctggtcttggtgttcgttgaagaagaatatcttcaagatcatgagctctaatggcgggaagaacttgagaccgccagaaaaaatagttacttcgatccaggcgcagaggaggaaggagcatcgtggttggaacgcctgagagaggagctgaagcttctctagaagtggccatgaacgacctgctcttg

SEQ ID NO: 244208 - DNA, 763 bp, Cannabis indica
ttacaggtttgtaaacacttagcaaagatcaatttttggtacttttggtatggcagatttggaacttaagaaataataagctttttaaatgcaagtctaacaatcttcatgatgaagaaattttttgtgaagaatatttttacaggactatcaagtagcccaactgcttacttctcattcaattcacagtaagacttcaccaaaacaagtttttcaacccctgcagtggcccaaggatcttcctcgcgccagcatcctggcttcaagctgaaagtggatgcaacttttaattccaaactcttaaaatttggttttggtgcttcaattgtcaatggtcgtaaccagaggatagcaggcctgtcaagctgcacatggggagcctcaacgccaatttttgatgaagcccaggccctctttacagctcttgagtggtgttcaacaatccgtatccccttcagtaccatcgaatcagattgtttgcaattagtttctaaaattcgaagttcctggaaggataactctgcattttccagtctcgttcatcaaattcgggagtccctatcttttttcccaaatgctaccctccagcatattcctcgtagtcaaaatcaagatgcacatctcaacggaaggaaagcattaaggttagatttggatttggtttggagagtttaatttctccttctctgtagctcttgtgtattactacttcaaaataaaaatatacatacaaatactgttggatattattttaccaggatct

SEQ ID NO: 244209 - DNA, 1312 bp, Cannabis indica
agcactaaagtgaatgctctgttagcattacagtgcatgctctgttattaagttacaccatcatattgtttattttttttccctttcaaggcgagagagtttttgtactacaagatttatgggaaacaatgcatcaccccggttgcaatcatgacaagttctgcaaagaataaccatgatcacatcacttctctttgtgaaaagcttggatggtttggaagaggtcaatcaagattccaactttttgaacaggttttttttattggaatcactatgaggatatgtagtacacttcttttgaggaagtttgcattgatgaatattgttgctcacggaagtttgtgaatttccagcctcttgttccagctgttagtgctgaagatggccaatggttagttagcaaacctttttcagttgtatgcaaaccgggtggtcatggtgtaatatggaaacttgcaaatgacaaaggcatttttaaatggttctatgatcacagaagaaaaggagcaactgttcgacaagtcaggtatgacctagtaacataatggtaatgcaacatttcatatattctactcttaatgatggtgaacctctgcagtaatgttgtcgcagccacagatttgaccctcttggcattagcaggaattggtttacatgaaggaaaggtataattttatcttgataagaaacttaaaaggaaaagaattgaacttgaaactctgtatagcatcatggctgttttctttatcttctcttctctttgaattcaataggtacttgatctgtgagaagctggcagtgtttttgttggttcataccaattttaagatattcctttttattttattttttggtttacgtaatatttaatttgaacatgtaacagaagttgggctttgcatcctgtaagcggaacttggaagctacagaaggaattaatgttcttattgagaagaaaaataatgatgggaagtgggcctatggtttatcttgcattgaatatactgagtttgaaaagtttgggattgcagatggacatcattcaaccaataggtatagtctggttcacttacaaagttggcataatcaatcaggttgtaataaggggtcagtcggattaaactaggaatgtcttcccaatatagaaaaatgagatttttcatagttattaatttctacacgttaatgataaaatggtgctacgtagttatttaacttcattcattggcactatgtgtgtgtgtatgtgatctcttaaaagtttttagtatctacatgtaattagattaagatgaattggtgctatagtaca

SEQ ID NO: 244210 - DNA, 1715 bp, Cannabis indica
gtgtaccgaagtaattacaactaacctgcataaactacttatgagcaattacaataatatgtttgctacgttgtttgcaatttttttttttttgaagatatttgaatattattgatttagttttaaggtttcagccgcaacctatctcatgatttttctctcaaacctctcttacaattttctttttacatgaagcgcaggagggggccaggtctctgagctcacagtatagcagtatagaggggtcaccttctatggagaccagaagatggaaaccacaaatctggttagtgaattcttctttaattattttcaataactgttgtatattgtttcggtaaattagctgagtattttgattattacaagatgaattgggtctttgttaaattatagttatataaatttcaatcatcgttcaacatagctaaggtgtttgattaaatgtcttaatggaaaaatgatagtattttgagagttttaaatgggtgatatctatgttagcagcagtactagctttgttattagtaaaatttatgatgtagtagaagtgtttaattaaataattcactacttaaaacagaccatgtaattccttcccttatagaaatctttaaacctcaatggaggcatggtctttcaaagagtataaacataggtaacaactactaactatgtgtatttactaatctcatattttactcttttattaaaaataaatgcaatccagttatgatggcacacaagttggtcacggtagatgtcccatattggggattccattatggccttgtgcaagctctactatgagtaatttatttcttatattttagcattacttattttttatctttatagagatgtttcatgagtaattggctaccaataactgattcaatttatattctcaaaagaataggatcatgtcttaataaatgctatttatattttggtgcaagaatcattaaaggaacttaggtaatatatattttttgtacttgtgcttgaaaattgcattttgattaattacaaattagattacttgaaagtttatgcaattgttttgctttatatgggtaaaaaaaaagataacacagggtgttactcatttatcgtcagtatcttttttgctgcaacagagaagtttattgaaccagaaaaaaactaaaaaccagcagcaacaaagggtgctacttccccagccgaacaaacccgagacacattgtttaaagcagcccaagctgcaagcttgtgtgctaccaaattggcctcacgaggcagccaaaaaacttctaaaccagtgttcaatttcagacaagaaaataaatgcagaaaaatattagaaaggttccacataggaatagagtaatttttaacagcattggcaagttgtaagcaatccgtgtagaagctagcatccttgcaattcatctttagactcaaagaaaaggcatgacagagggctaaactctcagcatggagagcagaagagaccgaaaccttggctgtgagagcttccacaaaggtgccttccttgttgaacacaaccacaaccacaaaagcacagctgccacggactgctgcatcagagaagaagttaaaatccttcagcaccatctgtggttgacaaggatggtcaagaacctccaatctttccaaagagatccttgacttgctagcaatgaagtcattcatcagcttcaaacagttggatg

SEQ ID NO: 244211 - DNA, 769 bp, Cannabis indica
atttttatatttttcatataaatttttaaatatataattcattaaaatatgaacatagtcttacttaattgtattgctaatatggccagcacaaccgctgtcccagtgatgttgattctgccatcatctcaactcacaactctaattgataacaaaagcccatcatcaccatcaacatgtgatcataatcatattatatgttatcattttcttatatcatatgactacatatagtataaattaaattaattgtactatatgttcaaaaaaaaaaaattaattgtactatatataatatgtattttgccatgacataaggttgcttataatatttatatttcacatcacgacaaaggtatgaccctctacacacaatgccggagaaagaccaaaatttaatagggactaacacatacaaaaataataataaaaaacttattaacttctagttttttgtaataatttttcacatatattttatacaaatttaaaaataaattggcaccctccgtcctgctccctctctccatcactttttctacgggtagccactctataggtagaagaagtgatggggagaaatgagaaaaaaaaattagaaatagcactacaaaaaactgttacttttagtaataattttgtagttataatataacttttttgtaagtaaatgtgacttttagttacaacaaaatattactttgtgtctaaaacataatatttagttacaaattgtcactagtttagttttagtcacaacaagtattgt

SEQ ID NO: 244212 - DNA, 1178 bp, Cannabis indica
catgtacaatcttcataggctcgtcctcacggttcctcaactttttgtgagcgcactaaaagcgtctgcaaaggtatattttaaaaaataaaatttattcgtaataacttttgtaggtgttattattgcgcctgcaaaggtttttctcttttcgtacgcgctccaaattgcgtccacacagttttttccagacgcgcaattgtggacgccaaaggacgctcaaaaatttgtccccaatacttttgcaggcgctaaattgtgcctacaaaagtgctaatccttgtagtgtgttaacaattatctctaatatatgacaattgtatttgatgctaatttcacgttcaactggagagtagacatagagcgatcaattaggagaacttatatatatgaattagtagccaaacaagatccatagctagatgtacgtgaataatcgggtcacacatcatggaatgcctttgaacaatattggcaagaaaatgatcgccacatatgattatgagatatgaacaatggacgtgaagactgctttcctaaacagcgatcttgatgaagtcacttatatggaacaaccagaagtgtatgtgtgtcagggaaagatcgaaaggtatgcaagctgctttaaatctatttatgaattgaagtaagcctctaaatcttggaatatcacctttaataagagtattattacagggtatgacttcgaacaaaatgaagaagaagtctatgtatacaaatacattaagggtaatgtaatggtattccttgttctttacattgatgacattctacttattagaaataatgtagaaatattatcagatataaagaagaggttagccgagaaattctaaatgaaggatttgggataagcaagctatgttctcaggatcaaaatctatagagatagaaagaaaagaacattagcacattctcaagcaacatatatagttaacatgctagaaagattctcaatggagaattccaagaaaggacaactaccgtctaaacatggaattagtactctatataaggatcaatgttcgaagactcttcaagaggaagaggacatgagaaagtacccttatgcatcaacaattgggagcttcatgtatgcaatggtgtgtactaggctcgacatatgctacattgtagggattgttagtcattatcaa
